United States Patent Application Publication US 2018/0126003 A1 - sequence listing, part 126

SEQ ID NO: 220892 - DNA, 2547 bp, Artificial Sequence
  derived and/or modified sequence
atggatgaggggacaggccttcagcctggcgctggagagcagcttgaggcccccgcgacagctgaggcagtacaggaacgctgtgaacccgaaacactcaggtcgaagtcccttcccgtgctctcaagcgcaagctgccgcccctcactaagccccacgagcggcgacgcaaatcccgcgtttgggtgcgtcgactcctctggacaccaggaattgaaacagggaccaaaccccctggccccctccccgagtgccccatccacttccgcaggtctgggagactgtaatcatcgagtcgatttgagtaaaaccttctccgtctcgtcagccttggctatgcttcaagaacgccgttgcttgtacgtggttctcacggactccagatgtttcttagtttgcatgtgtttccttacttttattcaggcactgatggtaagtggttatctatcaagcgtgataacgaccatcgaaagaagatactcgctgaaatccagtgagtcaggcttgcttgtttcgtgttttgacataggtaatctcgtcgtcgttgtgtttgtttcgtactttggagggcgagggagacgccctctctggctggccgtcgggggccttctgatcgcctttggtgctgctctctttgccctcccgcattttatttccccaccctatcagatacaagagcttaacgcctcagctccgaatgacggactctgtcaggggggtaattccacagccactcttgagccccccgcctgccctaaggactctggtgggaacaatcattgggtgtatgtggccctgttcatctgcgcccaaatcctgatcgggatgggaagcacccccatttacactttgggccccacttatctggacgacaacgtgaaaaaggagaactccagcctctatctggctattatgtatgttatgggggctctcggcccagccgtagggtatctgctgggtggtctcctgataggattctatgtggacccgaggaatcccgtgcacttggaccagaacgaccctcgatttatcggaaactggtggtcagggttcctcctttgcgccatcgccatgtttctagtgattttccccatgtttaccttcccaaagaaactgccaccccggcataagaaaaaaaagaagaaaaaattctcagtcgacgctgtctcagatgacgacgtcttgaaggaaaagtccaataactctgagcaggccgacaagaaggtttcatcaatgggctttggtaaggacgttcgcgacctgcctagggccgcggtccggatcctgagcaacatgactttcctctttgtatccctgagttacacagccgaaagtgccatcgtcactgctttcattactttcattcccaagtttattgagtcacagtttgggatccccgccagcaatgcttccatttataccggcgtgatcatcgtgccctccgccggtgtgggcatcgtgttgggagggtatattatcaagaagcttaagctgggggctcgggagtccgcaaagctggccatgatctgcagtggggttagcttgctgtgcttcagtacccttttcattgttgggtgcgaatcaattaacctgggtggaattaacatcccgtacaccactggtcctagcctgacgatgccccaccgcaacctcactgggagctgtaatgtcaactgcgggtgtaagatccacgaatacgagcctgtctgtggttctgatggtatcacttattttaacccttgtctagccggttgcgtaaattcaggaaatttaagtaccggtatacggaattacaccgagtgtacctgcgtgcagtcccggcaggtgataactccaccaactgttgggcagcggtctcagcttagggttgtaatcgtgaagacatatctcaatgagaatggttatgcagtgtccgggaaatgtaagcgcacatgcaacacactgattcctttcttagtctttctgtttatcgtcaccttcattactgcctgtgcccagccctccgcaattattgttactctgcgctctgttgaggacgaagaaagaccttttgctctgggcatgcagttcgtgctcttaaggactctcgcctacatcccaacgccgatctatttcggagccgtcatcgacacgacgtgtatgctgtggcagcaggagtgcggagtccagggctcttgttgggaatataacgttacaagctttcgatttgtatacttcggtctggcagctggcctgaagttcgtgggattcatttttatttttcttgcctggtacagcattaagtacaaagaagacggtctgcagcggaggagacagcgggaattccctctgtctaccgtctctgaacgcgtggggcaccctgacaatgcccgcacacggtcgtgtccggctttctctacacagggggaatttcacgaagaaacaggcttgcaaaaaggcatacaatgtgccgcccagacctaccctggcccctttcccgaagctatctcatcttccgcagaccctgggctggaagagtctcccgcagcgctggagcctccatcctag

SEQ ID NO: 220893 - DNA, 2547 bp, Artificial Sequence
  derived and/or modified sequence
atggatgagggcaccggcctgcagcctggagctggggagcagctggaggccccagccacagctgaggccgtgcaggagcgctgtgagcctgagaccctgcggagcaagagcctgcctgtgctgagcagcgccagctgccggcccagcctgagccccaccagcggagatgccaacccagccttcggctgtgtggacagcagcggccaccaggagctgaagcagggccccaaccccctggcccccagccccagcgcccccagcaccagcgctggcctgggggactgcaaccaccgggtggacctgagcaagaccttctctgtgtcctctgccctggccatgctgcaggagcggcgctgcctgtatgtggtgctgacagacagccgctgcttcctggtgtgcatgtgcttcctgaccttcatccaggccctgatggtgtctggctacctgagcagcgtcatcaccaccatcgagcggcgctacagcctgaagagcagcgagagcggcctgctggtgtcctgctttgacatcggcaacctggtggtggtggtgtttgtgtcctactttggaggccggggcagaagacccctgtggctggccgtgggcggcctgctgattgcctttggagctgccctgtttgccctgccccacttcatcagccccccctaccagatccaggagctgaatgccagcgccccaaatgatggcctgtgccagggcggcaacagcacagccaccctggagcccccagcctgccccaaggacagcggcggcaacaaccactgggtgtatgtggccctcttcatctgtgcccagatcctgattggcatgggcagcacccccatctacaccctgggccccacctacctggatgacaacgtgaagaaggagaacagcagcctgtacctggccatcatgtatgtgatgggcgccctgggccctgctgtgggctacctgctgggcggcctgctgattggcttctacgtggaccccagaaatcctgtgcacctggaccagaatgacccccgcttcatcggcaactggtggagcggcttcctgctgtgtgccatcgccatgttcctggtgatcttccccatgttcaccttccccaagaagctgcccccaagacacaagaagaagaagaagaagaagttctctgtggatgctgtgtctgatgatgatgtgctgaaggagaagagcaacaacagcgagcaggccgacaagaaggtgtcctccatgggctttgggaaggatgtgcgggacctgcccagggctgctgtgcgcatcctgagcaacatgaccttcctgtttgtgtccctgagctacacagctgagagcgccatcgtgacagccttcatcaccttcatccccaagttcatcgagagccagtttggcatcccagccagcaatgccagcatctacacaggagtcatcatcgtgcccagcgctggggtgggcatcgtgctgggcggctacatcatcaagaagctgaagctgggcgcccgggagagcgccaagctggccatgatctgcagcggcgtgtccctgctgtgcttcagcaccctcttcatcgtgggctgtgagagcatcaacctgggcggcatcaacatcccctacaccaccggccccagcctgaccatgccccacaggaacctgaccggcagctgcaatgtgaactgtggctgcaagatccacgagtatgagcctgtgtgtggcagtgatggcatcacctacttcaacccctgcctggccggctgtgtgaacagcggcaacctgagcacaggcatccggaactacacagagtgcacctgtgtgcagagccggcaggtgatcaccccacccaccgtgggccagaggagccagctgcgggtggtgattgtgaagacctacctgaatgaaaatggctatgctgtgtctgggaagtgcaagaggacctgcaacaccctcatccccttcctggtgttcctgttcatcgtgaccttcatcacagcctgtgcccagcccagcgccatcatcgtgaccctgcggtctgtggaggatgaggagcggccctttgccctgggcatgcagtttgtgctgctgcggaccctggcctacatccccacccccatctactttggagctgtgattgacaccacctgcatgctgtggcagcaggagtgtggggtgcagggcagctgctgggagtacaacgtgaccagcttccgctttgtgtacttcggcctggccgccggcctgaagtttgtgggcttcatcttcatcttcctggcctggtacagcatcaagtacaaggaggatggcctgcagaggcggcggcagcgggagttccccctgagcacagtgtctgagcgggtgggccacccagacaatgcccggaccaggagctgcccagccttcagcacccagggcgagttccacgaggagaccggcctgcagaagggcatccagtgtgccgcccagacctacccaggccccttccctgaggccatcagcagcagcgctgaccccggcctggaggagagccctgctgccctggagccccccagctag

SEQ ID NO: 220894 - DNA, 2547 bp, Artificial Sequence
  derived and/or modified sequence
atggacgagggcaccggcctgcagcccggcgccggcgagcagctggaagcccctgctaccgccgaagccgtgcaagaacggtgcgaacctgagactcttcggtccaaaagcctgccagtgctctcttctgcatcttgtcgtccgtcattgtctccaacctccggggacgctaatccagcttttgggtgtgtggatagctcaggccatcaggaattaaagcagggcccgaatcctctagctccctcaccctcggcaccttcaaccagtgcggggcttggtgattgtaaccatcgggtggacctctccaaaacgttcagcgtcagtagcgcccttgccatgctgcaggaacgccgttgtttgtacgttgtgctcaccgacagtcgatgtttcctggtatgcatgtgtttcctcacgttcatacaggcactgatggtgtccggatacctctcgtcagtcattaccacgatcgaacgcagatattctctgaaaagttcggagtccggtttgcttgtgtcctgcttcgatatcggcaacctagttgtagttgtgtttgtgtcatattttggcggacgaggccggagaccactgtggctggccgtgggcgggttgcttatcgctttcggcgcggcccttttcgccttgccacatttcatttcgcccccctaccagatccaggaactgaacgcctctgctcccaacgatggtctatgtcagggtggaaatagcacagcaactctggagccccccgcctgccctaaggactcgggcggcaacaaccactgggtgtacgtcgccctgttcatttgtgctcagattctcattggcatgggctctacacctatctacaccctgggacctacgtacttggacgacaatgtgaagaaggagaactcctccctgtacctagccataatgtacgtgatgggcgcacttggtcctgccgtggggtacctgctcgggggcctcctgattggcttttatgttgacccgagaaaccccgtccatctggaccagaatgaccccagattcatcgggaactggtggtcaggtttccttttgtgcgccatagccatgttcctggtgatattccccatgttcacattcccgaaaaagcttcctccgcggcacaaaaagaagaagaagaagaagttctccgtcgacgcggtgtccgatgacgacgttctgaaagaaaagagcaacaatagcgagcaggcagataagaaggtgtctagcatgggtttcgggaaagacgtccgagacttacccagagccgccgtgcgaattttgagtaatatgacatttctcttcgttagcctcagttacaccgccgaatcagccatcgtgactgcctttattacgttcatacccaaattcatcgagagccagttcggcatccccgccagcaatgcaagtatctataccggtgtaatcattgtgcccagcgctggggtaggaattgtgttaggcgggtacatcattaaaaagctcaagctgggagcacgtgaaagtgccaaactggctatgatctgctccggtgtgagccttttgtgcttttcgacccttttcatcgtgggctgtgagagcataaacctcggagggataaatatcccttataccacagggccttcattaacaatgccccatcggaatctgacaggtagttgcaatgtgaactgcggctgtaagattcatgaatacgaacctgtatgtggttccgatggaataacatacttcaatccttgtctggcagggtgcgtgaacagcggtaacctgtctactggaatccgcaactatactgaatgtacgtgcgtccagtcacggcaggtcattacccccccaaccgttggccaacgctctcagctgagggtagtgattgtgaaaacatacttaaatgagaatgggtacgctgtgagcggcaaatgtaagcgcacttgtaacaccctcatcccatttctcgtttttctgttcatcgtcacgtttataaccgcctgtgcacaaccttctgccataattgtgacgcttaggagcgttgaggatgaggaaaggcccttcgctctgggcatgcagttcgttctgcttcgcacccttgcttacatcccaacaccaatatactttggcgctgttattgacaccacctgcatgctttggcaacaagagtgcggcgtgcaaggctcctgttgggaatacaacgtcaccagctttagattcgtctacttcggcttagcagccggcctcaagtttgtgggcttcattttcatttttttagcctggtactctatcaagtataaagaagatggcttgcagcgcaggagacagagggaatttcccctgtctactgtctctgaaagagtgggacacccggacaacgcaagaacacgttcctgcccagcgttctccacgcagggggagtttcacgaagaaacaggtctacagaagggcatccagtgcgcggctcaaacgtaccccggcccctttcctgaagcgatttcatcaagcgccgatcctgggctggaggaatcaccagcagccttggaacccccctcttag

SEQ ID NO: 220895 - DNA, 2547 bp, Artificial Sequence
  derived and/or modified sequence
atggacgagggaaccggattacagcccggagcgggagaacagctggaagccccagctacagccgaggcagtgcaggagagatgcgaacctgaaacactgaggagtaaatctcttccagtgcttagtagtgcctcttgtcggccatctttgtcacccaccagtggcgacgccaaccccgcattcggctgtgttgacagtagtggacaccaggagctcaagcagggtccaaaccctcttgctcctagcccgtcagctccaagcaccagtgctgggcttggagactgcaaccacagggtcgacctgtctaagaccttcagtgtatcgagcgctttggcaatgcttcaggagagacgatgtctgtatgtagtcttgactgactccagatgttttctggtttgtatgtgctttctgacctttatccaagccctgatggtctcagggtatttatctagcgtgatcaccactattgagcgtcgctattcactgaaatcctctgaaagtggcctcctggtttcctgttttgatataggaaacctcgtcgttgtggtgttcgtgagctatttcggaggcaggggacggcgacccctctggctagctgtaggtgggctgctgattgcatttggcgctgcactgtttgcccttccacactttataagccctccatatcagatccaggagttgaacgccagcgcccctaacgatggcctgtgtcaggggggtaattctactgccacccttgagccgccagcctgtccaaaggacagtggcggtaacaatcactgggtgtacgtggcactgtttatctgtgcccaaatacttatcggaatggggtcaacacctatctatacactggggccaacctacctggatgacaacgtcaaaaaagaaaattctagcctgtatcttgccataatgtacgtcatgggtgccctcgggcctgcagtcgggtatctccttggcggactgctgattgggttctacgtggatcccagaaatccagtacatcttgaccagaatgacccccgattcatcgggaattggtggagcggcttcttgctgtgtgcaatcgctatgtttcttgtaattttcccaatgtttaccttccccaagaaactcccgccaaggcataaaaagaagaaaaaaaagaagttcagcgttgatgctgtaagcgatgatgacgtcctgaaggagaaatccaataacagcgaacaggccgataaaaaggtgtcatcaatgggcttcgggaaagatgttagagatcttccaagggctgccgtcagaatcctctcaaatatgacgttcttgtttgtgtctctgtcttacacagccgagtcagctattgtgacagctttcattacatttattcctaaattcatcgagagtcagttcggcattccggcttccaacgcatctatctacacaggcgtgatcatcgttccctccgctggcgtgggcatagtcctgggcggatacattatcaagaaattgaaattaggggctagagaatctgcaaaactcgctatgatttgctctggagtatccctgctttgtttctctaccctcttcatcgtggggtgtgaaagcattaacctaggcggtatcaatattccctatacgaccggtccaagtctgaccatgccgcacaggaatctgactggttcctgcaatgttaactgtggatgcaaaattcacgagtacgagcctgtctgcggaagcgatggcatcacttactttaatccctgccttgccggttgcgtcaacagtggcaacctgtcaaccggtatccgcaattatacggagtgcacatgcgtgcaaagcaggcaagtgatcacacccccaaccgtcggccagagaagccaattgagggtcgtaatagtcaagacctacctgaatgagaacggctacgctgtctcaggaaagtgtaagcggacctgtaatactctcattcctttcctggttttcttgtttatagtcacctttattactgcgtgcgcccagccgtcagccataatcgtcactttaaggtcggtggaggatgaagaacggccatttgcactaggcatgcagtttgtacttctgagaaccctcgcctatatcccaacgcccatatattttggggcagtaattgacacaacttgcatgctgtggcaacaggagtgtggggtgcaaggatcctgttgggagtacaatgtgacctctttccggttcgtgtactttggcctggcagccggattaaaattcgtcggttttatttttatttttctcgcatggtatagcattaagtataaggaagatggacttcagaggcggagacagcgcgagttcccgttatccacagtgagtgaacgggtgggccatccagataacgctaggacacgctcctgtcccgcattttccacacagggtgaatttcacgaggaaactggcttgcagaagggaattcagtgtgctgctcaaacttaccccggaccgttccccgaagcaatttcgtcaagtgccgatcccggactcgaggaatctcccgctgccttagagcccccttcttag

SEQ ID NO: 220896 - DNA, 3790 bp, Artificial Sequence
  derived and/or modified sequence
gtgcgcgtgtgtctgtttggagcggaggagaggcttgggtgacaggcgaggggtggggggaagagttcagcctgagtcacagtctcattcactgatttctcttcggctggacggaggctgcctcctcacgcggctcccaactattcccgtagctcagtgcccccctcccgccgctctactcagccaggcagacagactgacagactcgctagtcggcagcttcactcccgagggtgccgcgagcccaggcggcgaacacccggtacccctggcgcagcgaggtgggatgctgtacggacagcagcgctaagtgcccccccacccccggcgcagggtgcactcgctcctggccgcgggcccagcggcggcggcggcggcggcggcggaggggatgagcccgggacgcgcgaggcgcctgcctcaagctaccgcccggagagggacgccgagtagggctcatcgcagtaccgcgcggacccctgccccctgtggcacgcggctgcggagccttgaagccgtgtctgtgatcaggatgcactgggcgcctcgcagctggtgaggatgccctgctgcgcggccctgcgcccccagccccagtcccaggtgggcaagactgactgggcccggcttcggcccctcgtgccggtggatgaaacgtgccggagtgcttgggtgccatcagctatcaaatctgaattctaagcgccatggacgaaggcactggactgcagcccggggcgggagagcagctggaggcgccggccactgcagaagctgtccaagagaggtgcgagccggagaccctcaggtctaagagtttaccggtcctcagcagcgcctcctgccggccaagcctcagtcccactagtggagacgccaacccggcctttggctgtgtggattcttcgggccaccaggagttgaagcaaggcccgaacccgttggcccccagtccctctgccccgtccacttcggcggggctcggggactgtaaccacagggtggacctcagcaaaaccttctcggtgtcctccgccttggccatgctccaggagagaaggtgcctctacgtggtcctcacggattcccgttgcttcctggtgtgcatgtgctttctgaccttcatccaggcgttaatggtctctgggtacctgagcagcgtaattaccaccattgaaaggcgctacagtctgaagagttccgagtcggggctgctggtcagctgctttgacatcgggaacctggtggtggtggtgttcgtcagctacttcggcggccggggtcggcggcccctgtggctggccgtgggtggactcctcatcgccttcggggcagccctcttcgccttacctcacttcatctcgcccccctaccagatccaagagttgaacgcctcggcccccaacgacggcctgtgtcagggtggcaactccaccgccactttggagcctccggcctgtccgaaggactcgggaggaaataatcactgggtctacgtggctttattcatttgcgcgcagattctcattggaatgggctccacacctatttataccctgggaccaacctacttagatgacaatgtcaagaaagaaaactcctccttgtacctagccatcatgtatgtcatgggagcacttggccctgcagtgggatatttattaggtggacttcttattggtttttatgttgatcccagaaatcctgttcaccttgaccagaatgaccctcgtttcattggaaactggtggagtggattcctcctttgtgccattgcaatgtttcttgtgatattcccaatgtttactttcccaaaaaagcttccacctcgacacaagaaaaagaaaaagaaaaaattttctgttgatgctgttagtgatgacgatgttctgaaggagaaatcaaacaacagtgaacaagcggacaaaaaagtttcttcgatgggatttggaaaggatgtcagagacctaccaagagcagctgtcaggatcttaagcaacatgacattcctttttgtgagtttgtcatacacagctgagagtgccattgtaactgctttcattaccttcattcccaagttcatcgagtcacagtttggtatcccagcctccaatgccagcatctacactggggttattatcgtccccagtgctggtgttggtattgtcctcggaggctacattataaaaaaattgaaacttggtgccagagaatctgcaaaactagcaatgatctgcagtggtgtgtctttactatgtttttcaaccctatttattgttggatgtgaaagcattaatctagggggcataaacatcccttatacaacaggaccttctctcaccatgccccataggaatctgacaggaagctgcaacgttaattgtggttgtaaaatacacgagtatgagccagtctgtggatcagatggaattacatactttaacccttgtctggctggctgtgttaatagtggtaatcttagcactgggatacggaattatacagaatgcacctgtgtccaaagtcgccaagtgatcactccacccaccgtgggacagcgaagtcagctccgtgtggttattgtcaagacttatctcaatgagaacggctatgctgtgtctgggaaatgtaaacggacctgcaatactcttatcccattcttagtttttcttttcatagtcaccttcatcacagcatgtgcccaaccatcagctatcatagtaacactcaggtccgtagaagatgaggagagaccttttgcactgggaatgcagtttgttttgttgcgaacacttgcatacattcctactccaatctactttggagcagtcattgacaccacctgcatgctctggcaacaggaatgtggtgtgcagggttcttgctgggagtacaacgtgacgtcgtttcgttttgtgtattttggtttggctgccggcctcaaattcgttgggtttatttttatttttctggcctggtactccataaaatacaaggaggatggactgcagaggcggaggcagagagaatttcccctgagcaccgtgagtgagagagtgggacaccccgacaatgcccggactagatcttgcccagctttcagcacccagggagaattccacgaagagactggcctgcaaaaagggatccagtgcgcagcacagacctacccggggcccttcccagaagcaataagttcctctgcggacccggggctggaagagagccccgctgccttggagccgccctcctgaagcttgaaaatggaagaatttagttttgttggttgaattgaaaatggcgacttgagaaacaactgtgccttcttttctttctttcttttttttaacctctacagacacaatcctcaaaccaacaaaactcagtatacacagccgctattcattgagggctggatacctcaacaagactgagagcctttccccgcttctctccaagaaggagacgttcagctagatttgttcccatttccgttgtgttaattcaaagctcatgctcccctacggtacaggctgaggtacacggttagcaaaaccatgggaaggggaatggcggtgcatatcattaactaacactccaaacaaaggtgagcttgcccaggacttggcatttccaaatcaaagtttttagatatgaacacctactgtgagttctgctacaaagcacaaatgaatttgtctcaactatgcaatttgattggaaaaatgtatgtgcagcatgttacatttactttcacggaataaagcagatatgtttctgaaaagaggaa

SEQ ID NO: 220897 - protein, 316 aa, Artificial Sequence
  derived and/or modified sequence
MENVTTMNEFLLLGLTGVQELQPFFFGIFLIIYLINLIGNGSILVMVVLEPQLHSPMYFFLGNLSCLDISYSSVTLPKLLVNLVCSRRAISFLGCITQLHFFHFLGSTEAILLAIMAFDRFVAICNPLRYTVIMNPQVCILLAAAAWLISFFYALMHSVMTAHLSFCGSQKLNHFFYDVKPLLELACSDTLLNQWLLSIVTGSISMGAFFLTLLSCFYVIGFLLFKNRSCRILHKALSTCASHFMVVCLFYGPVGFTYIRPASATSMIQDRIMAIMYSAVTPVLNPLIYTLRNKEVMMALKKIFGRKLFKDWQQHH

SEQ ID NO: 220898 - protein, 316 aa, Artificial Sequence
  derived and/or modified sequence
MENVTTMNEFLLLGLTGVQELQPFFFGIFLIIYLINLIGNGSILVMVVLEPQLHSPMYFFLGNLSCLDISYSSVTLPKLLVNLVCSRRAISFLGCIIQLHFFHFLGSTEAILLAIMAFDRFVAICNPLRYTVIMNPQVCILLAAAAWLISFFYALMHSVMTAHLSFCGSQKLNHFFYDVKPLLELACSDTLLNQWLLSIVTGSISMGAFFLTLLSCFYVIGFLLFKNRSCRILHKALSTCASHFMVVCLFYGPVGFTYIRPASATSMIQDRIMAIMYSAVTPVLNPLIYTLRNKEVMMALKKIFGRKLFKDWQQHH

SEQ ID NO: 220899 - DNA, 951 bp, Artificial Sequence
  derived and/or modified sequence
atggagaacgtgaccaccatgaacgagttcctgctgctgggcctgaccggcgtgcaggagctgcagcccttcttcttcggcatcttcctgatcatctacctgatcaacctgatcggcaacggcagcatcctggtgatggtggtgctggagccccagctgcacagccccatgtacttcttcctgggcaacctgagctgcctggacatcagctacagcagcgtgaccctgcccaagctgctggtgaacctggtgtgcagcagaagagccatcagcttcctgggctgcatcacccagctgcacttcttccacttcctgggcagcaccgaggccatcctgctggccatcatggccttcgacagattcgtggccatctgcaaccccctgagatacaccgtgatcatgaacccccaggtgtgcatcctgctggccgccgccgcctggctgatcagcttcttctacgccctgatgcacagcgtgatgaccgcccacctgagcttctgcggcagccagaagctgaaccacttcttctacgacgtgaagcccctgctggagctggcctgcagcgacaccctgctgaaccagtggctgctgagcatcgtgaccggcagcatcagcatgggcgccttcttcctgaccctgctgagctgcttctacgtgatcggcttcctgctgttcaagaacagaagctgcagaatcctgcacaaggccctgagcacctgcgccagccacttcatggtggtgtgcctgttctacggccccgtgggcttcacctacatcagacccgccagcgccaccagcatgatccaggacagaatcatggccatcatgtacagcgccgtgacccccgtgctgaaccccctgatctacaccctgagaaacaaggaggtgatgatggccctgaagaagatcttcggcagaaagctgttcaaggactggcagcagcaccactag

SEQ ID NO: 220900 - DNA, 951 bp, Artificial Sequence
  derived and/or modified sequence
atggagaatgtgacaactatgaacgagttcctccttctcgggttaacgggagtccaagagttacagccatttttctttggaatcttcttaattatctacctcattaacctgatcggcaacggatccatcctggttatggtggtcctcgaaccgcagctacacagccccatgtactttttcttaggaaacctgagctgtctagatatcagttattcctccgtgaccctacccaagcttctcgtgaaccttgtctgctcgcgccgcgccattagttttctgggatgcattacccaattgcacttcttccacttcctaggaagtaccgaggccattctcctggcaattatggctttcgacaggttcgtcgccatttgcaatcctctgcgctacactgtaattatgaatccacaagtgtgcatcctgcttgcagctgccgcctggctgattagcttcttctatgctctcatgcactcagtgatgacagcccacttatccttctgcggttcacagaagctgaaccactttttctatgatgtgaagcccctgctcgagcttgcctgcagcgataccctgttgaatcagtggctcctgtctattgtcactggctcaatcagcatgggtgcgtttttcctaacattgctgagctgtttctacgtgatcggtttcctgctttttaagaaccgaagctgtagaattctccacaaggccctctctacatgcgcatcccactttatggtggtttgccttttttatggtcccgtcggctttacctacattcgccccgcatccgctacttccatgatccaggatagaatcatggctatcatgtacagcgcagttacgcctgtgctcaaccctttgatttacacactgcggaacaaggaagtcatgatggcattgaagaaaatctttggccgcaagctgtttaaggactggcagcagcatcactag

SEQ ID NO: 220901 - DNA, 951 bp, Artificial Sequence
  derived and/or modified sequence
atggaaaatgtgacaaccatgaatgaatttctgttgctggggctcactggagtgcaggaactgcagccgtttttctttggtatcttcctgatcatctatctgattaatcttatcggcaatggatctatcctggtgatggttgttctagagccacagctgcattcacccatgtacttctttttaggcaacctgtcctgcctagacatttcttactcgagcgttaccttacccaagcttctagtcaacttggtttgctctcgcagagcaatttcattcctgggctgcatcacacaattgcacttcttccactttctagggagcaccgaggccatcctgctggctattatggcgtttgacagattcgtggcgatatgtaatcccctaagatacacagtgatcatgaatccccaagtgtgcattttactcgctgctgctgcctggttgatcagttttttctacgcactcatgcactccgtgatgaccgcgcacctgtcattttgtggctctcagaaactgaatcacttcttttacgacgtgaagccactcctggagcttgcttgctccgacaccttgttgaatcaatggttgttatcgattgtgacgggtagcatttccatgggggctttctttctcacccttctgtcttgcttctatgtcattgggtttctgcttttcaagaaccggagctgcagaatacttcataaggctctttccacatgcgctagccatttcatggtggtgtgcttgttctacggtccagtagggtttacatacattagacccgctagcgctacgagtatgatccaggataggatcatggctatcatgtatagtgcggtcacacctgtgttgaatcctcttatctacaccttgaggaacaaagaggtcatgatggcactaaaaaagatcttcggacgaaagctgtttaaggactggcagcaacatcactag

SEQ ID NO: 220902 - DNA, 951 bp, Artificial Sequence
  derived and/or modified sequence
atggaaaacgtcaccacaatgaacgaattcctcctcctcggcttgactggcgttcaggaattacaacctttctttttcggtatcttcttgattatctacctgataaaccttattggtaatggaagcattctcgttatggtggttctcgaaccacagctgcatagccctatgtacttcttcctcggcaatctgagttgtttagatatcagttacagtagtgttactctcccaaaactcctggtgaacctagtatgttcccgacgggctataagctttctgggatgcatcacccagctacactttttccattttttaggaagcacagaggccattctgctagcgatcatggcgttcgacaggtttgtggcaatttgtaaccccctaagatacaccgtgatcatgaatccgcaggtctgtatcttgcttgcagccgcagcgtggcttattagtttcttctacgccctaatgcactcagtgatgacagcccacctgagtttttgtgggtcacagaaattaaaccacttcttttatgatgtcaaacctctgctggagctggcatgcagcgacactctcctcaaccagtggttgctgagtattgttactgggtcaatctcgatgggcgccttcttcctgaccctgcttagctgcttttacgttatcggcttcttgctctttaagaatcggtcctgccggattctgcacaaggccctgagcacctgcgccagccacttcatggtcgtgtgcctgttttatggtccagtgggattcacgtatatccgacctgcatcggctacctctatgattcaggacaggatcatggcaattatgtactccgccgttacacctgtccttaatcccttaatttatacgctgaggaataaagaagtcatgatggcattgaagaagatctttggcaggaagctgtttaaggattggcagcaacaccattag

SEQ ID NO: 220903 - DNA, 951 bp, Artificial Sequence
  derived and/or modified sequence
atggaaaacgtaaccacaatgaatgagtttctcctgttagggctcaccggcgtgcaagagctgcagccctttttcttcggaatttttctgatcatatatttaatcaacctgattggcaacggttcaatcctagttatggtggtgctcgagccccagcttcactctcctatgtatttttttctgggcaacctgagctgtttggatataagctacagcagtgttacactccctaagctattggtcaatcttgtctgctctcgcagggctatatccttcctcggatgtattacacagctgcacttcttccatttcctgggaagcacagaggctatcttgctggctattatggcattcgacagattcgtggctatctgcaatccattgcgatacactgtgattatgaatccacaggtgtgcatattgctggctgccgcggcatggctgattagcttcttttacgcattgatgcactccgtgatgaccgcccacctctcgttttgcggcagccagaagctgaatcatttcttttacgatgtcaagcccctgctggaactagcatgcagcgacacactgctaaatcagtggctgctttcaatcgtgacgggaagcatctccatgggtgctttcttcctgaccctcctgagttgcttttatgtgattggcttcctcctgttcaagaaccgctcctgtcgcatcctgcataaagccctgtcgacctgtgctagccatttcatggtcgtgtgtctcttctacggtccggttggttttacttacattaggccagcgtccgccacatctatgatccaggataggattatggcaataatgtattctgccgtgacacccgtcctcaaccctcttatctacacacttcgaaataaggaggtgatgatggctttgaagaagatcttcggcagaaaactatttaaagattggcagcagcaccattag

SEQ ID NO: 220904 - DNA, 951 bp, Artificial Sequence
  derived and/or modified sequence
atggagaacgtgaccacaatgaacgagttcctcctgctggggctgactggcgtacaggaacttcaacccttctttttcgggatttttctcatcatctacttaattaacctcatcggcaatggctctatcctggtgatggttgttcttgagccacagctgcactctcccatgtactttttcctgggcaaccttagttgtctcgatatctcgtactcgtctgtgacactcccaaagctgttggtcaatctggtgtgctctcgtcgcgccatctcattccttggatgcataacacaattacacttcttccacttcctgggctctaccgaggccatattgctcgctattatggcttttgacaggtttgtggctatatgtaacccgctgcgctacaccgtgattatgaatccgcaggtttgtattttgctggccgcagccgcctggctcatctcattcttttacgcactgatgcactccgtgatgaccgctcaccttagcttttgcggaagtcagaaacttaatcactttttttatgacgtgaagccacttctcgagttagcctgctccgacacactgctcaaccagtggctgctgagcatcgttacaggctctatttccatgggcgcttttttcctgaccctgctcagctgcttttacgtgatcggttttctgctgttcaaaaatcgtagctgccggattcttcacaaagcgctgtcgacatgtgcatcccattttatggtggtgtgcctgttctatggtcccgtcggttttacctatatccggccagcttccgcaacgtccatgattcaggaccgcattatggcgatcatgtattcggcggtcacacccgtcctgaatcccctcatatacacactgaggaataaagaagtgatgatggcgttgaaaaagatctttggtcggaaactgttcaaagattggcagcaacaccactag

SEQ ID NO: 220905 - DNA, 951 bp, Artificial Sequence
  derived and/or modified sequence
atggaaaatgtaactaccatgaacgagtttttgctcctcggcttaaccggggtccaggagctgcagcctttcttttttggcatttttctgattatctatctgatcaaccttattggcaatggttcaattttggtaatggtcgtcctggagccccagttacactctcccatgtatttcttcttaggaaatctgtcctgtctggatatatcctactcgtccgtgacactgccgaaactcctggtgaatctcgtgtgctcccgacgcgccatatcctttttggggtgtatcactcagctgcatttcttccacttcctcgggagcactgaggcaattctcctggctatcatggcattcgatcgatttgtcgctatttgtaaccctctaaggtacacggtcatcatgaatccacaggtgtgtatactacttgcggctgctgcatggctgatctcttttttctacgctctaatgcactcagtcatgactgcgcatctctctttctgcggaagccagaagctgaatcacttcttctatgacgtgaagcctctcctggaattggcctgtagcgatactttgctaaatcaatggttgctgagcatcgttaccggctctattagtatgggggcctttttcctgactctgttgagctgtttctacgtgattggattcttgttgtttaagaaccgaagctgccggatcctccataaagctttgagtacctgcgcttcacacttcatggttgtgtgtttgttttatggtcccgtgggcttcacatacatacggccagcctcagcaacttccatgatacaggaccgtattatggccatcatgtactcagctgtgacacccgtgttaaatcctctgatttacacactcaggaacaaagaggtaatgatggcactgaagaaaattttcgggagaaaattgttcaaagactggcagcagcaccattag

SEQ ID NO: 220906 - DNA, 951 bp, Artificial Sequence
  derived and/or modified sequence
atggagaacgtaaccactatgaacgaatttctgctcttggggctcacaggcgtacaagagctgcaaccttttttttttggaatattcctaattatttacctaattaacctcatcgggaatggctctatcctcgtgatggtggtgttggagccgcagcttcactccccaatgtattttttcctggggaacctgtcctgcctggacatttcttatagcagcgtgaccttgccaaaactgctcgttaatctggtatgtagtaggagagctatctccttcctgggttgtatcacacagcttcacttttttcactttctgggatctaccgaagcaattctgctggctattatggcctttgatcgttttgtggcgatctgtaaccccctgaggtacacggttatcatgaacccacaggtgtgtatattgctggcagctgcagcctggctcatttcatttttttacgctctcatgcatagtgtgatgaccgctcacctgtctttttgcggttctcaaaaactgaatcattttttttatgatgtgaagcccctgctcgaactggcctgttccgatacgctcctcaaccagtggttactttcgattgtcactgggtccatatcaatgggtgcattctttctgacattgctttcatgtttttacgtgattggtttcttgctgtttaagaaccgctcctgtaggatcctgcataaggcgctaagtacctgcgcttctcacttcatggtggtgtgtctattttacgggcctgtcggttttacctacatccgcccagcttcagccacctctatgattcaggacagaatcatggctatcatgtactccgcagtcacccctgtcctgaaccctctgatttatacattgcgcaacaaagaggttatgatggctctgaagaaaatatttggaagaaagctgttcaaggactggcagcaacaccactag

SEQ ID NO: 220907 - DNA, 951 bp, Artificial Sequence
  derived and/or modified sequence
atggaaaatgttaccaccatgaatgagtttttactgctgggcttaactggcgtgcaggaactgcagcctttttttttcggcatattcctcattatttacctgatcaaccttatcggtaacggctctatcctggtcatggttgtgctcgaaccacagctgcattctcccatgtatttctttctcggcaacctttcttgcctggatatttcctactctagcgtgaccctcccaaagctactggtgaacctagtctgctctcgcagagctataagctttctaggctgcatcactcaactgcactttttccattttcttgggtctactgaggcaatcttgttggccataatggccttcgaccgttttgtggccatctgtaaccctctgaggtacacagttattatgaacccacaggtttgcatcttactagcggctgctgcctggctcatcagttttttctatgccttaatgcatagcgtgatgaccgcgcacctgtctttctgtgggtctcagaaactgaatcacttcttttacgatgtgaaaccgctccttgaactggcttgtagcgatacccttcttaaccagtggctgctgagcattgtcaccggcagcattagcatgggagccttctttctgaccctgctcagctgcttctatgtgataggttttttgcttttcaaaaaccgtagttgccggatccttcataaagcactcagcacgtgcgcaagccactttatggttgtttgcctgttctatggcccagttggatttacatacattagaccagcctccgcaacctccatgatccaagaccgtattatggctattatgtattctgccgttacaccagtattgaatccgctgatctataccctccgtaataaggaagtgatgatggcattaaaaaaaatttttggccgcaaacttttcaaggattggcagcagcatcattag

SEQ ID NO: 220908 - DNA, 951 bp, Artificial Sequence
  derived and/or modified sequence
atggagaatgtgaccaccatgaatgagttcctgctgctgggcctgactggagtgcaggagctgcagcccttcttcttcggcatcttcctgatcatctacctgatcaacctgattggaaatggcagcatcctggtgatggtggtgctggagccccagctgcacagccccatgtacttcttcctgggcaacctgagctgcctggacatctcctacagctctgtgaccctgcccaagctgctggtgaacctggtgtgcagcagaagagccatctccttcctgggctgcatcacccagctgcacttcttccacttcctgggcagcacagaggccatcctgctggccatcatggcctttgacagatttgtggccatctgcaaccccctgcgctacaccgtcatcatgaacccccaggtgtgcatcctgctggccgctgctgcctggctgatctccttcttctacgccctgatgcacagcgtgatgacagcccacctgtccttctgtggcagccagaagctgaaccacttcttctatgatgtgaagcccctgctggagctggcctgcagcgacaccctgctgaaccagtggctgctgagcatcgtgacaggcagcatctccatgggcgccttcttcctgaccctgctgagctgcttctacgtgattggcttcctgctcttcaagaacagaagctgccgcatcctgcacaaggccctgagcacctgtgccagccacttcatggtggtgtgcctcttctacggccctgtgggcttcacctacatccggcctgccagcgccacctccatgatccaggaccgcatcatggccatcatgtacagcgctgtgacccctgtgctgaaccccctcatctacaccctgaggaacaaggaggtgatgatggccctgaagaagatcttcggcaggaagctgttcaaggactggcagcagcaccactag

SEQ ID NO: 220909 - DNA, 2011 bp, Artificial Sequence
  derived and/or modified sequence
aaactgtgctgccacaggcccatttttcggtgagaaagctagaaaagttggaggacttattctaagtcacgctgttaccagcctagaggggcatctcagtgttttgagcagcttctcgttttgtgagctttgtggatgagtgagcaatggagaatgtcactacaatgaatgagtttcttctacttggcctgactggtgttcaggagctgcagcctttcttctttgggattttcttaatcatttacctgataaacttgattggaaatggatctatattggtgatggttgttttggaaccacaactccactcccctatgtatttttttctgggaaacctttcttgtctggatatttcttattcttcagtgacactgcccaagctgctcgtaaacctcgtgtgcagtcgcagggctatatcttttctaggctgtatcacccagctacacttcttccactttttgggaagcacagaggccattttactggctatcatggcctttgaccgttttgttgccatctgcaatcctcttcgctacactgtcatcatgaacccccaggtgtgtattctgttggcagctgcggcctggctcatcagcttcttttacgctctgatgcattctgtcatgactgcacacctgagtttttgtggctctcagaaactcaatcacttcttctacgatgtcaagccgctcttagaattggcctgtagtgacacattactcaatcaatggcttctttccattgtcacaggcagcatatccatgggagctttctttctgactcttctctcctgcttctatgtaattggcttccttctgtttaagaacaggtcctgcagaatactccacaaggctctgtccacttgtgcctcccattttatggtggtatgtcttttctatggacctgtgggcttcacatatattcgtcctgcttcagccacctccatgattcaggaccggataatggccatcatgtatagcgccgtcacccctgtactgaatccactaatctacacccttaggaacaaagaagtgatgatggctctgaagaaaatctttggtaggaagttgtttaaagactggcagcaacaccactaggactaatgagggatatctgatttctattaagactgatttccatcacttcactgtaagaaatgatttgtttacctggtttatatttttctttcaaaaattttgagcacatattatattaggcagtgtagtaggttcaagaaacacaggagcaagcaaaacaaattccataatgtcatcaaacataaagtttaatgtgatggaggccccaaataaccaaacgcgtaagtacatatgtcaggataattcggtggcaaggagaactaaggaggtaggaagtatggggagggttagagtaggaatctgctgtgtaaaaaagaatgtggcatttctcctaggacaaaaacctttggaattttccaagtaatagaagtatcttactgaaattccatatgagataatctttatttttgcctattttttttccttttgtgtttccttcagcaggaaagtactgatgataatttttctcacaacagtttttatctagaatatcatttttgttaatcttaattcttgaagagaatttttaatgggtatttaattttagggagagatttttctagccattgaaaatatcttgtttttccccagcttattgaagtataattaacaaataaaaattgcatatatttaggcttcacaacatgatgctttagtatatgtatacattgtgaagagactaccacaatcaagctaaacctacattactgtccctgcattagtttactgttgaatactagaagttcttcattctatctaactgcattttcatacccattaagccaatgtgacaagctctttgtttcagttggagtgtttgcacaatttaaatttgataaatttttgatagaattaaatttaaatttatcctccaactaaatttttgatagaattaaatttaaatttgtcctcca

SEQ ID NO: 220910 - DNA, 2011 bp, Artificial Sequence
  derived and/or modified sequence
aaactgtgctgccacaggcccatttttcggtgagaaagctagaaaagttggaggacttattctaagtcacgctgttaccagcctagaggggcatctcagtgttttgagcagcttctcgttttgtgagctttgtggatgagtgagcaatggagaatgtcactacaatgaatgagtttcttctacttggcctgactggtgttcaggagctgcagcctttcttctttgggattttcttaatcatttacctgataaacttgattggaaatggatctatattggtgatggttgttttggaaccacaactccactcccctatgtatttttttctgggaaacctttcttgtctggatatttcttattcttcagtgacactgcccaagctgctcgtaaacctcgtgtgcagtcgcagggctatatcttttctaggctgtatcacccagctacacttcttccactttttgggaagcacagaggccattttactggctatcatggcctttgaccgttttgttgccatctgcaatcctcttcgctacactgtcatcatgaacccccaggtgtgtattctgttggcagctgcagcctggctcatcagcttcttttacgctctgatgcattctgtcatgactgcacacctgagtttttgtggctctcagaaactcaatcacttcttctacgatgtcaagccgctcttagaattggcctgtagtgacacattactcaatcaatggcttctttccattgtcacaggcagcatatccatgggagctttctttctgactcttctctcctgcttctatgtaattggcttccttctgtttaagaacaggtcctgcagaatactccacaaggctctgtccacttgtgcctcccattttatggtggtatgtcttttctatggacctgtgggcttcacatatattcgtcctgcttcagccacctccatgattcaggaccggataatggccatcatgtatagcgccgtcacccctgtactgaatccactaatctacacccttaggaacaaagaagtgatgatggctctgaagaaaatctttggtaggaagttgtttaaagactggcagcaacaccactaggactaatgagggatatctgatttctattaagactgatttccatcacttcactgtaagaaatgatttgtttacctggtttatatttttctttcaaaaattttgagcacatattatattaggcagtgtagtaggttcaagaaacacaggagcaagcaaaacaaattccataatgtcatcaaacataaagtttaatgtgatggaggccccaaataaccaaacgcgtaagtacatatgtcaggataattcggtggcaaggagaactaaggaggtaggaagtatggggagggttagagtaggaatctgctgtgtaaaaaagaatgtggcatttctcctaggacaaaaacctttggaattttccaagtaatagaagtatcttactgaaattccatatgagataatctttatttttgcctattttttttccttttgtgtttccttcagcaggaatgtactgatgataatttttctcacaacagtttttatctagaatgtcatttttgttaatcttaattcttgaagagaatttttaatgggtatttaattttagggagagatttttctagccattgaaaatatcttgtttttccccagcttattgaagtataattaacaaataaaaattgcatatatttaggcttcacaacatgatgctttagtatatgtatacattgtgaagagactaccacaatcaagctaaacctacattactgtccctgcattagtttactgttgaatactagaagttcttcgttctatctaactgcattttcatacccattaagccaatgtgacaagctctttgttttagttggagtgtttgcacaatttaaatttgataaatttttgatagaattaaatttaaatttatcctccaactaaatttttgatagaattaaatttaaatttgtcctcca

SEQ ID NO: 220911 - DNA, 1869 bp, Artificial Sequence
  derived and/or modified sequence
agcaatggagaatgtcactacaatgaatgagtttcttctacttggcctgactggtgttcaggagctgcagcctttcttctttgggattttcttaatcatttacctgataaacttgattggaaatggatctatattggtgatggttgttttggaaccacaactccactcccctatgtatttttttctgggaaacctttcttgtctggatatttcttattcttcagtgacactgcccaagctgctcgtaaacctcgtgtgcagtcgcagggctatatcttttctaggctgtatcacccagctacacttcttccactttttgggaagcacagaggccattttactggctatcatggcctttgaccgttttgttgccatctgcaatcctcttcgctacactgtcatcatgaacccccaggtgtgtattctgttggcagctgcggcctggctcatcagcttcttttacgctctgatgcattctgtcatgactgcacacctgagtttttgtggctctcagaaactcaatcacttcttctacgatgtcaagccgctcttagaattggcctgtagtgacacattactcaatcaatggcttctttccattgtcacaggcagcatatccatgggagctttctttctgactcttctctcctgcttctatgtaattggcttccttctgtttaagaacaggtcctgcagaatactccacaaggctctgtccacttgtgcctcccattttatggtggtatgtcttttctatggacctgtgggcttcacatatattcgtcctgcttcagccacctccatgattcaggaccggataatggccatcatgtatagcgccgtcacccctgtactgaatccactaatctacacccttaggaacaaagaagtgatgatggctctgaagaaaatctttggtaggaagttgtttaaagactggcagcaacaccactaggactaatgagggatatctgatttctattaagactgatttccatcacttcactgtaagaaatgatttgtttacctggtttatatttttctttcaaaaattttgagcacatattatattaggcagtgtagtaggttcaagaaacacaggagcaagcaaaacaaattccataatgtcatcaaacataaagtttaatgtgatggaggccccaaataaccaaacgcgtaagtacatatgtcaggataattcggtggcaaggagaactaaggaggtaggaagtatggggagggttagagtaggaatctgctgtgtaaaaaagaatgtggcatttctcctaggacaaaaacctttggaattttccaagtaatagaagtatcttactgaaattccatatgagataatctttatttttgcctattttttttccttttgtgtttccttcagcaggaaagtactgatgataatttttctcacaacagtttttatctagaatatcatttttgttaatcttaattcttgaagagaatttttaatgggtatttaattttagggagagatttttctagccattgaaaatatcttgtttttccccagcttattgaagtataattaacaaataaaaattgcatatatttaggcttcacaacatgatgctttagtatatgtatacattgtgaagagactaccacaatcaagctaaacctacattactgtccctgcattagtttactgttgaatactagaagttcttcattctatctaactgcattttcatacccattaagccaatgtgacaagctctttgtttcagttggagtgtttgcacaatttaaatttgataaatttttgatagaattaaatttaaatttatcctccaactaaatttttgatagaattaaatttaaatttgtcctcca

SEQ ID NO: 220912 - DNA, 2011 bp, Artificial Sequence
  derived and/or modified sequence
aaactgtgctgccacaggcccatttttcggtgagaaagctagaaaagttggaggacttgttctaagtcacgctgttaccagcctagaggggcatctcagtgttttgagcagcttctcgttttgtgagctttgtggatgagtgagcaatggagaatgtcactacaatgaatgagtttcttctacttggcctgactggtgttcaggagctgcagcctttcttctttgggattttcttaatcatttacctgataaacttgattggaaatggatctatattggtgatggttgttttggaaccacaactccactcccctatgtatttttttctgggaaacctttcttgtctggatatttcttattcttcagtgacactgcccaagctgcttgtaaacctcgtgtgcagtcgcagggctatatcttttctaggctgtatcacccagctacacttcttccactttttgggaagcacagaggccattttactggctatcatggcctttgaccgttttgttgccatctgcaatcctcttcgctacactgtcatcatgaacccccaggtgtgtattctgttggcagctgcggcctggctcatcagcttcttttacgctctgatgcattctgtcatgactgcacacctgagtttttgtggctctcagaaactcaatcacttcttctacgatgtcaagccgctcttagaattggcctgtagtgacacattactcaatcaatggcttctttccattgtcacaggcagcatatccatgggagctttctttctgactcttctctcctgcttctatgtaattggcttccttctgtttaagaacaggtcctgcagaatactccacaaggctctgtccacttgtgcctcccattttatggtggtatgtcttttctatggacctgtgggcttcacatatattcgtcctgcttcagccacctccatgattcaggaccggataatggccatcatgtatagcgccgtcacccctgtactgaatccactaatctacacccttaggaacaaagaagtgatgatggctctgaagaaaatctttggtaggaagttgtttaaagactggcagcaacaccactaggactaatgagggatatctgatttctattaagactgatttccatcacttcactgtaagaaatgatttgtttacctggtttatatttttctttcaaaaattttgagcacatattatattaggcagtgtagtaggttcaagaaacacaggagcaagcaaaacaaattccataatgtcatcaaacataaagtttaatgtgatggaggccccaaataaccaaacgcgtaagtacatatgtcaggataattcggtggcaaggagaactaaggaggtaggaagtatggggagggttagagtaggaatctgctgtgtaaaaaagaatgtggcatttctcctaggacaaaaacctttggaattttccaagtaatagaagtatcttactgaaattccatatgagataatctttatttttgcctattttttttccttttgtgtttccttcagcaggaatgtactgatgataatttttctcacaacagtttttatctagaatatcatttttgttaatcttaattcttgaagagaatttttaatgggtatttaattttagggagagatttttctagccattgaaaatatcttgtttttccccagcttattgaagtataattaacaaataaaaattgcatatatttaggcttcacaacatgatgctttagtatatgtacacattgtgaagagactaccacaatcaagctaaacctacattactgtccctgcattagtttactgttgaatactagaagttcttcattctatctaactgcattttcatacccattaagccaatgtgacaagctctttgtttcagttggagtgtttgcacaatttaaatttgataaatttttgatagaattaaatttaaatttatcctccaactaaatttttgatagaattaaatttaaatttgtcctcca

SEQ ID NO: 220913 - DNA, 2011 bp, Artificial Sequence
  derived and/or modified sequence
aaactgtgctgccacaggcccatttttcggtgagaaagctagaaaagttggaggacttattctaagtcacgctgttaccagcctagaggggcatctcagtgttttgagcagcttctcgttttgtgagctttgtggatgagtgagcaatggagaatgtcactacaatgaatgagtttcttctacttggcctgactggtgttcaggagctgcagcctttcttctttgggattttcttaatcatttacctgataaacttgattggaaatggatctatattggtgatggttgttttggaaccacaactccactcccctatgtatttttttctgggaaacctttcttgtctggatatttcttattcttcagtgacactgcccaagctgcttgtaaacctcgtgtgcagtcgcagggctatatcttttctaggctgtatcacccagctacacttcttccactttttgggaagcacagaggccattttactggctatcatggcctttgaccgttttgttgccatctgcaatcctcttcgctacactgtcatcatgaacccccaggtgtgtattctgttggcagctgcggcctggctcatcagcttcttttacgctctgatgcattctgtcatgactgcacacctgagtttttgtggctctcagaaactcaatcacttcttctacgatgtcaagccgctcttagaattggcctgtagtgacacattactcaatcaatggcttctttccattgtcacaggcagcatatccatgggagctttctttctgactcttctctcctgcttctatgtaattggcttccttctgtttaagaacaggtcctgcagaatactccacaaggctctgtccacttgtgcctcccattttatggtggtatgtcttttctatggacctgtgggcttcacatatattcgtcctgcttcagccacctccatgattcaggaccggataatggccatcatgtatagcgccgtcacccctgtactgaatccactaatctacacccttaggaacaaagaagtgatgatggctctgaagaaaatctttggtaggaagttgtttaaagactggcagcaacaccactaggactaatgagggatatctgatttctattaagactgatttccatcacttcactgtaagaaatgatttgtttacctggtttatatttttctttcaaaaattttgagcacatattatattaggcagtgtagtaggttcaagaaacacaggagcaagcaaaacaaattccataatgtcatcaaacataaagtttaatgtgatggaggccccaaataaccaaacgcgtaagtacatatgtcaggataattcggtggcaaggagaactaaggaggtaggaagtatggggagggttagagtaggaatctgctgtgtaaaaaagaatgtggcatttctcctaggacaaaaacctttggaattttccaagtaatagaagtatcttactgaaattccatatgagataatctttatttttgcctattttttttccttttgtgtttccttcagcaggaatgtactgatgataatttttctcacaacagtttttatctagaatatcatttttgttaatcttaattcttgaagagaatttttaatgggtatttaattttagggagagatttttctagccattgaaaatatcttgtttttccccagcttattgaagtataattaacaaataaaaattgcatatatttaggcttcacaacatgatgctttagtatatgtacacattgtgaagagactaccacaatcaagctaaacctacattactgtccctgcattagtttactgttgaatactagaagttcttcattctatctaactgcattttcatacccattaagccaatgtgacaagctctttgtttcagttggagtgtttgcacaatttaaatttgataaatttttgatagaattaaatttaaatttatcctccaactaaatttttgatagaattaaatttaaatttgtcctcca

SEQ ID NO: 220914 - DNA, 1869 bp, Artificial Sequence
  derived and/or modified sequence
agcaatggagaatgtcactacaatgaatgagtttcttctacttggcctgactggtgttcaggagctgcagcctttcttctttgggattttcttaatcatttacctgataaacttgattggaaatggatctatattggtgatggttgttttggaaccacaactccactcccctatgtatttttttctgggaaacctttcttgtctggatatttcttattcttcagtgacactgcccaagctgctcgtaaacctcgtgtgcagtcgcagggctatatcttttctaggctgtatcacccagctacacttcttccactttttgggaagcacagaggccattttactggctatcatggcctttgaccgttttgttgccatctgcaatcctcttcgctacactgtcatcatgaacccccaggtgtgtattctgttggcagctgcagcctggctcatcagcttcttttacgctctgatgcattctgtcatgactgcacacctgagtttttgtggctctcagaaactcaatcacttcttctacgatgtcaagccgctcttagaattggcctgtagtgacacattactcaatcaatggcttctttccattgtcacaggcagcatatccatgggagctttctttctgactcttctctcctgcttctatgtaattggcttccttctgtttaagaacaggtcctgcagaatactccacaaggctctgtccacttgtgcctcccattttatggtggtatgtcttttctatggacctgtgggcttcacatatattcgtcctgcttcagccacctccatgattcaggaccggataatggccatcatgtatagcgccgtcacccctgtactgaatccactaatctacacccttaggaacaaagaagtgatgatggctctgaagaaaatctttggtaggaagttgtttaaagactggcagcaacaccactaggactaatgagggatatctgatttctattaagactgatttccatcacttcactgtaagaaatgatttgtttacctggtttatatttttctttcaaaaattttgagcacatattatattaggcagtgtagtaggttcaagaaacacaggagcaagcaaaacaaattccataatgtcatcaaacataaagtttaatgtgatggaggccccaaataaccaaacgcgtaagtacatatgtcaggataattcggtggcaaggagaactaaggaggtaggaagtatggggagggttagagtaggaatctgctgtgtaaaaaagaatgtggcatttctcctaggacaaaaacctttggaattttccaagtaatagaagtatcttactgaaattccatatgagataatctttatttttgcctattttttttccttttgtgtttccttcagcaggaatgtactgatgataatttttctcacaacagtttttatctagaatgtcatttttgttaatcttaattcttgaagagaatttttaatgggtatttaattttagggagagatttttctagccattgaaaatatcttgtttttccccagcttattgaagtataattaacaaataaaaattgcatatatttaggcttcacaacatgatgctttagtatatgtatacattgtgaagagactaccacaatcaagctaaacctacattactgtccctgcattagtttactgttgaatactagaagttcttcgttctatctaactgcattttcatacccattaagccaatgtgacaagctctttgttttagttggagtgtttgcacaatttaaatttgataaatttttgatagaattaaatttaaatttatcctccaactaaatttttgatagaattaaatttaaatttgtcctcca

SEQ ID NO: 220915 - DNA, 1869 bp, Artificial Sequence
  derived and/or modified sequence
agcaatggagaatgtcactacaatgaatgagtttcttctacttggcctgactggtgttcaggagctgcagcctttcttctttgggattttcttaatcatttacctgataaacttgattggaaatggatctatattggtgatggttgttttggaaccacaactccactcccctatgtatttttttctgggaaacctttcttgtctggatatttcttattcttcagtgacactgcccaagctgcttgtaaacctcgtgtgcagtcgcagggctatatcttttctaggctgtatcacccagctacacttcttccactttttgggaagcacagaggccattttactggctatcatggcctttgaccgttttgttgccatctgcaatcctcttcgctacactgtcatcatgaacccccaggtgtgtattctgttggcagctgcggcctggctcatcagcttcttttacgctctgatgcattctgtcatgactgcacacctgagtttttgtggctctcagaaactcaatcacttcttctacgatgtcaagccgctcttagaattggcctgtagtgacacattactcaatcaatggcttctttccattgtcacaggcagcatatccatgggagctttctttctgactcttctctcctgcttctatgtaattggcttccttctgtttaagaacaggtcctgcagaatactccacaaggctctgtccacttgtgcctcccattttatggtggtatgtcttttctatggacctgtgggcttcacatatattcgtcctgcttcagccacctccatgattcaggaccggataatggccatcatgtatagcgccgtcacccctgtactgaatccactaatctacacccttaggaacaaagaagtgatgatggctctgaagaaaatctttggtaggaagttgtttaaagactggcagcaacaccactaggactaatgagggatatctgatttctattaagactgatttccatcacttcactgtaagaaatgatttgtttacctggtttatatttttctttcaaaaattttgagcacatattatattaggcagtgtagtaggttcaagaaacacaggagcaagcaaaacaaattccataatgtcatcaaacataaagtttaatgtgatggaggccccaaataaccaaacgcgtaagtacatatgtcaggataattcggtggcaaggagaactaaggaggtaggaagtatggggagggttagagtaggaatctgctgtgtaaaaaagaatgtggcatttctcctaggacaaaaacctttggaattttccaagtaatagaagtatcttactgaaattccatatgagataatctttatttttgcctattttttttccttttgtgtttccttcagcaggaatgtactgatgataatttttctcacaacagtttttatctagaatatcatttttgttaatcttaattcttgaagagaatttttaatgggtatttaattttagggagagatttttctagccattgaaaatatcttgtttttccccagcttattgaagtataattaacaaataaaaattgcatatatttaggcttcacaacatgatgctttagtatatgtacacattgtgaagagactaccacaatcaagctaaacctacattactgtccctgcattagtttactgttgaatactagaagttcttcattctatctaactgcattttcatacccattaagccaatgtgacaagctctttgtttcagttggagtgtttgcacaatttaaatttgataaatttttgatagaattaaatttaaatttatcctccaactaaatttttgatagaattaaatttaaatttgtcctcca

SEQ ID NO: 220916 - DNA, 951 bp, Artificial Sequence
  derived and/or modified sequence
atggagaacgtgaccaccatgaacgagttcctgctgctgggcctgacaggagttcaggagctgcagccttttttctttgggatctttctgatcatttacttgatcaacctgattggaaatggctcgatccttgtgatggtggtactcgaacctcagcttcactcccccatgtactttttcctgggtaacctctcttgcctcgacatttcctactccagcgtgacattacccaaactgctagtaaatctggtgtgttcccgcagggctatctcctttctgggttgcattactcaactgcacttttttcacttcctgggttcaactgaagccatcctgctggccatcatggcttttgacagatttgttgccatatgtaatcctcttcgatatactgtcatcatgaatccccaggtgtgtattctccttgcagctgctgcgtggctcatcagcttcttctatgccctcatgcacagtgtgatgaccgctcacctctcattctgtggctcccagaaactgaatcattttttttatgacgtgaaaccactcctggaactcgcgtgttctgacactctcctgaatcagtggctactaagcatagtgactggcagcatcagcatgggtgccttcttcctaaccttattgagttgcttttatgtcatcgggtttttactgttcaaaaaccgatcatgccggattctccacaaggctctctctacctgtgcctcccactttatggttgtatgcttgttttacggacctgtggggtttacgtatattagaccagcaagtgctacttcgatgattcaggatcgaataatggctatcatgtactccgcggtgaccccagttctgaaccccctgatctacacacttcgcaacaaagaggtgatgatggccctgaagaagatctttggtcggaaactgtttaaggattggcagcagcaccactag

SEQ ID NO: 220917 - DNA, 951 bp, Artificial Sequence
  derived and/or modified sequence
atggagaacgtgaccaccatgaacgagttcctgctgctgggcctgacaggcgtccaggagctacagccttttttcttcgggattttcctcatcatctacttaattaatcttattggtaacgggtcaatcctggtcatggtagtgctagagcctcagcttcactcccccatgtactttttcctgggtaatctttcttgtcttgatatctcctacagctccgtgaccctaccaaaattactggttaaccttgtatgcagcaggcgggccatatcatttctgggctgcattacccaattgcacttcttccacttcctggggagcacggaggcaatcctattggccattatggcctttgatagatttgtggcgatctgtaatccgctgcgctacacagtgatcatgaacccgcaggtctgcatattactggccgctgctgcctggctaataagcttcttttatgctcttatgcatagtgttatgactgcccatctgtctttttgtggaagccagaagttaaatcacttcttctacgacgtgaaaccattattggagctggcctgttctgacaccctactgaatcagtggctgctcagcattgtgacaggtagcatcagtatgggggcgtttttcctcacactattgtcatgcttttacgtcatcgggttcctgctgtttaaaaatagatcttgtaggatcctacataaggctctgagtacctgtgcaagccatttcatggttgtgtgtttgttctacgggcccgtcggtttcacttatatccgtcccgcctctgctactagtatgatccaggacagaatcatggcaataatgtattctgcggtaactccagtgctaaacccattgatctatactctgaggaacaaggaggtcatgatggctctgaagaaaattttcggaagaaaacttttcaaggattggcagcagcaccattag

SEQ ID NO: 220918 - DNA, 951 bp, Artificial Sequence
  derived and/or modified sequence
atggagaacgtgaccaccatgaacgagttcctgctgctgggcctgacaggagtccaggaactccaaccattcttttttgggatattcttaattatatatctgatcaacttgatcggaaatggttccatactcgtgatggtggtgctagagcctcagctgcatagtcctatgtactttttccttgggaatctgagttgtctcgatatctcctactcctcagtcaccttacccaagcttctcgtcaacctcgtatgcagtcgccgggcgatctcctttctgggctgtatcacgcagctgcattttttccactttctgggtagtactgaagccatcttgctagccattatggcctttgacagatttgtcgctatttgcaatccattgcgctataccgtcattatgaatccccaggtgtgtatcctgctcgccgctgccgcttggttgatctcgttcttctacgcgctcatgcactccgtcatgacagcccatctgagcttctgcgggagccagaagctgaatcacttcttttatgatgtcaaaccactgttggagctcgcatgctcagacacgctgctgaaccagtggttgctgtccatcgtcacagggtccatttctatgggagctttttttctaacattgctttcatgcttctacgttattggttttttgctgtttaaaaataggtcatgtagaattctacacaaagcactgtccacctgcgcgagtcatttcatggtagtctgtctgttctatggaccagtgggattcacctacatccggccggcctccgccaccagcatgatacaggaccgaattatggccatcatgtactccgcggtgactcctgtgctgaacccacttatctacacattgagaaacaaagaagtaatgatggcccttaaaaagattttcggccggaagcttttcaaggattggcagcagcaccactag

SEQ ID NO: 220919 - DNA, 951 bp, Artificial Sequence
  derived and/or modified sequence
atggagaacgtgaccaccatgaacgagttcctgctgctgggcctgaccggggttcaagagctgcaacccttcttcttcggcatcttcctgattatatatctaatcaacctgattggcaacggctccattctcgttatggttgtactggaacctcagctgcacagtccgatgtatttctttctcggcaatctcagctgtctggatatctcctatagcagcgtgacactgcctaagttgttagtgaaccttgtgtgctctagacgagcgattagctttctgggatgtatcacccagctgcacttctttcattttctaggcagcactgaggccatcctgttagcaataatggcatttgaccggttcgtggctatttgcaatccgctgaggtacaccgtcattatgaaccctcaggtttgcatcctccttgcagccgctgcatggctcatcagtttcttctacgctctcatgcattccgtgatgacggctcacctaagcttttgtggtagtcagaagttgaatcattttttctacgacgtgaagccacttctggagctggcatgctccgacacactgctgaatcagtggttgctgtctatcgttaccggctctatctcgatgggtgctttcttcctgacattgctgtcatgcttctacgttatcggattcctgctgttcaaaaaccgcagctgccgaatcctccacaaggccctctcgacatgcgcatcacactttatggtcgtctgtctattctacggacccgtggggttcacttacatccgcccggcctcagcaacctccatgatccaggataggatcatggccattatgtattcggctgtgacacccgtgctcaatccccttatttataccctgcgaaataaagaagtgatgatggcactgaagaaaatctttggccgtaaattatttaaggattggcaacaacaccattag

SEQ ID NO: 220920 - DNA, 951 bp, Artificial Sequence
  derived and/or modified sequence
atggagaacgtgaccaccatgaacgagttcctgctgctgggcctgacgggggtgcaggagctacagccattcttttttggaattttcttgattatctatctcatcaatctgatcggaaacggctccatcctagtcatggtggtgttagaacctcagcttcattcacctatgtatttctttctgggaaacctcagctgtcttgatatcagctatagctccgtaacattacccaagctgctggtcaatctggtatgtagtaggcgagcgatctctttcctggggtgtattactcaactccactttttccatttcctggggagtaccgaagctatactgctcgctataatggcctttgaccggtttgtagctatctgtaatccccttcgctacactgtgatcatgaatccacaagtttgcatcctcctggccgctgccgcttggctgataagtttcttttatgccttgatgcattcagttatgaccgcccacctgtctttttgtgggtcccagaagcttaatcattttttctacgacgtgaaacccctgttagagttggcctgctccgacacactcctgaaccagtggcttctgtccatcgtcacagggtccatctccatgggagcattcttccttacgcttttgtcatgcttctatgtgatcggttttctgctcttcaaaaatagatcttgccggatcctgcataaagcactgtcgacgtgtgcgtcccatttcatggtcgtttgccttttctacgggccagtaggcttcacttacattagacccgccagtgcaacctcgatgatccaggataggataatggcaatcatgtacagcgcagtcactccggtgctgaaccccctgatttacacacttagaaataaggaagtaatgatggctctgaaaaaaatctttggtcggaagctgttcaaggattggcagcaacaccattag

SEQ ID NO: 220921 - DNA, 951 bp, Artificial Sequence
  derived and/or modified sequence
atggagaacgtgaccaccatgaacgagttcctgctgctgggcctgaccggcgtccaggagttacaacccttttttttcggtattttcctgattatataccttataaacctgataggaaatgggtccatcttggtgatggtagtcctggaaccacagcttcacagtccaatgtatttttttctgggaaatctgtcctgcctcgatatttcttactcttccgtgaccctgcccaagctacttgtcaatttggtgtgcagcaggcgagccatctccttcttagggtgtatcacccaactgcattttttccatttcctgggttccacagaggcaatcctgcttgcaatcatggcctttgatcgtttcgtggctatctgtaatcccctcagatacaccgtgatcatgaacccccaggtatgtattctgctagctgccgcagcctggctgatatcctttttctatgccctgatgcactcagtgatgacagcacacctttctttttgcggttctcagaaactgaaccatttcttttatgacgtaaaaccgctgctggagctggcctgctctgacactctgctcaatcaatggttactgagtattgtgacgggctctatatcaatgggtgcgttcttcctcacccttctgtcctgcttttacgtcataggattcctgctgtttaaaaacagaagctgtcgtatcctgcataaagccctttcaacgtgcgcttctcactttatggtggtttgtttgttttacggacctgtaggcttcacttatatccgcccggctagtgcaaccagtatgattcaagacaggataatggccatcatgtacagcgccgtcactccagtcctcaatcctttaatctatacactgcggaacaaggaggtgatgatggctctgaagaaaatttttggaagaaaattgttcaaagactggcagcaacatcattag

SEQ ID NO: 220922 - DNA, 951 bp, Artificial Sequence
  derived and/or modified sequence
atggagaacgtgaccaccatgaacgagttcctgctgctgggcctgactggcgtgcaagagctccagcccttcttcttcggaatctttttaattatctacctgatcaatctgataggcaacggttctatcctggtcatggtcgttctggagcctcaactgcattcgcccatgtacttttttctcggcaacctgtcttgcttggatattagctattctagcgttactttgccgaagctcttggtgaatctagtctgttcaaggcgagcgatctctttcttgggatgcataacccaactgcacttctttcacttccttggatctacagaagctattctgctggcaatcatggcattcgaccgctttgtcgctatctgcaaccccctgcgctatacagtgataatgaacccgcaagtgtgcatattacttgctgctgctgcctggctcatcagcttcttctatgccctcatgcattcggtgatgacggctcacctgagcttttgcggctcccaaaagctcaaccattttttctacgacgtgaagcctctgctcgagttagcctgtagcgatactttgctgaaccagtggctcctgtcaatagtgacaggatcgatcagcatgggcgctttctttttaacccttctttcgtgtttctatgttatcggcttcctgctttttaaaaacagaagctgtagaattttacataaagctttatctacgtgtgcttcacatttcatggttgtatgcctcttctatggcccggtgggctttacctatatacggcctgcttccgctacaagcatgatccaggataggattatggccatcatgtacagtgctgttactcctgttttgaatcctttgatctacacgctgaggaataaagaagttatgatggctctgaagaagatttttggccggaaactttttaaagactggcagcagcatcactag

SEQ ID NO: 220923 - DNA, 951 bp, Artificial Sequence
  derived and/or modified sequence
atggagaacgtgaccaccatgaacgagttcctgctgctgggcctgaccggggttcaggagcttcaacctttctttttcggaatatttttaatcatttacctcattaatctaattgggaacggcagcatcctcgtgatggtggtgctggagccacagctacactctcccatgtacttcttcctagggaacctctcctgtctggacatctcttatagctcagtgacactccccaaacttctggtgaacctagtgtgtagtcggagggctattagctttctgggttgcataactcagttgcacttcttccacttcctaggcagcaccgaggccattctccttgccatcatggcgttcgacagattcgtggccatttgcaatcccttgagatacacagttattatgaacccccaagtgtgtatcctgctggccgctgccgcctggttgatctcattcttttatgccctgatgcattcagtgatgactgcccatctcagcttctgtggatcacaaaagttgaatcactttttctacgacgtgaaaccgctgctggagctggcatgttctgacacgctgcttaaccagtggcttttgtccattgtgactggaagtatatctatgggagcattctttcttaccctcctgagctgcttctacgtgatcggcttcctcctcttcaagaatagaagctgtcggatccttcacaaagctctctcaacttgcgccagccacttcatggtggtgtgcctcttctatgggcctgttggcttcacatacatcaggcctgcttctgcaacgagtatgatacaggaccgaatcatggccatcatgtattctgcagtgacacctgtgcttaatcctctaatatataccctcaggaataaagaggtcatgatggccctgaaaaagatattcgggcgtaaattgtttaaggactggcagcaacatcattag

SEQ ID NO: 220924 - DNA, 951 bp, Artificial Sequence
  derived and/or modified sequence
atggaaaatgtgacaactatgaacgaattcttactgttgggactgactggagtgcaggagcttcagccgttctttttcggtatcttcctgatcatctacttgattaacttgataggaaacggcagcattttagtgatggtagttctggagccccagctccatagtccaatgtacttctttctgggcaacctgagctgcctcgacatttcctatagcagcgtaaccctccccaagctgctcgtcaatctggtttgttcaagaagagccattagttttctcggctgtattacgcagttacatttcttccatttcttaggcagtacagaggcgattttgctggctattatggcttttgacaggttcgtggccatctgcaatcccctgagatacaccgtcataatgaatccacaggtgtgcatcctcctcgccgctgccgcatggctgatctcatttttctacgcgctcatgcacagcgttatgactgcccaccttagcttctgcgggtcccagaaacttaaccattttttctacgacgtgaaaccactgcttgaactggcctgcagcgataccctcttaaatcagtggctgctgtcaattgtgacaggctctatctctatgggtgccttcttcctgactttgctcagttgcttttatgttatagggtttttattgtttaaaaacaggtcctgccggatactgcacaaggctcttagcacttgtgccagccactttatggttgtctgcttgttctatggccctgtggggtttacatacattcgcccagcctctgcaactagcatgatccaggaccgcatcatggctatcatgtacagtgcggttacgcctgttttaaaccccctaatctacacacttagaaataaggaagtcatgatggctctgaaaaagatcttcggaaggaaactattcaaggattggcaacaacaccattag

SEQ ID NO: 220925 - DNA, 951 bp, Artificial Sequence
  derived and/or modified sequence
atggaaaatgttaccaccatgaatgagttcttgctgttgggattaacaggagttcaggagctgcaacctttcttctttggcatctttctgatcatatacttaattaacttgatcggcaacggaagcattctcgtcatggtggtgctggaacctcagctgcatagccctatgtacttctttcttggaaatctgtcttgcctcgacatttcttattcctcggtaacattgccgaagctgctcgtgaatctggtgtgctctaggagggctataagcttcctgggctgtataacacaactacactttttccactttcttgggtcgaccgaggccatactgttggctatcatggcctttgaccgcttcgtggccatttgtaacccacttcgctacaccgtgattatgaatccccaggtctgtattctgttggccgcagcagcctggctgatcagtttcttttacgctttgatgcacagcgtaatgaccgcccacctctctttttgtggcagccagaaactgaatcactttttctatgatgtgaaacctctgcttgagctggcttgctcagatacacttttaaaccagtggctgctgtccatcgtgacaggctccatttcaatgggggcattcttcctgactctgctcagttgcttttacgtgattggttttctgttatttaagaacagaagctgccggatcctgcataaagccctcagcacctgcgcatcccactttatggtggtttgtctgttctacggaccggtgggctttacctacatacgtcccgcttctgctacatccatgatccaggatcgtataatggcaatcatgtactctgcagtgactccggtgctcaatcctctgatctatactctgcgcaacaaagaagtgatgatggcacttaaaaagatattcggcaggaaactctttaaggattggcaacagcaccattag

SEQ ID NO: 220926 - DNA, 951 bp, Artificial Sequence
  derived and/or modified sequence
atggagaacgtgacaactatgaatgagttcctgttactgggcctaacaggcgtgcaggagctccaacccttcttctttggaatctttctgataatttacctgattaatttaataggtaatgggagtatcctggtaatggttgtgttggagccccagttacatagtcctatgtactttttcctgggaaatctgagttgtctcgatatctcctacagcagcgtaactctccccaagctcctggtcaatttggtgtgcagtcgcagggccatcagcttcttgggctgtattacgcagttgcacttcttccacttccttggctctactgaagccatcctcttagctatcatggccttcgatcgcttcgtggccatctgcaatcccctgcgatacacagtgattatgaatccccaggtatgcattctgctcgcggcagctgcttggctgataagtttcttttacgccctcatgcattcagtgatgaccgcccacctatccttttgtgggtcacagaagttgaatcattttttctatgatgtgaagccgctgctcgagctcgcttgctcggacactttgctcaatcagtggctgctgagcattgtcacgggaagcatatccatgggggcattcttcctgacattactgagctgcttctacgtcataggattcctgttgttcaagaatcggtcttgtcggattctacataaggccctttcgacgtgcgccagccactttatggtagtgtgtctgttctacggccctgtcggtttcacatacattcgccctgcaagtgccacgtccatgatccaagaccggatcatggccatcatgtattcagccgttacccctgtgctgaaccccttgatttacactctgcgaaacaaggaagtgatgatggcacttaaaaagatttttggtcggaagctctttaaagattggcagcagcaccattag

SEQ ID NO: 220927 - DNA, 951 bp, Artificial Sequence
  derived and/or modified sequence
atggaaaatgtcacaactatgaatgagttcctgctgctgggccttacaggggtacaagagctgcagccgttctttttcggaatttttctaataatctacctgattaacttgatcggaaatggaagcattttggtgatggtcgtactggagccgcagctgcactcccctatgtatttctttttgggaaacttgtcatgtcttgacatcagctactcatccgtcacccttccgaaattactcgtgaatttggtatgtagtcgtagagccatctccttcttgggctgcattacccagttgcacttttttcacttcttggggtctacagaggccattctattagcaataatggcgtttgatagattcgtcgccatctgcaatccattgcgctatactgtcataatgaacccacaggtctgcatcctgttggccgcagcggcatggttaatcagcttcttttacgcacttatgcactctgttatgacagcgcatttatccttctgcggctcacagaagttaaatcacttcttctacgatgtcaaacccctgctggagttagcctgctcagacaccctgcttaaccagtggctcctttctatcgtcaccgggagtatttctatgggtgctttttttctaactctgttgtcctgcttctatgtgataggcttccttctgttcaaaaaccgctcctgcaggattttgcacaaggcactttcaacatgcgccagtcactttatggtggtgtgcctgttctatggccctgtgggatttacatatatccgcccagcctccgccacatctatgatccaggataggatcatggctatcatgtatagtgctgttacccctgtcctgaatccattgatctacaccctgagaaataaagaggttatgatggcactgaagaagatattcgggaggaagcttttcaaggattggcagcagcatcattag

SEQ ID NO: 220928 - DNA, 951 bp, Artificial Sequence
  derived and/or modified sequence
atggagaatgtcactacaatgaacgaatttctgctcctgggcctgaccggagttcaggagttacaaccctttttttttggcatatttttaattatttacctgatcaacctgattgggaacggctccattctcgtgatggtggtccttgagccccagctgcactccccaatgtacttctttttgggtaaccttagttgcttggacattagctactctagtgtcaccctcccaaaactgctcgtcaacctcgtctgttctcgtcgcgctattagcttcctgggctgcatcactcagctccatttttttcactttctggggagtactgaagccatcctgctagccattatggctttcgaccggtttgttgccatatgtaacccactcaggtacactgtcataatgaatccgcaggtatgtattctactagctgctgcggcatggctcatatccttcttctacgccttgatgcattcggtgatgacggcccatctctccttttgcggtagccagaaacttaatcatttcttttatgacgtcaaacctttgttggagctggcctgttcagacacattactgaatcagtggctcctgtcgatagtgaccggatcaatctctatgggcgcattcttcttaaccctactctcgtgtttttacgtgataggctttctgctcttcaaaaacaggagctgccggatcctccacaaagctttgtccacctgtgcctcacactttatggtggtctgcctcttctacggtccagttggtttcacctacatacgccctgccagcgcaaccagcatgatccaggacaggattatggcaatcatgtactcggcagtcacaccagtgttgaaccccctgatatatactctgaggaacaaagaggtgatgatggccttgaagaaaatcttcggcaggaaactttttaaagactggcagcagcatcattag

SEQ ID NO: 220929 - DNA, 951 bp, Artificial Sequence
  derived and/or modified sequence
atggagaacgtgactacgatgaacgagtttttactcctcgggctcaccggcgtacaggagctgcaaccctttttcttcgggatttttctgatcatttacctcatcaacctcataggcaatggaagtattttggttatggtggtgctcgagccgcaactccattctccgatgtatttcttcctcggtaacctttcttgcctggatatctcctattccagcgtgacgctgccgaagctgctggtgaacttggtgtgctcgagacgggctatctcctttctggggtgtataacacagctccacttcttccatttcctcggctccaccgaagccatactgcttgccattatggcctttgacaggttcgttgccatttgtaacccattacgatatactgtgattatgaacccccaggtttgcatactgctggcagctgccgcttggcttatttcttttttttacgctcttatgcattcagtgatgactgcccacctgagtttttgtgggagccagaagctgaaccatttcttttacgacgtcaagcccctactggaactggcttgctctgacacgctccttaaccagtggcttctatctatcgtcacagggagtatttctatgggcgctttctttttgacactgttatcttgcttttacgtgatcggcttcctcctctttaaaaatcgaagttgccggatcctgcacaaagctctctcgacttgtgcttcccactttatggtggtgtgcctcttttatggaccagttggctttacctacatcaggcccgcttccgcaacatctatgattcaggatcggataatggctatcatgtacagcgcagtcaccccagtcctgaatcccctcatttacactctacgcaataaggaggttatgatggcgttaaagaaaatttttggcagaaaattatttaaggactggcaacagcatcactag

SEQ ID NO: 220930 - DNA, 951 bp, Artificial Sequence
  derived and/or modified sequence
atggagaacgtaactactatgaacgaatttctactgctcgggttaaccggagttcaagagctccagcctttcttcttcggaatcttcctcattatttaccttattaacctgatcggcaatgggagtattctggtgatggttgtcctggaaccacaacttcattctccaatgtactttttcttggggaatctgtcatgcctggacatctcttattcatccgtgacactaccaaagttattggtaaacctggtgtgtagtcggagggccatctcatttttgggttgtatcacccaactgcacttttttcatttcttaggatctacagaagccatcttgctggccattatggccttcgacaggttcgtcgccatctgtaatcccctgaggtacacagtcatcatgaacccacaggtctgtatcctgcttgccgctgccgcttggctgatttcatttttctatgcactcatgcattccgtaatgacagcacatctgtccttttgcgggtcacagaaacttaaccatttcttctatgatgtcaagcccctgctggaactggcatgctcagataccctgctgaaccagtggctgctcagtatcgtcaccggctcaatttctatgggggcattctttttgactctgctaagttgtttctatgttataggattcctcctcttcaaaaataggagttgcaggatcctgcataaggcgctctcgacctgtgcttcccattttatggtggtatgcttgttctatggacccgtggggttcacatatattaggcccgcatcagccacctctatgattcaagacaggattatggctatcatgtactccgctgtcacccccgtccttaatccactaatttatactctgaggaataaagaagtgatgatggcgcttaagaaaatttttggacgtaagttgttcaaagactggcagcagcaccattag

SEQ ID NO: 220931 - DNA, 951 bp, Artificial Sequence
  derived and/or modified sequence
atggaaaacgtgaccacgatgaacgagtttctgctgttaggtctcactggtgtccaggagctgcagccctttttcttcgggatttttttgatcatttatttaatcaacctgatcgggaacggctcaattcttgtgatggtcgtcctcgagccacaactacacagccccatgtacttttttctgggaaatctgtcttgtctcgacatcagttacagcagcgtgacccttccgaaattgttggtcaatctcgtgtgtagccgcagagccattagttttttaggctgtataactcagctccatttcttccatttcctcggcagcacagaggccatcttgctggccatcatggcctttgacaggttcgtggcgatctgcaaccctcttcgctatactgttattatgaatcctcaggtgtgtattctgctggctgctgccgcatggcttatcagcttcttttatgccttgatgcactctgtgatgacagcgcacctttccttttgtgggtcccagaagttaaatcatttcttctacgacgtcaagcctctcctcgagttggcttgcagcgatacgctgttgaatcaatggctcctgagcattgtgaccggatcaatttccatgggagcatttttccttacgctgctgagttgcttctacgtcattggtttcctcctgttcaaaaaccggtcatgcaggatccttcataaagcattaagcacatgcgcctcccacttcatggtggtgtgcctgttctatgggcctgtgggatttacctacatcagacctgcctctgctacttctatgatccaagatcgaattatggccataatgtactccgccgtgacccctgtcctaaaccctctgatttacacgctcaggaataaggaagtgatgatggccctgaagaagatcttcggcaggaaactgtttaaagactggcagcagcatcattag

SEQ ID NO: 220932 - DNA, 951 bp, Artificial Sequence
  derived and/or modified sequence
atggagaacgtgaccaccatgaacgagttcctgctgctgggcctgaccggcgtgcaggagctgcagcccttcttcttcggcatcttcctgatcatctacctgatcaacctgatcggcaacggcagcatcctggtgatggtggtgctggagccccagctgcacagccccatgtacttcttcctgggcaacctgagctgcctggacatcagctacagcagcgtgaccctgcccaagctgctggtgaacctggtgtgcagcagaagagccatcagcttcctgggctgcatcatccagctgcacttcttccacttcctgggcagcaccgaggccatcctgctggccatcatggccttcgacagattcgtggccatctgcaaccccctgagatacaccgtgatcatgaacccccaggtgtgcatcctgctggccgccgccgcctggctgatcagcttcttctacgccctgatgcacagcgtgatgaccgcccacctgagcttctgcggcagccagaagctgaaccacttcttctacgacgtgaagcccctgctggagctggcctgcagcgacaccctgctgaaccagtggctgctgagcatcgtgaccggcagcatcagcatgggcgccttcttcctgaccctgctgagctgcttctacgtgatcggcttcctgctgttcaagaacagaagctgcagaatcctgcacaaggccctgagcacctgcgccagccacttcatggtggtgtgcctgttctacggccccgtgggcttcacctacatcagacccgccagcgccaccagcatgatccaggacagaatcatggccatcatgtacagcgccgtgacccccgtgctgaaccccctgatctacaccctgagaaacaaggaggtgatgatggccctgaagaagatcttcggcagaaagctgttcaaggactggcagcagcaccactag

SEQ ID NO: 220933 - DNA, 951 bp, Artificial Sequence
  derived and/or modified sequence
atggaaaacgtgaccacgatgaacgagtttctgctgcttgggctgacgggagtgcaagaattgcagcctttctttttcggcatattccttattatatatctcatcaatctcattgggaacggctccattctggtcatggtcgtgttagaaccgcagctgcatagcccaatgtatttctttctgggaaatctaagctgcctagacatctcctactcatcagtcactctgccaaagttactagttaacctggtatgttcacgacgcgccattagctttctggggtgtattatccagctgcatttttttcactttctcggctccaccgaagctattttactcgccatcatggcctttgataggttcgtggcaatctgcaacccactccgctacacagtgatcatgaacccacaggtttgtatattgttagctgccgctgcatggcttatttcgtttttctacgccttgatgcatagcgtcatgacggcccatttaagcttttgtggaagtcagaaactcaatcacttcttttacgacgtcaaacccctcttggaattggcctgttcagacacactcctgaatcagtggcttctcagcatagtgaccgggtccatttcaatgggggcattttttttgacccttttgtcgtgtttctacgttatcggttttctgctgttcaagaataggtcctgcaggattctccataaggctctgagcacctgcgcatcacactttatggttgtgtgtctgttctacggaccggtcggctttacctatatccggccagccagcgcaaccagcatgatccaagacagaataatggccatcatgtatagcgctgtaactccagttctcaatcctttgatatatactctgcggaataaggaagtgatgatggctctgaagaaaatctttggccggaaactctttaaggattggcaacagcaccactag

SEQ ID NO: 220934 - DNA, 951 bp, Artificial Sequence
  derived and/or modified sequence
atggagaatgtcaccaccatgaatgaatttcttcttctcggcttgactggcgtccaagaactccagccctttttctttgggatttttctgatcatctacctgatcaaccttattgggaacggctcaatactcgtgatggtcgtccttgaacctcagctacattccccaatgtacttcttcctgggcaacttgagctgtcttgatatatcctatagcagcgttaccctgccaaaattgcttgtcaacctggtgtgctcccggcgggccatatcctttctgggctgcattattcagctgcatttctttcattttctgggatcaactgaggctatcttactggcgatcatggcattcgatagattcgttgcaatctgtaatccattgcggtacaccgtgattatgaacccacaggtatgcatcctgctggccgcggccgcctggctcatcagctttttctatgcactgatgcacagcgtgatgaccgcgcacctgtccttctgtggatcacagaaactgaatcacttcttctacgacgtcaaacctctactggaactcgcctgttcagataccctccttaaccaatggttgttatccatagtgaccgggagtattagtatgggggcattttttctgaccctgctgtcctgtttctatgtgatcgggttcttactcttcaagaaccgaagctgcaggattctgcacaaagccctgtctacatgtgcttctcacttcatggtggtctgcttgttctatggaccggtgggcttcacctacatccgccccgccagcgcaacttccatgatccaagataggattatggcgatcatgtactccgccgtcactcccgtcctgaatcctctcatctacaccctgaggaacaaggaagttatgatggctttaaagaagatttttgggagaaaactctttaaagactggcagcaacatcattag

SEQ ID NO: 220935 - DNA, 951 bp, Artificial Sequence
  derived and/or modified sequence
atggagaatgtgaccacaatgaatgaatttctattgctggggttgactggcgtccaagagctccagccttttttttttggcatatttctcataatatacctgatcaaccttataggaaatggatctatcctggtgatggtggtgctagaacctcagctccattcccccatgtatttcttcctgggaaacctcagctgtctagatatcagttatagttcagtgactctcccaaaacttcttgtgaacctggtttgcagtcggcgggcaatctccttccttgggtgtattatccaacttcatttcttccatttcctgggatccacagaggctattctcctcgcaattatggccttcgatcgctttgtcgctatctgtaaccctttacgatacacggtgattatgaacccgcaagtctgcatcctgctcgctgctgccgcctggttgatatcttttttctatgctctgatgcattccgtgatgacagcacacttatctttctgcgggtcacagaaactcaatcatttcttttatgatgtgaaaccgttactggagcttgcgtgctcagacactttgctcaatcaatggctcctttcgatagtgacgggcagtatctccatgggtgctttctttctgactctcctgtcatgcttctatgtgatcggctttcttctgtttaagaaccggagctgccgtatcctccacaaggctctgagcacctgcgccagccatttcatggttgtctgcttgttctacggccctgttggattcacatacattaggccagcatctgccactagtatgattcaagatcgtattatggctattatgtattcagcagttactcccgtgttgaaccctcttatttatacattgcgcaataaagaggtcatgatggcactgaagaaaatttttggacgtaaactcttcaaggattggcagcagcaccactag

SEQ ID NO: 220936 - DNA, 951 bp, Artificial Sequence
  derived and/or modified sequence
atggagaatgttactacaatgaatgagttcctcctactgggcctcacgggagtccaggagcttcaaccttttttttttggcatcttcttgatcatatatctaatcaacctgattggtaacggcagtatactcgtgatggttgtcctggagccacagttgcactctccaatgtactttttcttaggaaacctcagctgcctggacatttcatactccagtgtgactctgcctaagttactagtgaacctggtctgctcacggcgggccataagctttctcggttgtatcattcagctccatttctttcactttctcggatctacagaggctattctgctggccatcatggccttcgaccgatttgtggctatttgcaatcccctgcgctatactgtgataatgaatcctcaagtatgcattttgctggctgccgctgcctggctgattagtttcttctacgcactaatgcatagcgtgatgacggctcacctgtcattttgtgggtctcagaagctgaaccatttcttctatgacgtgaagcccctcctggagctcgcctgcagcgatacgctgctcaaccagtggctgctcagcatagttaccggttctatcagcatgggtgcattctttcttacactgttgtcatgtttttatgtcattggcttcctgctttttaagaatcgaagctgccgcatccttcacaaggccctatccacctgtgcgtcccatttcatggtcgtttgccttttttatgggcccgtcgggttcacatatattcgcccggctagcgctacgagcatgattcaggacaggatcatggcaattatgtactcagctgtgactcccgtcctcaatcctctcatttataccttacgcaacaaagaggtgatgatggccctgaaaaagatctttggaagaaaactcttcaaagattggcaacagcaccactag

SEQ ID NO: 220937 - DNA, 951 bp, Artificial Sequence
  derived and/or modified sequence
atggagaatgtgaccaccatgaatgagttcctgctgctgggcctgactggagtgcaggagctgcagcccttcttcttcggcatcttcctgatcatctacctgatcaacctgattggaaatggcagcatcctggtgatggtggtgctggagccccagctgcacagccccatgtacttcttcctgggcaacctgagctgcctggacatctcctacagctctgtgaccctgcccaagctgctggtgaacctggtgtgcagcagaagagccatctccttcctgggctgcatcatccagctgcacttcttccacttcctgggcagcacagaggccatcctgctggccatcatggcctttgacagatttgtggccatctgcaaccccctgcgctacaccgtcatcatgaacccccaggtgtgcatcctgctggccgctgctgcctggctgatctccttcttctacgccctgatgcacagcgtgatgacagcccacctgtccttctgtggcagccagaagctgaaccacttcttctatgatgtgaagcccctgctggagctggcctgcagcgacaccctgctgaaccagtggctgctgagcatcgtgacaggcagcatctccatgggcgccttcttcctgaccctgctgagctgcttctacgtgattggcttcctgctcttcaagaacagaagctgccgcatcctgcacaaggccctgagcacctgtgccagccacttcatggtggtgtgcctcttctacggccctgtgggcttcacctacatccggcctgccagcgccacctccatgatccaggaccgcatcatggccatcatgtacagcgctgtgacccctgtgctgaaccccctcatctacaccctgaggaacaaggaggtgatgatggccctgaagaagatcttcggcaggaagctgttcaaggactggcagcagcaccactag

SEQ ID NO: 220938 - DNA, 951 bp, Artificial Sequence
  derived and/or modified sequence
atggagaacgtgaccaccatgaacgagttcctgctgctgggcctgactggggtccaggagctacagccatttttctttggtatctttctgataatatatttgatcaatttaattggaaacggatcaatacttgtgatggttgtgctcgaaccacagctgcattccccgatgtatttcttcctcgggaatctgtcttgcttagacatttcctatagttccgtgactctccctaaacttcttgtgaacctagtttgcagcagaagggcaattagtttcttaggctgtatcatccagctgcacttttttcattttctaggttctaccgaggccattctgcttgcgataatggcatttgacagattcgttgctatctgcaacccacttagatataccgtgatcatgaacccacaggtatgtatcctcctggccgccgccgcctggctgatcagcttcttttacgctttaatgcactcagtcatgaccgcccatttaagcttttgtggcagtcagaagctgaatcacttcttttacgacgtaaaacccctcctggagcttgcctgctcggacacactgctaaatcagtggttgctgagcatagtgaccggttccatttccatgggcgcattcttcctgacattgctttcttgtttctacgttatagggttcctcctatttaagaaccgctcctgcagaatactacataaggcactgtctacttgcgccagccactttatggtggtctgcctgttctacgggcctgtggggttcacttatattcgccccgccagcgccaccagtatgattcaggatcggatcatggcaataatgtactccgccgtgactccagtcctgaatcccctgatctatactctccgcaacaaggaagtcatgatggccctcaaaaaaatattcgggcggaaattgtttaaagattggcagcagcaccattag

SEQ ID NO: 220939 - DNA, 951 bp, Artificial Sequence
  derived and/or modified sequence
atggagaacgtgaccaccatgaacgagttcctgctgctgggcctgactggcgtacaggagctccagcctttcttcttcggtatcttcctgatcatttaccttattaacttgattggaaacgggtcgattctggtgatggtagtactggagccccagctccattccccgatgtacttcttcctgggcaacctgagctgtctcgacatcagctactcttccgtaactctaccaaagctgctcgtgaacctggtttgttccagacgcgccatctctttcttggggtgcattatccagttgcatttcttccactttcttggaagcaccgaagcaattcttttggccatcatggctttcgataggtttgtcgcgatttgcaacccactgcggtataccgttatcatgaacccacaagtctgcattctacttgccgccgccgcctggctgataagcttcttttatgctctcatgcactccgtgatgaccgctcacctctcgttttgtgggtcccagaaactgaaccactttttttacgacgtgaaacccctcctagaactggcttgttccgacacactccttaaccagtggctgctttccattgttaccggatcaattagtatgggagccttttttctgacactgttgtcatgcttctatgtgatcggcttccttcttttcaagaaccggagctgccgcattctccacaaggctctgagtacatgcgcctcccatttcatggttgtgtgcttgttctacggcccagttggtttcacttacattcgacccgcttcagcaacatccatgattcaggacagaatcatggccattatgtattccgccgttaccccagtgctgaaccctctgatctacaccctgcgcaacaaagaagtgatgatggccctgaaaaagatattcggtagaaagctttttaaggactggcaacagcaccactag

SEQ ID NO: 220940 - DNA, 951 bp, Artificial Sequence
  derived and/or modified sequence
atggagaacgtgaccaccatgaacgagttcctgctgctgggcctgacgggcgttcaggagctgcaaccctttttcttcggcattttcttgattatttacctgatcaacctcatcggaaatggatctattttggtcatggtcgtactcgagccacagttacattctcccatgtactttttcctgggcaatttgagttgtctggatatatcctactcatctgtgaccctgcctaagctcctggtcaacctggtgtgctctcgcagagccatctctttccttggttgcatcatccagctccacttcttccattttttgggttcaacggaggctatcctactggcaattatggccttcgaccgctttgtggccatctgcaaccccttgaggtatacagtgatcatgaatcctcaggtttgtatcctactggcagcagcggcttggctaatcagttttttctacgctcttatgcactcagttatgaccgctcatctgtccttttgtggcagtcagaagctgaaccatttcttctacgacgtgaaacctctgttagagctggcctgcagtgatactctgctcaatcagtggctcctctctattgttacagggagcatctccatgggcgcattttttctgaccctcttgagttgtttctacgtgatagggttcctcctgtttaagaataggtcctgtcgtattctccacaaggcactgtctacctgtgcctcccacttcatggtcgtgtgtctgttttacgggccagttggctttacttacatccgaccggcgagtgctacctcaatgatccaagatagaattatggccattatgtactctgccgtgactccagtgcttaatcctctgatatacacacttcgcaacaaagaagtgatgatggcgctgaagaagatcttcgggaggaagctgttcaaggattggcagcagcaccactag

SEQ ID NO: 220941 - DNA, 951 bp, Artificial Sequence
  derived and/or modified sequence
atggagaacgtgaccaccatgaacgagttcctgctgctgggcctgaccggtgtgcaagaactacagccctttttttttggcatttttcttataatctatctgattaatcttataggcaacggatccattttggttatggtggtcctggaaccccagcttcattcccccatgtacttttttctgggtaatctgagctgtctggacatttcttacagctccgtgactctacctaagctgttggtgaacttggtgtgttcccgccgcgccatatcattcctcggatgtattatccagctgcatttctttcacttccttggtagcactgaggcaatcttattggccatcatggcgttcgaccggttcgtagccatttgcaacccactccggtacacagtgatcatgaacccgcaagtttgcattctgcttgctgcagccgcctggctcatctcttttttttatgcactcatgcattcagtgatgaccgcacacctcagcttttgcggatcccagaaactgaatcacttcttttatgacgtcaagcctctcttagagctggcatgctcggacactctgctcaaccagtggctcttgagtatagttaccgggtctatatctatgggcgcattcttcctaaccctcctgtcatgtttttacgttatcgggtttctgctgttcaagaataggagctgtcgcatccttcataaggcgctgagtacctgcgcaagccattttatggtagtgtgtttgttttatggccctgtggggttcacttacattagaccagcatctgccaccagcatgatccaggaccgcatcatggcaattatgtatagcgccgtgacgcctgtgctgaacccactgatttacacgctgaggaacaaggaagtgatgatggcattgaaaaagatcttcggccgaaagctgttcaaggactggcagcagcaccattag

SEQ ID NO: 220942 - DNA, 2011 bp, Artificial Sequence
  derived and/or modified sequence
aaactgtgctgccacaggcccatttttcggtgagaaagctagaaaagttggaggacttattctaagtcacgctgttaccagcctagaggggcatctcagtgttttgagcagcttctcgttttgtgagctttgtggatgagtgagcaatggagaatgtcactacaatgaatgagtttcttctacttggcctgactggtgttcaggagctgcagcctttcttctttgggattttcttaatcatttacctgataaacttgattggaaatggatctatattggtgatggttgttttggaaccacaactccactcccctatgtatttttttctgggaaacctttcttgtctggatatttcttattcttcagtgacactgcccaagctgctcgtaaacctcgtgtgcagtcgcagggctatatcttttctaggctgtatcatccagctacacttcttccactttttgggaagcacagaggccattttactggctatcatggcctttgaccgttttgttgccatctgcaatcctcttcgctacactgtcatcatgaacccccaggtgtgtattctgttggcagctgcggcctggctcatcagcttcttttacgctctgatgcattctgtcatgactgcacacctgagtttttgtggctctcagaaactcaatcacttcttctacgatgtcaagccgctcttagaattggcctgtagtgacacattactcaatcaatggcttctttccattgtcacaggcagcatatccatgggagctttctttctgactcttctctcctgcttctatgtaattggcttccttctgtttaagaacaggtcctgcagaatactccacaaggctctgtccacttgtgcctcccattttatggtggtatgtcttttctatggacctgtgggcttcacatatattcgtcctgcttcagccacctccatgattcaggaccggataatggccatcatgtatagcgccgtcacccctgtactgaatccactaatctacacccttaggaacaaagaagtgatgatggctctgaagaaaatctttggtaggaagttgtttaaagactggcagcaacaccactaggactaatgagggatatctgatttctattaagactgatttccatcacttcactgtaagaaatgatttgtttacctggtttatatttttctttcaaaaattttgagcacatattatattaggcagtgtagtaggttcaagaaacacaggagcaagcaaaacaaattccataatgtcatcaaacataaagtttaatgtgatggaggccccaaataaccaaacgcgtaagtacatatgtcaggataattcggtggcaaggagaactaaggaggtaggaagtatggggagggttagagtaggaatctgctgtgtaaaaaagaatgtggcatttctcctaggacaaaaacctttggaattttccaagtaatagaagtatcttactgaaattccatatgagataatctttatttttgcctattttttttccttttgtgtttccttcagcaggaatgtactgatgataatttttctcacaacagtttttatctagaatatcatttttgttaatcttaattcttgaagagaatttttaatgggtatttaattttagggagagatttttctagccattgaaaatatcttgtttttccccagcttattgaagtataattaacaaataaaaattgcatatatttaggcttcacaacatgatgctttagtatatgtatacattgtgaagagactaccacaatcaagctaaacctacattactgtccctgcattagtttactgttgaatactagaagttcttcgttctatctaactgcattttcatacccattaagccaatgtgacaagctctttgttttagttggagtgtttgcacaatttaaatttgataaatttttgatagaattaaatttaaatttatcctccaactaaatttttgatagaattaaatttaaatttgtcctcca

SEQ ID NO: 220943 - DNA, 2011 bp, Artificial Sequence
  derived and/or modified sequence
aaactgtgctgccacaggcccatttttcggtgagaaagctagaaaagttggaggacttattctaagtcacgctgttaccagcctagaggggcatctcagtgttttgagcagcttctcgttttgtgagctttgtggatgagtgagcaatggagaatgtcactacaatgaatgagtttcttctacttggcctgactggtgttcaggagctgcagcctttcttctttgggattttcttaatcatttacctgataaacttgattggaaatggatctatattggtgatggttgttttggaaccacaactccactcccctatgtatttttttctgggaaacctttcttgtctggatatttcttattcttcagtgacactgcccaagctgctcgtaaacctcgtgtgcagtcgcagggctatatcttttctaggctgtatcatccagctacacttcttccactttttgggaagcacagaggccattttactggctatcatggcctttgaccgttttgttgccatctgcaatcctcttcgctacactgtcatcatgaacccccaggtgtgtattctgttggcagctgcggcctggctcatcagcttcttttacgctctgatgcattctgtcatgactgcacacctgagtttttgtggctctcagaaactcaatcacttcttctacgatgtcaagccgctcttagaattggcctgtagtgacacattactcaatcaatggcttctttccattgtcacaggcagcatatccatgggagctttctttctgactcttctctcctgcttctatgtaattggcttccttctgtttaagaacaggtcctgcagaatactccacaaggctctgtccacttgtgcctcccattttatggtggtatgtcttttctatggacctgtgggcttcacatatattcgtcctgcttcagccacctccatgattcaggaccggataatggccatcatgtatagcgccgtcacccctgtactgaatccactaatctacacccttaggaacaaagaagtgatgatggctctgaagaaaatctttggtaggaagttgtttaaagactggcagcaacaccactaggactaatgagggatatctgatttctattaagactgatttccatcacttcactgtaagaaatgatttgtttacctggtttatatttttctttcaaaaattttgagcacatattatattaggcagtgtagtaggttcaagaaacacaggagcaagcaaaacaaattccataatgtcatcaaacataaagtttaatgtgatggaggccccaaataaccaaacgcgtaagtacatatgtcaggataattcggtggcaaggagaactaaggaggtaggaagtatggggagggttagagtaggaatctgctgtgtaaaaaagaatgtggcatttctcctaggacaaaaacctttggaattttccaagtaatagaagtatcttactgaaattccatatgagataatctttatttttgcctattttttttccttttgtgtttccttcagcaggaatgtactgatgataatttttctcacaacagtttttatctagaatatcatttttgttaatcttaattcttgaagagaatttttaatgggtatttaattttagggagagatttttctagccattgaaaatatcttgtttttccccagcttattgaagtataattaacaaataaaaattgcatatatttaggcttcacaacatgatgctttagtatatgtatacattgtgaagagactaccacaatcaagctaaacctacattactgtccctgcattagtttactgttgaatactagaagttcttcattctatctaactgcattttcatacccattaagccaatgtgacaagctctttgtttcagttggagtgtttgcacaatttaaatttgataaatttttgatagaattaaatttaaatttatcctccaactaaatttttgatagaattaaatttaaatttgtcctcca

SEQ ID NO: 220944 - DNA, 1869 bp, Artificial Sequence
  derived and/or modified sequence
agcaatggagaatgtcactacaatgaatgagtttcttctacttggcctgactggtgttcaggagctgcagcctttcttctttgggattttcttaatcatttacctgataaacttgattggaaatggatctatattggtgatggttgttttggaaccacaactccactcccctatgtatttttttctgggaaacctttcttgtctggatatttcttattcttcagtgacactgcccaagctgctcgtaaacctcgtgtgcagtcgcagggctatatcttttctaggctgtatcatccagctacacttcttccactttttgggaagcacagaggccattttactggctatcatggcctttgaccgttttgttgccatctgcaatcctcttcgctacactgtcatcatgaacccccaggtgtgtattctgttggcagctgcggcctggctcatcagcttcttttacgctctgatgcattctgtcatgactgcacacctgagtttttgtggctctcagaaactcaatcacttcttctacgatgtcaagccgctcttagaattggcctgtagtgacacattactcaatcaatggcttctttccattgtcacaggcagcatatccatgggagctttctttctgactcttctctcctgcttctatgtaattggcttccttctgtttaagaacaggtcctgcagaatactccacaaggctctgtccacttgtgcctcccattttatggtggtatgtcttttctatggacctgtgggcttcacatatattcgtcctgcttcagccacctccatgattcaggaccggataatggccatcatgtatagcgccgtcacccctgtactgaatccactaatctacacccttaggaacaaagaagtgatgatggctctgaagaaaatctttggtaggaagttgtttaaagactggcagcaacaccactaggactaatgagggatatctgatttctattaagactgatttccatcacttcactgtaagaaatgatttgtttacctggtttatatttttctttcaaaaattttgagcacatattatattaggcagtgtagtaggttcaagaaacacaggagcaagcaaaacaaattccataatgtcatcaaacataaagtttaatgtgatggaggccccaaataaccaaacgcgtaagtacatatgtcaggataattcggtggcaaggagaactaaggaggtaggaagtatggggagggttagagtaggaatctgctgtgtaaaaaagaatgtggcatttctcctaggacaaaaacctttggaattttccaagtaatagaagtatcttactgaaattccatatgagataatctttatttttgcctattttttttccttttgtgtttccttcagcaggaatgtactgatgataatttttctcacaacagtttttatctagaatatcatttttgttaatcttaattcttgaagagaatttttaatgggtatttaattttagggagagatttttctagccattgaaaatatcttgtttttccccagcttattgaagtataattaacaaataaaaattgcatatatttaggcttcacaacatgatgctttagtatatgtatacattgtgaagagactaccacaatcaagctaaacctacattactgtccctgcattagtttactgttgaatactagaagttcttcgttctatctaactgcattttcatacccattaagccaatgtgacaagctctttgttttagttggagtgtttgcacaatttaaatttgataaatttttgatagaattaaatttaaatttatcctccaactaaatttttgatagaattaaatttaaatttgtcctcca

SEQ ID NO: 220945 - DNA, 1869 bp, Artificial Sequence
  derived and/or modified sequence
agcaatggagaatgtcactacaatgaatgagtttcttctacttggcctgactggtgttcaggagctgcagcctttcttctttgggattttcttaatcatttacctgataaacttgattggaaatggatctatattggtgatggttgttttggaaccacaactccactcccctatgtatttttttctgggaaacctttcttgtctggatatttcttattcttcagtgacactgcccaagctgctcgtaaacctcgtgtgcagtcgcagggctatatcttttctaggctgtatcatccagctacacttcttccactttttgggaagcacagaggccattttactggctatcatggcctttgaccgttttgttgccatctgcaatcctcttcgctacactgtcatcatgaacccccaggtgtgtattctgttggcagctgcggcctggctcatcagcttcttttacgctctgatgcattctgtcatgactgcacacctgagtttttgtggctctcagaaactcaatcacttcttctacgatgtcaagccgctcttagaattggcctgtagtgacacattactcaatcaatggcttctttccattgtcacaggcagcatatccatgggagctttctttctgactcttctctcctgcttctatgtaattggcttccttctgtttaagaacaggtcctgcagaatactccacaaggctctgtccacttgtgcctcccattttatggtggtatgtcttttctatggacctgtgggcttcacatatattcgtcctgcttcagccacctccatgattcaggaccggataatggccatcatgtatagcgccgtcacccctgtactgaatccactaatctacacccttaggaacaaagaagtgatgatggctctgaagaaaatctttggtaggaagttgtttaaagactggcagcaacaccactaggactaatgagggatatctgatttctattaagactgatttccatcacttcactgtaagaaatgatttgtttacctggtttatatttttctttcaaaaattttgagcacatattatattaggcagtgtagtaggttcaagaaacacaggagcaagcaaaacaaattccataatgtcatcaaacataaagtttaatgtgatggaggccccaaataaccaaacgcgtaagtacatatgtcaggataattcggtggcaaggagaactaaggaggtaggaagtatggggagggttagagtaggaatctgctgtgtaaaaaagaatgtggcatttctcctaggacaaaaacctttggaattttccaagtaatagaagtatcttactgaaattccatatgagataatctttatttttgcctattttttttccttttgtgtttccttcagcaggaatgtactgatgataatttttctcacaacagtttttatctagaatatcatttttgttaatcttaattcttgaagagaatttttaatgggtatttaattttagggagagatttttctagccattgaaaatatcttgtttttccccagcttattgaagtataattaacaaataaaaattgcatatatttaggcttcacaacatgatgctttagtatatgtatacattgtgaagagactaccacaatcaagctaaacctacattactgtccctgcattagtttactgttgaatactagaagttcttcattctatctaactgcattttcatacccattaagccaatgtgacaagctctttgtttcagttggagtgtttgcacaatttaaatttgataaatttttgatagaattaaatttaaatttatcctccaactaaatttttgatagaattaaatttaaatttgtcctcca

SEQ ID NO: 220946 - DNA, 951 bp, Artificial Sequence
  derived and/or modified sequence
atggaaaacgtcactaccatgaacgaattcctgctcctgggcctcactggcgttcaagaattacagccctttttctttggcattttcttgattatttacctcattaacttaattggaaatggctctattctcgtcatggtggttctggagcctcagctacatagccctatgtacttctttctgggcaacctgtcatgtctggacatctcctattcgtccgtaaccctgcctaagctgcttgttaatctggtgtgttcacgtagggcaattagctttctggggtgcattatccagttgcatttcttccatttccttggatcaaccgaggcaattttgttagcgattatggcttttgataggttcgtggctatatgtaacccacttagatataccgtcattatgaacccccaggtttgtatacttctggcggctgccgcttggctcatctcattcttctacgccctgatgcactcggtcatgacagcccatctaagcttttgcggaagccagaaactcaaccatttcttttacgatgtaaagccgctgttagaactcgcctgctcagacacccttctgaaccagtggttactttccatcgttacgggcagcatcagtatgggtgcattcttcttaacactgctctcctgtttttacgtgatcgggttccttctgttcaagaatcgaagttgcagaatcctccacaaggctttgtcaacgtgtgcctctcacttcatggttgtctgcctgttttatggcccagtcggatttacctatatcagacctgccagtgcaacttccatgatccaggaccggattatggctattatgtacagcgctgtgacaccggttctaaatccattgatttatactctgaggaataaggaagtgatgatggccctcaaaaagattttcgggcgaaagttatttaaggactggcagcaacaccattag

SEQ ID NO: 220947 - DNA, 951 bp, Artificial Sequence
  derived and/or modified sequence
atggagaatgtcacaactatgaacgagttcctcctactgggcctgacgggtgtgcaagaactgcagccatttttctttggcattttcctgatcatctaccttattaatttaatcggcaatgggtccatccttgtgatggtcgttctggaacctcagcttcatagtcccatgtattttttcctcggaaatctgagctgcctggatattagctattccagcgtgaccttgccaaagttgttagtgaatctcgtatgctctcgcagggccatctcttttctggggtgtattatccagctgcattttttccattttctgggctccaccgaagctatcttacttgcaattatggcgtttgaccgcttcgtggcaatttgcaatcctctgcgatacactgtcataatgaatcctcaggtgtgtatcctattagccgctgctgcctggctgatctcattcttctacgctttaatgcatagtgtgatgactgcccacctgtcgttttgcggcagccaaaagttgaaccacttcttttacgacgtcaagccacttcttgagctggcttgttcagataccctgctgaatcagtggctgctgtcaatcgtaacaggttctatttctatgggagctttttttctgacactgttgagttgcttctatgtgattggtttcctgctgtttaagaatcgcagctgccgtatactccacaaggctttaagcacatgcgctagccacttcatggttgtgtgtctgttctacgggccagtgggattcacttatatccgtcccgcaagcgccacaagcatgatacaagatagaatcatggctataatgtactccgccgttacacctgtgctaaacccgctcatttacaccttgcggaataaggaggttatgatggccctgaaaaagatcttcggtcgaaaactgttcaaggactggcagcaacatcattag

SEQ ID NO: 220948 - DNA, 951 bp, Artificial Sequence
  derived and/or modified sequence
atggagaatgtgaccaccatgaatgaatttttgctgttggggctaaccggcgtgcaggagttgcaacccttcttttttgggatattcctgatcatttacctgatcaatctgattgggaacggatccatcctggttatggtcgtgttagagccacagctccactctccaatgtacttcttcctggggaacctcagttgtctcgacatatcctactcatctgtgacactccccaaactccttgtcaacctggtgtgctctcgcagagccatttcttttctgggttgtatcattcagctccacttttttcactttctcgggtcaaccgaggccatcttgctagctatcatggctttcgacagattcgttgctatctgcaacccactgaggtacaccgtgattatgaatcctcaggtctgcatcttgttagctgcggcagcctggcttatctcatttttctatgcacttatgcacagcgtcatgactgcccatctatcgttttgcgggagtcagaagcttaaccattttttctacgacgtgaaacccctcctcgagctggcctgtagtgatacactgttgaaccaatggctactgtccattgtgactggctctatctctatgggagcctttttcctgaccttactcagctgcttctatgtgattggttttctcctattcaaaaatcgctcttgtcgaatcctgcacaaagccctaagcacatgtgcttcccatttcatggtggtctgccttttctatggacctgtgggcttcacgtacataagacccgcttctgccacctctatgatccaagatcggataatggcaattatgtatagcgccgtgacaccagtgctgaatccattgatttacaccttgagaaataaagaagtgatgatggccttgaaaaaaatcttcgggcgaaagttgttcaaagattggcagcagcatcattag

SEQ ID NO: 220949 - DNA, 951 bp, Artificial Sequence
  derived and/or modified sequence
atggagaacgtgaccacaatgaatgagttcctgttgctgggcctgaccggcgtccaggagctgcagccctttttttttggcatttttctcattatttacctcattaacctgattggtaatggcagtatcctggtaatggtcgtgctggaaccccaactgcattctccaatgtattttttcctcgggaacttatcctgtctggacatcagctatagttcggtcaccctgccaaagctgctagtaaatctcgtttgttcccggagggccatcagcttcctgggctgcattatccagctgcattttttccattttctgggatccaccgaagctattctgcttgctatcatggcttttgataggtttgtggcaatctgtaacccactccgatacaccgtcatcatgaacccacaagtctgcatcctcttggcggcagcagcctggcttatcagttttttttacgctctgatgcactccgtcatgactgctcatctgtccttttgtggtagccaaaagctgaaccactttttctacgacgtcaaacctttgctggagctcgcttgtagcgatactctgcttaatcagtggttgctgtctatcgttaccggcagcatttcgatgggtgccttctttttgacactgctgtcctgtttttatgtgattggcttcttgctcttcaagaaccgctcttgccggatactccacaaagccctcagcacgtgcgcaagccacttcatggtggtctgcctattttacggcccagttggctttacttatattcgccctgcaagtgccacttcaatgatccaggaccggatcatggccatcatgtacagtgccgtaactcctgtgcttaaccctctgatctatacactgcgcaacaaggaggtgatgatggcactaaagaagattttcggacgcaagctatttaaggattggcagcagcatcactag

SEQ ID NO: 220950 - protein, 294 aa, Artificial Sequence
  derived and/or modified sequence
MSPRGTGCSAGLLMTVGWLLLAGLQSARGTNVTAAVQDAGLAHEGEGEEETENNDSETAENYAPPETEDVSNRNVVKEVEFGMCTVTCGIGVREVILTNGCPGGESKCVVRVEECRGPTDCGWGKPISESLESVRLACIHTSPLNRFKYMWKLLRQDQQSIILVNDSAILEVRKESHPLAFECDTLDNNEIVATIKFTVYTSSELQMRRSSLPATDAALIFVLTIGVIICVFIIFLLIFIIINWAAVKAFWGAKASTPEVQSEQSSVRYKDSTSLDQLPTEMPGEDDALSEWNE

SEQ ID NO: 220951 - DNA, 885 bp, Artificial Sequence
  derived and/or modified sequence
atgagccccagaggcaccggctgcagcgccggcctgctgatgaccgtgggctggctgctgctggccggcctgcagagcgccagaggcaccaacgtgaccgccgccgtgcaggacgccggcctggcccacgagggcgagggcgaggaggagaccgagaacaacgacagcgagaccgccgagaactacgccccccccgagaccgaggacgtgagcaacagaaacgtggtgaaggaggtggagttcggcatgtgcaccgtgacctgcggcatcggcgtgagagaggtgatcctgaccaacggctgccccggcggcgagagcaagtgcgtggtgagagtggaggagtgcagaggccccaccgactgcggctggggcaagcccatcagcgagagcctggagagcgtgagactggcctgcatccacaccagccccctgaacagattcaagtacatgtggaagctgctgagacaggaccagcagagcatcatcctggtgaacgacagcgccatcctggaggtgagaaaggagagccaccccctggccttcgagtgcgacaccctggacaacaacgagatcgtggccaccatcaagttcaccgtgtacaccagcagcgagctgcagatgagaagaagcagcctgcccgccaccgacgccgccctgatcttcgtgctgaccatcggcgtgatcatctgcgtgttcatcatcttcctgctgatcttcatcatcatcaactgggccgccgtgaaggccttctggggcgccaaggccagcacccccgaggtgcagagcgagcagagcagcgtgagatacaaggacagcaccagcctggaccagctgcccaccgagatgcccggcgaggacgacgccctgagcgagtggaacgagtag

SEQ ID NO: 220952 - DNA, 885 bp, Artificial Sequence
  derived and/or modified sequence
atgagtcccagagggaccgggtgctctgctggtctgctcatgaccgtcggttggttgctactggcaggtttacagagtgcacgcgggacaaatgtgactgccgctgtacaggacgcaggcctcgcccatgagggcgagggagaggaagagaccgaaaataatgacagcgaaaccgctgaaaactacgcgcctcccgaaacagaagatgtgagtaaccggaacgttgtgaaagaggtggagttcggtatgtgcacagttacctgcgggatcggggtgcgagaggtgatcctgactaacggctgccccggcggcgagtcaaaatgcgtggtgagagttgaagaatgtcgtggacccacagattgcgggtggggaaagcctatctccgaaagtctggagtctgtgcgcttggcatgcattcacacaagtcccctgaacagattcaagtatatgtggaaactgctcagacaggaccaacaatccataatcctggttaacgactctgctatccttgaggtaaggaaagaaagtcacccccttgccttcgagtgcgatacattggataacaacgagatcgtggctacgataaagtttacggtgtatacttccagcgagctgcagatgaggaggtcatcccttccagcaaccgacgcagctctgatcttcgtactgactatcggagtgataatctgtgtgttcatcattttcctgctcatcttcatcatcatcaattgggcagcagtgaaggctttctggggcgccaaggcatccacacccgaggtgcagagtgagcagagtagcgtgcggtataaagatagcacttccctcgatcagctgcctaccgaaatgccaggggaggatgatgcactttccgaatggaacgaatag

SEQ ID NO: 220953 - DNA, 885 bp, Artificial Sequence
  derived and/or modified sequence
atgagcccccggggcaccggctgcagcgctggcctgctgatgacagtgggctggctgctgctggccggcctgcagagcgcccggggcaccaacgtgacagctgctgtgcaggatgctggcctggcccatgaaggagagggggaggaggagacagagaacaatgacagcgagacagctgagaactatgcccctcctgagacagaagatgtgagcaacagaaatgtggtgaaggaggtggagtttggcatgtgcaccgtgacctgtggcatcggcgtgcgggaggtgatcctgaccaacggctgccctggaggagagagcaaatgtgtggtgcgggtggaggagtgccggggccccacagactgtggctggggcaagcccatcagcgagagcctggagagcgtgcggctggcctgcatccacaccagccccctgaaccgcttcaagtacatgtggaagctgctgcggcaggaccagcagagcatcatcctggtgaatgattctgccatcctggaggtgaggaaggagagccaccccctggcctttgaatgtgacaccctggacaacaatgaaattgtggccaccatcaagttcaccgtgtacaccagcagcgagctgcagatgaggaggagcagcctgcctgccacagatgctgccctgatctttgtgctgaccatcggggtcatcatctgtgtgttcatcatcttcctgctgatcttcatcatcatcaactgggccgctgtgaaggccttctggggcgccaaggccagcaccccagaggtgcagagcgagcagagctctgtgcgctacaaggacagcaccagcctggaccagctgcccacagagatgcctggagaagatgatgccctgtctgagtggaatgaatag

SEQ ID NO: 220954 - DNA, 885 bp, Artificial Sequence
  derived and/or modified sequence
atgagcccccggggcaccggctgcagcgccggcctgctgatgaccgtggggtggttgctgcttgccggactccagtctgcacgcggaaccaatgtcacagctgcagtacaggacgccgggctggctcacgaaggagagggagaagaagaaaccgagaacaatgacagcgagacagccgaaaactacgccccccctgaaacagaggatgtcagtaatagaaacgtcgtgaaggaggtggagttcggaatgtgtactgttacctgcggaattggcgtacgggaggtcattctgaccaatggatgcccagggggggagtctaagtgcgtggttcgtgtcgaagagtgccggggccctaccgactgcgggtggggaaagccaatctcagaatcccttgaaagtgtacgactcgcctgtatacatacatctcctctgaatcgcttcaaatatatgtggaagttactgcgtcaggatcaacaaagtatcatcctggtgaacgattccgccatcctagaggtgagaaaagagtcacatccactggcattcgagtgcgacacgctggacaacaatgaaattgtggcgactataaagtttactgtttacactagctccgagctgcagatgaggcgcagctctctccctgcgaccgacgccgctctgattttcgtactcaccattggtgtgattatttgtgtcttcataatctttctcctgattttcattattataaattgggctgcggtgaaagctttttggggagctaaagcctccaccccagaagtgcagagcgaacaatccagtgtgcgatataaggactcaacgtccttggaccagctgcccacagaaatgcctggcgaggacgatgctctgagtgaatggaatgagtag

SEQ ID NO: 220955 - DNA, 885 bp, Artificial Sequence
  derived and/or modified sequence
atgagtccacggggaaccggttgcagcgctgggttgctgatgactgtgggctggctcttactcgccggattgcaatccgccagaggtactaacgtcactgctgctgtgcaggacgccggtttggctcatgaaggcgagggggaagaggaaaccgaaaataacgattccgagaccgctgagaactatgccccaccagagaccgaagatgtgtcaaaccgaaatgtggtgaaggaggttgaattcggcatgtgtacggtgacctgcggtattggtgtacgggaggtcatcttaactaatggctgtcccggaggcgaaagcaagtgcgtagtgcgggtagaggaatgccgcggaccgacagactgtggttggggcaagccgatttcggagagcctggagtcggtcaggcttgcttgcattcacacgtcacccctgaacagattcaagtacatgtggaagctgctcaggcaggatcaacagagtatcatcctggtaaacgatagcgccattctggaggttagaaaagagtctcatccattggctttcgagtgtgataccctggacaacaacgaaatcgtggcaacaataaaattcaccgtgtacaccagctccgagcttcagatgaggcgttcaagtctgccagcaactgacgccgctcttatttttgtactgacgatcggagtcatcatctgtgtctttatcatcttcctccttatatttataattatcaattgggctgctgtgaaagccttttggggggcaaaagctagcactcctgaagtgcagtcagaacagtcttccgttagatacaaggattcaacttcattagatcagttaccaaccgagatgcctggagaagacgatgcactgtctgagtggaacgagtag

SEQ ID NO: 220956 - DNA, 1499 bp, Artificial Sequence
  derived and/or modified sequence
gtcacgggattcggagccgggcggctacgggcggggtgtcgcagctctcttcgacgtacctgtcctcaggagccgcggcggcgactgcgcctcggacggccgtcggggccgagaaccatgagccccaggggcacgggctgctccgccgggctgctgatgactgtcggctggctgcttctggcgggcctccagtccgcgcgcgggaccaacgtcaccgctgccgtccaggatgccggcctggcccacgaaggcgagggcgaggaggagaccgaaaacaacgacagcgagaccgcggagaactacgctccgcctgaaaccgaggatgtttcaaataggaatgtcgtcaaagaagtagaattcggaatgtgcaccgttacatgtggtattggtgttagagaagttatattaacaaatggatgccctggtggtgaatccaagtgtgttgtacgggtagaagaatgccgtggaccaacagattgtggctggggtaaaccaatttcagaaagtcttgaaagtgttagattggcatgtattcacacatctcccttaaatcgtttcaaatatatgtggaaacttctaagacaagaccaacaatccattatacttgtaaatgattcagcaatcctagaagtacgcaaggaaagtcaccccttggctttcgagtgtgacacactggataataatgaaatagtagcaactattaaattcacagtctatacgagcagtgaattgcagatgagaagatcaagcctaccagccactgatgcagccctaatttttgtgctgaccataggagtcattatctgtgtatttataattttcttattgatcttcataatcataaattgggcagcagtcaaggctttctggggggcaaaagcctctacacctgaggtacaatccgagcagagttctgtgagatacaaagattcaacttctcttgaccaattaccaacagaaatgcctggtgaagatgatgctttaagtgaatggaatgaatgatgtttgaatgatatataacaaaccaaaggatattacagaatattagattcattattacaaaaataaaatacacattgaaatactttaataatgttgcgatggattgccacagtgtgaaggaaatgcagtgtggggataggactattttatcagtgcatttttccagtacagttatcaaatattacttttaatttgttctcaacacttatttcaggtaatagcttggggatatttatctaaaggtacccccaacaaatcttctaagtgcatttttgatcactttgataacttcttaggtgatttgcctgttttgtcttaaataagaacaatgtaatatagaaatgctttacatattagactttctctcccctggaagcactgggttgaacttgctaaagtaaatcatactttagaatctcttcagggaatgtgacatacaaagtttgtaagacatgaagtaataacgataatgataacaataaatgcttacttagtga

SEQ ID NO: 220957 - protein, 755 aa, Artificial Sequence
  derived and/or modified sequence
MVSHGSSPSLLEALSSDFLACKICLEQLRAPKTLPCLHTYCQDCLAQLADGGRVRCPECRETVPVPPEGVASFKTNFFVNGLLDLVKARACGDLRAGKPACALCPLVGGTSTGGPATARCLDCADDLCQACADGHRCTRQTHTHRVVDLVGYRAGWYDEEARERQAAQCPQHPGEALRFLCQPCSQLLCRECRLDPHLDHPCLPLAEAVRARRPGLEGLLAGVDNNLVELEAARRVEKEALARLREQAARVGTQVEEAAEGVLRALLAQKQEVLGQLRAHVEAAEEAARERLAELEGREQVARAAAAFARRVLSLGREAEILSLEGAIAQRLRQLQGCPWAPGPAPCLLPQLELHPGLLDKNCHLLRLSFEEQQPQKDGGKDGAGTQGGEESQSRREDEPKTERQGGVQPQAGDGAQTPKEEKAQTTREEGAQTLEEDRAQTPHEDGGPQPHRGGRPNKKKKFKGRLKSISREPSPALGPNLDGSGLLPRPIFYCSFPTRMPGDKRSPRITGLCPFGPREILVADEQNRALKRFSLNGDYKGTVPVPEGCSPCSVAALQSAVAFSASARLYLINPNGEVQWRRALSLSQASHAVAALPSGDRVAVSVAGHVEVYNMEGSLATRFIPGGKASRGLRALVFLTTSPQGHFVGSDWQQNSVVICDGLGQVVGEYKGPGLHGCQPGSVSVDKKGYIFLTLREVNKVVILDPKGSLLGDFLTAYHGLEKPRVTTMVDGRYLVVSLSNGTIHIFRVRSPDS

SEQ ID NO: 220958 - DNA, 2268 bp, Artificial Sequence
  derived and/or modified sequence
atggtgagccacggtagttccccaagccttttggaagctctctcctccgatttcttggcctgcaagatctgcctcgagcagctccgggccccgaaaaccctcccttgtctgcatacatattgccaagattgtttagctcagctcgctgatggaggtcgagtcagatgtcctgaatgtagagaaactgtaccagttccccccgaaggcgtagcttcctttaaaacgaacttttttgtgaacgggctactggacctggtgaaagctagggcatgcggcgacttgcgcgctggtaaacccgcttgtgcactgtgccccctggttggaggcacgtcgacaggagggccagcaacagcacggtgtctggactgtgccgacgacttgtgccaggcctgcgctgacggccacaggtgtaccaggcaaacacacacgcatagggtagtggacctagtgggatatcgagccggctggtacgatgaggaggcccgggaaagacaggccgcccagtgtccccagcacccaggcgaggctctccgattcctttgccagccgtgtagtcagctgctttgtagagaatgccgtctggacccacacctcgaccatccgtgtctacctctggccgaggcagtgcgcgctcggaggcctgggttagaaggtctgctggcaggagtggacaacaatctggtggagttggaggccgctagacgggtagaaaaagaagctctcgcacgcctcagggagcaagccgctagagttggtactcaggtcgaggaggctgccgagggcgtccttcgagctctcctagctcagaagcaggaggttctgggccagctcagggctcacgtcgaagccgcagaagaggctgcaagagagaggttggccgaacttgaaggcagggaacaagtagcacgggcagccgcagcctttgcgcgccgagtgttgagcctcgggcgggaggccgagatcctgtccttggagggcgccatcgcgcagagactccgccagcttcaggggtgcccatgggcccccggcccggctccctgtttactgcctcagttggagctgcaccccggcttactggacaaaaactgccatttgctccgtctgtcattcgaagaacaacaaccccagaaggatggggggaaggacggagctgggactcaaggaggtgaggagtcccagagtcgaagggaggacgagcccaagacggaacgtcagggtggcgtccagcctcaggccggcgatggagcacagactccaaaagaagagaaagcgcagactacccgtgaagaaggtgcccagacattggaggaggacagggctcaaacccctcatgaagatgggggaccccagccgcataggggaggcagacccaataaaaagaagaaatttaaaggacgacttaagagtatttccagggaaccatccccagctttgggccctaacctggatggctcaggcctgcttcccagacccatcttttactgcagcttcccaacgcggatgccaggagataagcggtcccctaggattactggattgtgcccctttgggcctcgggaaatcctcgtagcagatgaacagaatagagccttgaagagatttagcctcaacggtgattacaaaggcacagtccccgtccctgaaggctgtagcccctgttccgtcgcggctcttcagagcgctgttgcgttttctgcctccgctaggctttacttgatcaaccctaatggcgaagtgcagtggcggcgcgcgctcagcctctcccaggcttcacacgctgttgctgcacttccctctggggacagagtcgcagtctcagttgctggtcatgtcgaggtgtataacatggaaggcagcctggctactagatttattcccggtgggaaagcatctagaggcctacgcgctctcgtattcttgaccactagtccccagggccatttcgtgggtagcgattggcagcagaattcagtggtgatctgcgatggactgggccaagtggtgggggagtataaaggacctggcctgcacggttgccagcccggatccgtcagcgtagataaaaagggatacatttttttgactttgagagaagttaacaaggtggtgatcttagatcctaaagggtctctcctcggcgacttcttgaccgcttaccatggactggagaagccccgcgttactactatggttgacggtaggtacctggtggtttccttatcaaacggtactattcatatttttagggttcgctcccctgatagttag

SEQ ID NO: 220959 - DNA, 2268 bp, Artificial Sequence
  derived and/or modified sequence
atggtgagccacggcagcagccccagcctgctggaggccctgagcagtgacttcctggcctgcaagatctgcctggagcagctgcgggcccccaagaccctgccctgcctgcacacctactgccaggactgcctggcccagctggctgatggcggccgggtgcgctgcccagagtgccgggagaccgtgcctgtgcccccagagggcgtggccagcttcaagaccaacttctttgtgaatggcctgctggacctggtgaaggcccgggcctgtggggacctgcgggccggcaagccagcctgtgccctgtgccccctggtgggcggcaccagcactggaggccctgccacagcccgctgcctggactgtgctgatgacctgtgccaggcctgtgctgatggccaccgctgcacccggcagacccacacccaccgggtggtggacctggtgggctaccgggccggctggtatgatgaggaggcccgggagcggcaggccgcccagtgcccccagcaccctggagaggccctgcgcttcctgtgccagccctgcagccagctgctgtgcagagaatgtcggctggacccccacctggaccacccctgcctgcccctggccgaggccgtgcgggcccggcggcccggcctggagggcctgctggccggcgtggacaacaacctggtggagctggaggccgcccggcgggtggagaaggaggccctggcccggctgcgggagcaggccgcccgggtgggcacccaggtggaggaggccgctgagggcgtgctgcgggccctgctggcccagaagcaggaggtgctgggccagctgcgggcccacgtggaggccgctgaggaggccgcccgggagcggctggccgagctggagggccgggagcaggtggcccgggctgctgctgcctttgcccggcgggtgctgagcctgggccgggaggccgagatcctgagcctggagggcgccatcgcccagaggctgcggcagctgcagggctgcccctgggcccctggccctgccccctgcctgctgccccagctggagctgcaccctggcctgctggacaagaactgccacctgctgcggctgagctttgaggagcagcagccccagaaggatggcggcaaggatggagctggcacccagggcggggaggagagccagagcagaagagaagatgagcccaagacagagcggcagggcggcgtgcagccccaggccggagatggagcccagacccccaaggaggagaaggcccagaccacccgggaggagggcgcccagaccctggaggaggaccgggcccagacccctcatgaagatggcggcccccagccccaccggggcggccggcccaacaagaagaagaagttcaagggccgcctgaagagcatcagccgggagcccagccctgccctgggccccaacctggatggcagcggcctgctgccccggcccatcttctactgcagcttccccaccaggatgcctggggacaagaggagcccccgcatcaccggcctgtgccccttcggcccccgggagatcctggtggctgatgagcagaacagagccctgaagcgcttcagcctgaatggagactacaagggcaccgtgcctgtgcctgagggctgcagcccctgcagcgtggccgccctgcagagcgctgtggccttcagcgccagcgcccggctgtacctgatcaaccccaacggggaggtgcagtggaggcgggccctgagcctgagccaggccagccatgctgtggccgccctgcccagcggggacagagtggccgtgtctgtggccggccacgtggaggtgtacaacatggagggcagcctggccacccgcttcatccctgggggcaaggccagccggggcctgcgggccctggtgttcctgaccaccagcccccagggccactttgtgggcagtgactggcagcagaacagcgtggtgatctgtgatggcctgggccaggtggtgggggagtacaagggccctggcctgcacggctgccagcccggctctgtgtctgtggacaagaagggctacatcttcctgaccctgcgggaggtgaacaaggtggtgatcctggaccccaagggcagcctgctgggggacttcctgacagcctaccacggcctggagaagccccgggtgaccaccatggtggatggccgctacctggtggtgtccctgagcaatggcaccatccacatcttccgggtgcgcagcccagacagctag

SEQ ID NO: 220960 - DNA, 2268 bp, Artificial Sequence
  derived and/or modified sequence
atggtgagccacggcagcagccccagcctgctggaggccctgagctctgattttcttgcctgtaagatttgtttggagcagttaagggctcccaaaactctgccatgtctgcacacctactgtcaggactgtcttgcccagttagccgatggtggcagggttcggtgccccgagtgcagggagactgtccctgtccctccagagggtgtcgcctcttttaaaactaatttcttcgtaaacgggctgctagacctggtgaaagctcgggcgtgtggggatctgcgagcaggcaagccagcctgcgcgttgtgtcccttggtgggcggaacgagtacaggagggcctgcgacagcccgatgtttagattgtgcagacgatttgtgccaggcatgtgctgacggacataggtgcactcgacagacccacacccaccgtgttgtggacctcgtgggctacagggcaggctggtatgatgaagaagctcgggaacgtcaggccgctcagtgcccccagcatcccggcgaagccctacgttttctatgtcagccatgttcccagctgctgtgtcgcgagtgcaggctggatccgcacctcgaccacccctgtctgccacttgccgaagcagtgcgggcccggaggcctggactagaaggccttctcgcgggcgtggataataatttagtggaactcgaggcagcccggagagttgagaaggaagccctggccaggctcagggaacaggcagcccgagttgggacccaggtggaggaagcagcggaaggggttttgagggcgctgttagctcagaaacaagaagtcttgggacagctgagagctcatgtggaggccgccgaggaggccgcgcgcgaaagactcgccgaactggaagggcgggaacaggtcgctagagccgccgctgcatttgcaaggcgggtgttaagtcttggtcgcgaggccgagatactctctctcgagggagctatcgcccagcgcttgagacagctgcagggttgtccatgggcgcccggccccgctccgtgcctcctgccgcaactggagttacatccgggattacttgataagaactgccacctgttacgcttgtccttcgaggaacagcagccccagaaggacgggggaaaggatggcgcaggaacccaggggggggaagaaagccagagccgcagggaagacgagcccaagacagaaaggcagggcggggtgcagccacaagccggggatggcgctcaaactccaaaagaagaaaaagcacagacaaccagggaggaaggcgcccagactctggaggaagatagagcgcagaccccgcatgaggatggcggtccccagcctcacagaggtggccggccaaataagaagaagaagtttaagggtcggctaaagtcgatcagccgcgaaccctctcccgccttggggcccaatctcgatggctctggcttgctcccaagacccatcttctattgcagcttccctacccggatgcctggggacaagcgatcaccaaggattacaggcctgtgcccatttgggccccgcgaaattctggtagcggatgaacagaatcgggccctgaaacgattttctttgaacggggactacaaagggactgtgcccgtgccggaggggtgctccccgtgcagtgttgcggctcttcagtctgccgtggcgttctcagcctccgcccgtctgtatctaattaaccccaatggggaggtccagtggagacgcgctttatccctgagtcaggcatcgcacgccgtcgccgcactgccctctggcgacagagtcgccgtttcggtggccggccatgttgaagtctacaatatggagggatcgctcgccacccggtttattcccggcggcaaggcttcacgcggactgagggccctggtctttctcaccacctctcctcaggggcattttgtggggagtgactggcaacaaaactccgtggtgatctgcgacggcctgggacaagtggtcggcgaatataaaggtcctggcctacacgggtgccaacccggcagtgtgagtgtcgacaagaaggggtatatttttctgaccctgcgcgaagtgaacaaagtagttatcctggaccccaaggggtccctgctgggggactttctgacagcttaccatggcttagagaaacctcgtgtgacaacgatggtggatggaaggtacctcgtggtttccctaagcaacggaacaattcatatatttagagtgcggtcacccgattcttag

SEQ ID NO: 220961 - DNA, 2268 bp, Artificial Sequence
  derived and/or modified sequence
atggtgtcccacgggagctctccctccctcctggaggcactctcgagtgacttcttggcctgtaaaatctgccttgaacaactcagggcacctaagactctcccgtgcctgcacacctactgtcaggattgcctggcccagctggccgacgggggtcgggttcgttgcccggagtgcagagaaactgttcctgtgccccctgagggtgtagcttctttcaagacaaacttttttgtcaatgggctccttgatctggtgaaagcgagagcatgtggggatttacgcgctggaaaaccagcttgtgccctctgccccctcgtggggggaactagcacaggtggccctgccacggcgagatgtcttgactgcgcagacgatctctgccaggcctgtgcagatggccaccggtgtacacgacaaacacacactcaccgggtggtggaccttgtcggctaccgcgctggctggtatgacgaggaggccagagaacggcaggctgcgcaatgtccccagcaccctggtgaggctctgcgtttcctgtgtcagccatgctcccagcttctatgccgcgaatgcagactggacccacacctggaccacccctgcctacctctggctgaggcagtcagagccagaaggcctggcctagaggggctgcttgccggagtcgataacaatctggtagaactcgaggcagcacggagagtagaaaaggaggcccttgctcggctcagggagcaagctgccagggtaggaacccaagtcgaggaggcagccgaaggcgtactccgagccctcttagctcaaaagcaggaagtgctgggtcagctcagggcccacgtggaagccgctgaagaggctgccagggaacgtctggccgagctggagggacgagaacaggtggcccgagctgctgccgcttttgccaggcgcgtcctatccctggggagagaggccgagatcctttccttggagggtgcaattgcacagaggcttcgccagctgcaaggctgtccctgggcacctggcccagctccatgcctgcttcctcagctggaactgcaccccggtctcttagacaaaaactgtcatctcctgaggctgtcttttgaagaacagcaaccccaaaaggacggaggcaaggacggtgccggaacacagggtggggaagagagccagtcaagaagggaagacgagccaaaaacagaaaggcaagggggagttcagccacaggcaggtgacggcgctcaaacacccaaggaggagaaggcacaaacaacccgcgaagagggtgctcagactctagaggaggaccgggctcagacgccacacgaagacggcggaccccaaccccatagaggaggcaggccaaacaaaaagaaaaagtttaaggggaggctgaagtcaattagtcgggagccgtcccctgccctcggtcctaaccttgatggatccgggttgctccccagacccatattctattgtagctttcctaccagaatgccgggagacaaacgcagcccgaggatcacgggattgtgccctttcgggccacgtgagatcctcgtggcagatgagcaaaatcgggctttgaagcggttctcactgaacggcgactataaaggcaccgtgcctgtgcctgagggatgttcaccttgtagtgtcgccgcattgcagtcggccgtggccttttctgcctcagcccgactttacctaataaatcctaacggagaagtgcagtggcgccgagcgctcagcctctcccaggccagccacgctgtggccgctctgccctcaggggaccgcgtcgccgtaagcgttgccggtcacgtagaggtctacaacatggagggctctctggcaacaagatttatcccaggcggaaaggcaagccggggactgagggccctcgttttcctcactaccagcccacagggacactttgttggttcagactggcaacagaacagtgttgtcatttgcgatggtctgggccaggtagtgggggaatataaggggcctgggctccatggatgccaaccagggagcgtgtcagtggataagaaaggctacatctttcttacattgagggaggtgaacaaagtggtaattctggatcccaaagggtctttgttgggggactttttgaccgcttatcatggattggagaagccgagggtcaccacaatggttgatggcagatacttggtggtgagcctcagtaacggtaccattcatatattcagggtgaggtctcccgattcttag

SEQ ID NO: 220962 - DNA, 3613 bp, Artificial Sequence
  derived and/or modified sequence
cctggctgggacggaagttgcaccacaagtacaattagtttcagttttgtttcttttccaggcacccagcaacggcggcctccaggcctcaggccccctcaccatcctagaggtcaagatcagctctggctagttctcacaggtctgacccaacaagtagcactgacatttttacgtttgctggatgtacacacggaagtggaggaggaggaggagaaggaggagggcagctccttagctcaagagcaagtggcccaaggcctcagaagactagaaggaagttcctggccattcagcatggtttcccacgggtcctcgccctccctcctggaggccctgagcagcgacttcctggcctgtaaaatctgcctggagcagctgcgggcacccaagacactgccctgcctgcatacctactgccaagactgcctggcacagctggcggatggcggccgcgtccgctgccccgagtgccgcgagacagtgcctgtgccgcccgagggtgtggcctccttcaagaccaacttcttcgtcaatgggctgctggacctggtgaaggcccgggcctgtggagacctgcgtgccgggaagccagcctgtgccctgtgtcccctggtgggtggcaccagcaccggggggccggccacggcccggtgcctggactgtgccgatgacttgtgccaggcctgtgccgacgggcaccgctgcacccgccagacccacacccaccgcgtggtggacctggtgggctacagggccgggtggtatgatgaggaggcccgggagcgccaagcggcccagtgtccccagcaccccggggaggcactgcgcttcctgtgccagccctgctcacagttgctgtgcagagagtgccgcctagacccccacctggaccacccctgcctgcctctggctgaagctgtgcgtgcccggaggccgggcctggagggactgctggccggtgtggacaataacctggtggagctggaggcagcgcggagggtggagaaggaggcgctagcccggctgcgggagcaggcggcccgggtggggactcaggtggaggaggcggctgagggcgtcctccgggccctgctggcccagaagcaggaggtgctggggcagctacgagcccacgtggaggctgccgaagaagctgctcgggagaggctggcggagcttgagggccgggagcaggtggccagggccgcagccgccttcgcccgccgggtactcagcctggggcgagaggccgagatcctctccctggaaggggcgatcgcacagcggctcaggcagctgcagggctgcccctgggcaccaggcccggccccctgcctgctcccacagctggagctccatcctgggctcctggacaagaactgccaccttcttcggctgtcctttgaggagcagcagccccagaaggatggtgggaaagacggagctggtacccagggaggtgaggagagccagagccggagggaggatgagccgaagactgagagacagggtggagtccagccccaggctggagatggagcccagaccccaaaagaggaaaaagcccagacaacccgagaagagggagcccagaccttggaggaggacagggcccagacaccccacgaggatggaggaccccagccccacaggggtggcagacccaacaagaagaaaaagttcaaaggcaggctcaagtcaatttcccgggagcccagcccagccctggggccgaatctggacggctctggcctcctccccagacccatcttttactgcagtttccccacgcggatgcctggagacaagcggtccccccggatcaccgggctctgtcccttcggtccccgggagatcctggtggcggatgagcagaaccgggcactgaaacgcttctccctcaacggcgactacaagggcaccgtgccggtccctgagggctgctccccttgcagcgtggccgccctgcagagcgcggtggccttctccgctagcgcacggctctatctcatcaaccccaacggcgaagtgcagtggcgcagggccctgagcctctcccaggccagccacgcggtggcggcactgcctagcggggaccgcgtggctgtcagcgtggcgggccacgtggaggtgtacaatatggaaggcagcctggccacccggttcattcctggaggcaaggccagccggggcctgcgggcgctggtgtttctgaccaccagcccccaggggcatttcgtggggtcggactggcagcagaatagtgtggtaatctgtgatgggctgggccaggtggttggggagtacaaggggccaggcctgcatggctgccagccgggctccgtgtctgtggataagaagggctacatctttctgacccttcgagaagtcaacaaggtggtgatcctggacccgaaggggtccctccttggagacttcctgacagcctaccacggcctggaaaagccccgggttaccaccatggtggatggcaggtacctggtcgtgtccctcagtaacgggaccatccacatctttcgggtccgttctccggacagttaaaggggctaggactagggtgagagggagtggggagggagagggcaggaaggaggcagagctgtccgtgggaggtggaggccgaggacattttcctgaagggcaggggttggcaacttttcaacatggagtgccaaactgctaacccgtcttctagtgtgtgagaatagggaccaaggtggtggcgtgaccttaactctcagaagcagaggaggcaggtgggtggagggggatgctgggagttcacctgcctcttgctttttgtgggtggctgctgccaccaccgccgctgctatatagtttaggtttctgaggtttgtgagcctgtcctgctttgcattcttcaaaaccattcctgatagagtagccgagggagagtcttggggccaagaagggcccagggtgggtcaggcgtgtgcactgtggaacagagctgagaccccggccccccttggactggcacagggtcctacagagtcagaggaggcctgagatttcgaatgggcagtgaatggcctcttctgccagccacaggcaggatgctccttgatcacggcatcccccggcggtagtacagggtgagcttgcaggagggtctgcaagtgcagacagcagctggggccaaagaggtgttaggttcaaaggctgcgaagagaataggctactggaaaaccaaacccaacagaattcacgtccaaaaatccacattctccatcgcttctcagccttttggctaagattaagtattaaaaaaaaaccaggctctgccaggcgcagtggctcatgcctataatcccggcactttgggagtctgtggcaggaggattgcttgaggccaggagtttgagaccagcctgggcaacatagcgagaccccatctctacaaaagattaaaaattagctgcgtgtagtagcatatgcctttcaacgtagctactcaggaggctgaggtgggaggatcccttgagccgaggagtttgagtctgcagtgagctatgatcgcaccactgcattccagaccccatctcgaaaaaaaaaaaaaaaaaaaaaa

SEQ ID NO: 220963 - DNA, 2268 bp, Artificial Sequence
  derived and/or modified sequence
atggtgagccacggcagcagccccagcctgctggaggccctgagcagcgacttcctggcctgcaagatctgcctggagcagctgagagcccccaagaccctgccctgcctgcacacctactgccaggactgcctggcccagctggccgacggcggcagagtgagatgccccgagtgcagagagaccgtgcccgtgccccccgagggcgtggccagcttcaagaccaacttcttcgtgaacggcctgctggacctggtgaaggccagagcctgcggcgacctgagagccggcaagcccgcctgcgccctgtgccccctggtgggcggcaccagcaccggcggccccgccaccgccagatgcctggactgcgccgacgacctgtgccaggcctgcgccgacggccacagatgcaccagacagacccacacccacagagtggtggacctggtgggctacagagccggctggtacgacgaggaggccagagagagacaggccgcccagtgcccccagcaccccggcgaggccctgagattcctgtgccagccctgcagccagctgctgtgcagagagtgcagactggacccccacctggaccacccctgcctgcccctggccgaggccgtgagagccagaagacccggcctggagggcctgctggccggcgtggacaacaacctggtggagctggaggccgccagaagagtggagaaggaggccctggccagactgagagagcaggccgccagagtgggcacccaggtggaggaggccgccgagggcgtgctgagagccctgctggcccagaagcaggaggtgctgggccagctgagagcccacgtggaggccgccgaggaggccgccagagagagactggccgagctggagggcagagagcaggtggccagagccgccgccgccttcgccagaagagtgctgagcctgggcagagaggccgagatcctgagcctggagggcgccatcgcccagagactgagacagctgcagggctgcccctgggcccccggccccgccccctgcctgctgccccagctggagctgcaccccggcctgctggacaagaactgccacctgctgagactgagcttcgaggagcagcagccccagaaggacggcggcaaggacggcgccggcacccagggcggcgaggagagccagagcagaagagaggacgagcccaagaccgagagacagggcggcgtgcagccccaggccggcgacggcgcccagacccccaaggaggagaaggcccagaccaccagagaggagggcgcccagaccctggaggaggacagagcccagaccccccacgaggacggcggcccccagccccacagaggcggcagacccaacaagaagaagaagttcaagggcagactgaagagcatcagcagagagcccagccccgccctgggccccaacctggacggcagcggcctgctgcccagacccatcttctactgcagcttccccaccagaatgcccggcgacaagagaagccccagaatcaccggcctgtgccccttcggccccagagagatcctggtggccgacgagcagaacagagccctgaagagattcagcctgaacggcgactacaagggcaccgtgcccgtgcccgagggctgcagcccctgcagcgtggccgccctgcagagcgccgtggccttcagcgccagcgccagactgtacctgatcaaccccaacggcgaggtgcagtggagaagagccctgagcctgagccaggccagccacgccgtggccgccctgcccagcggcgacagagtggccgtgagcgtggccggccacgtggaggtgtacaacatggagggcagcctggccaccagattcatccccggcggcaaggccagcagaggcctgagagccctggtgttcctgaccaccagcccccagggccacttcgtgggcagcgactggcagcagaacagcgtggtgatctgcgacggcctgggccaggtggtgggcgagtacaagggccccggcctgcacggctgccagcccggcagcgtgagcgtggacaagaagggctacatcttcctgaccctgagagaggtgaacaaggtggtgatcctggaccccaagggcagcctgctgggcgacttcctgaccgcctaccacggcctggagaagcccagagtgaccaccatggtggacggcagatacctggtggtgagcctgagcaacggcaccatccacatcttcagagtgagaagccccgacagctag

SEQ ID NO: 220964 - protein, 1849 aa, Artificial Sequence
  derived and/or modified sequence
MARLADYFIVVGYDHEKPGSGEGLGKIIQRFPQKDWDDTPFPQGIELFCQPGGWQLSRERKQPTFFVVVLTDIDSDRHYCSCLTFYEAEINLQGTKKEEIEGEAKVSGLIQPAEVFAPKSLVLVSRLYYPEIFRACLGLIYTVYVDSLNVSLESLIANLCACLVPAAGGSQKLFSLGAGDRQLIQTPLHDSLPITGTSVALLFQQLGIQNVLSLFCAVLTENKVLFHSASFQRLSDACRALESLMFPLKYSYPYIPILPAQLLEVLSSPTPFIIGVHSVFKTDVHELLDVIIADLDGGTIKIPECIHLSSLPEPLLHQTQSALSLILHPDLEVADHAFPPPRTALSHSKMLDKEVRAVFLRLFAQLFQGYRSCLQLIRIHAEPVIHFHKTAFLGQRGLVENDFLTKVLSGMAFAGFVSERGPPYRSCDLFDELVAFEVERIKVEENNPVKMIKHVRELAEQLFKNENPNPHMAFQKVPRPTEGSHLRVHILPFPEINEARVQELIQENVAKNQNAPPATRIEKKCVVPAGPPVVSIMDKVTTVFNSAQRLEVVRNCISFIFENKILETEKTLPAALRALKGKAARQCLTDELGLHVQQNRAILDHQQFDYIIRMMNCTLQDCSSLEEYNIAAALLPLTSAFYRKLAPGVSQFAYTCVQDHPIWTNQQFWETTFYNAVQEQVRSLYLSAKEDNHAPHLKQKDKLPDDHYQEKTAMDLAAEQLRLWPTLSKSTQQELVQHEESTVFSQAIHFANLMVNLLVPLDTSKNKLLRTSAPGDWESGSNSIVTNSIAGSVAESYDTESGFEDSENTDIANSVVRFITRFIDKVCTESGVTQDHIKSLHCMIPGIVAMHIETLEAVHRESRRLPPIQKPKILRPALLPGEEIVCEGLRVLLDPDGREEATGGLLGGPQLLPAEGALFLTTYRILFRGTPHDQLVGEQTVVRSFPIASITKEKKITMQNQLQQNMQEGLQITSASFQLIKVAFDEEVSPEVVEIFKKQLMKFRYPQSIFSTFAFAAGQTTPQIILPKQKEKNTSFRTFSKTIVKGAKRAGKMTIGRQYLLKKKTGTIVEERVNRPGWNEDDDVSVSDESELPTSTTLKASEKSTMEQLVEKACFRDYQRLGLGTISGSSSRSRPEYFRITASNRMYSLCRSYPGLLVVPQAVQDSSLPRVARCYRHNRLPVVCWKNSRSGTLLLRSGGFHGKGVVGLFKSQNSPQAAPTSSLESSSSIEQEKYLQALLNAVSVHQKLRGNSTLTVRPAFALSPGVWASLRSSTRLISSPTSFIDVGARLAGKDHSASFSNSSYLQNQLLKRQAALYIFGEKSQLRNFKVEFALNCEFVPVEFHEIRQVKASFKKLMRACIPSTIPTDSEVTFLKALGDSEWFPQLHRIMQLAVVVSEVLENGSSVLVCLEEGWDITAQVTSLVQLLSDPFYRTLEGFQMLVEKEWLSFGHKFSQRSSLTLNCQGSGFAPVFLQFLDCVHQVHNQYPTEFEFNLYYLKFLAFHYVSNRFKTFLLDSDYERLEHGTLFDDKGEKHAKKGVCIWECIDRMHKRSPIFFNYLYSPLEIEALKPNVNVSSLKKWDYYIEETLSTGPSYDWMMLTPKHFPSEDSDLAGEAGPRSQRRTVWPCYDDVSCTQPDALTSLFSEIEKLEHKLNQAPEKWQQLWERVTVDLKEEPRTDRSQRHLSRSPGIVSTNLPSYQKRSLLHLPDSSMGEEQNSSISPSNGVERRAATLYSQYTSKNDENRSFEGTLYKRGALLKGWKPRWFVLDVTKHQLRYYDSGEDTSCKGHIDLAEVEMVIPAGPSMGAPKHTSDKAFFDLKTSKRVYNFCAQDGQSAQQWMDKIQSCISDA

SEQ ID NO: 220965 - DNA, 5550 bp, Artificial Sequence
  derived and/or modified sequence
atggcccgcctggcagactatttcatcgtggtcggctacgaccacgagaagccagggtcaggagaaggactcgggaagatcattcagagattccctcagaaagactgggacgatacccccttcccgcagggaatcgaattgttctgtcagccggggggatggcagctgagccgcgagcggaaacagccgaccttctttgtggttgtgttgacagacattgacagtgatcgccactattgtagctgtttaaccttttatgaagcagagattaacctccagggtactaaaaaagaagagatcgaaggggaggccaaagtatctggcctgatccagcccgccgaggtgtttgcacccaagtccctcgtccttgtgagccgcctgtactacccagagatcttcagagcttgcttgggcctgatttatacggtgtatgtagactcactcaatgtgagcctggagtccttgatcgctaacctgtgcgcatgtcttgtccctgccgctgggggaagtcagaaattattttctttgggcgcaggcgatcgacaacttattcagacccctctccatgacagcctgccaattacgggcaccagcgtggccctgctattccagcagttgggtatccagaacgttctgtccctgttttgcgcagtcctcactgagaacaaagtactgttccactcagctagtttccaaaggttatcggacgcctgtcgggcacttgagagtctaatgtttcccttgaagtactcctatccctacatccccatcctgccggcacagctgctcgaagtcctaagcagtccaacgccatttattataggggtgcattccgtgttcaagaccgacgttcacgagctgttggatgtcatcatagccgacttggacggcggaaccatcaagataccagaatgcattcacctctccagcctgcctgagcccctcctgcaccagacgcagtccgcattgtccctcatccttcacccggacctggaggtggctgaccatgcctttcctccaccgagaacggctttgagtcactcgaagatgctcgataaagaggtgcgggccgtgtttttgcgtctgtttgcacaactgttccagggctatcgctcgtgtttgcagcttatcagaatacacgccgagcccgtgattcactttcacaagaccgccttcttagggcaacgtggactagtggagaacgactttctgaccaaagttctgtctggcatggcgttcgccggcttcgtgtccgaaaggggaccaccttaccgatcttgtgatctgttcgacgaactcgtggcatttgaagtggaaaggataaaggtagaagagaacaaccccgtcaagatgataaaacatgtgagagagctggctgagcaactgttcaaaaacgagaaccctaacccacatatggccttccagaaggtgccaaggcccaccgagggcagccacttacgcgtgcacatcctcccattccccgagattaacgaggccagggtccaggagctgattcaggagaatgtcgccaagaatcaaaacgccccacccgcgacacgaattgaaaaaaagtgcgtcgtccccgcgggcccacccgtcgtgtccattatggataaggtgacaaccgtgttcaacagcgcacagcgtttggaggttgttagaaactgcatttccttcatttttgagaataaaatcctggagaccgaaaagaccctcccagccgcactgagagctcttaagggcaaagcagctcgacagtgcctgacagacgagttaggacttcacgtgcagcagaaccgtgcaatcttggatcatcaacagtttgactacatcattcgcatgatgaattgtacgctacaggactgttcatccttagaggaatacaatatcgcagcagctctgctccctctgactagtgccttctatcgcaagttggcccccggggtgtcgcagtttgcctacacttgcgtccaggatcatccaatttggacaaaccagcagttctgggaaactactttttacaatgcagtccaggagcaagtgcggtctctatatctatcggccaaggaggacaatcatgcgccccacctgaagcaaaaggataagctccctgatgatcactaccaggagaagactgctatggatctggccgccgagcagctgagactgtggcccaccctgagcaagtcaactcagcaggagcttgtccagcatgaggaaagtaccgtctttagtcaggcaatccattttgccaatctcatggttaatctactagtgccccttgatacaagtaagaataaactgcttagaacaagcgctccaggagactgggagagcggttcaaacagcattgtgacaaactcgattgctggcagcgtggccgagagctacgatactgaaagtgggttcgaggatagtgagaacactgacatcgcaaacagtgtggtgcggttcattacacgattcatcgacaaagtgtgcaccgagtctggagttacccaggaccacataaagagtctgcattgcatgatccccggtatcgtcgctatgcatatcgagactctggaggctgtccatagagaaagccgacggttacctccgattcagaaacccaagattttgagaccggctcttctacccggggaagagatcgtgtgtgaaggcctccgtgtgctgctggatccagacggcagagaggaggctaccggcggactgctgggcggccctcagctgcttcctgccgaaggagctctgttcttgacaacatatcgaatcctcttccgcggcacgcctcatgatcagctcgtgggagagcagaccgtggttaggagtttccctatcgcctcaataacgaaagaaaaaaaaattacaatgcagaatcaactgcaacagaacatgcaggaaggccttcagataacttccgccagcttccagctgataaaagtcgcgtttgatgaggaggtctctccagaggtcgttgaaatattcaagaagcagttgatgaagtttcggtacccacagtccattttttctacatttgccttcgcggccgggcagaccactccacagattatattacctaaacagaaagagaaaaatacatcatttcggaccttcagtaagactattgtgaaaggcgccaaaagggccggaaaaatgacaattgggagacagtacctgctgaagaagaagactggaaccatcgttgaagagagggttaacagacccggttggaatgaggacgacgacgtgtctgtgagtgatgagagcgagctccccacatcaaccacattgaaggcttcagaaaaatcaaccatggagcagctggtggagaaggcatgctttcgcgattatcaacgcctgggactgggtactatctcaggctccagcagtcgatccagaccagaatacttccggatcactgcctcgaaccgcatgtacagcctgtgtcgatcctatcccggtctgcttgtggtacctcaggctgtccaggacagttccctgccccgcgtcgctagatgttaccgccataaccgactgcctgtggtgtgctggaagaattcaaggtccggcacgctgctgctccgaagtggcggcttccacggaaaaggtgtggtgggactttttaaaagccaaaactcccctcaggccgctcctactagctcattagaaagcagtagctccattgagcaggagaaatacctccaggccttattgaacgcggtgtcagttcaccagaagctgcggggaaatagcacgttgaccgtgaggcccgccttcgccctgtcgccgggcgtgtgggcttctcttcgctccagcactcgcctcatttcctctcccacgtcattcattgacgtgggtgcccgcctggctggcaaagatcattccgcaagtttctccaatagctcctatctccagaaccagttgttaaaacgccaagccgccctctatatttttggagaaaaatcacagctgaggaactttaaagtagagtttgcccttaactgcgagttcgtcccagtcgaattccatgaaattcgacaagtgaaagcctcgtttaagaaactgatgcgagcctgcatcccgagtacaatcccgacggattcggaggttacatttctcaaagctctgggggatagcgaatggttcccgcagctgcacaggatcatgcaactagcagttgtggtctccgaggttcttgagaacggttccagtgtactggtgtgcctggaagaagggtgggacataactgctcaagtaacatcgctagtgcagttgctttccgatcctttctatcgcactttggaaggtttccagatgctggtagagaaagagtggctatcgttcggacacaaattctcccagcgctcttcccttacactaaactgccaggggagcggctttgcaccggtgttccttcaatttctggactgcgtccatcaggttcacaaccagtaccccactgaatttgagttcaacttgtattatctaaagttcttggcttttcactatgtctccaaccggtttaagacatttttgctcgactccgattacgaacgcttagagcacggcaccctgttcgatgacaaaggcgagaagcatgccaaaaagggcgtctgcatctgggaatgcattgataggatgcacaaacgcagtccaatcttcttcaattatctctacagtccactcgaaatcgaggcactgaaacctaatgtgaacgtcagtagcctaaagaagtgggactactacattgaagagactctatctaccgggccaagctatgactggatgatgttgacccccaaacacttccccagcgaggacagtgatttggccggcgaagccggaccaagaagccagcgccggaccgtgtggccttgctacgatgacgtgagttgcactcagcctgatgccttaactagcctgttttctgagatcgagaagcttgaacataagctgaaccaggcccctgagaaatggcagcagctgtgggagcgggtcacggtcgacttaaaggaggagcccaggacagatcgcagccaacgtcatttaagtcgtagtcctggaattgtgagtacgaatctcccgtcctaccaaaagagatcactcttacacctgcctgactcctccatgggcgaggaacagaacagctcaatatccccaagcaacggcgttgagagacgagcagcaaccctatattcccagtataccagcaagaatgacgaaaatcgctcctttgaaggaaccctatacaagcggggcgcactgctgaaggggtggaagccccgatggttcgtgctagatgtgaccaaacaccagctgcgctactatgattctggtgaagataccagctgtaaagggcatatcgatttggctgaagtcgaaatggtcattcctgccggaccatcaatgggggccccaaagcacacttcagacaaagccttcttcgatctgaaaacatctaaacgcgtgtataacttctgcgcacaggacggtcagagcgcccagcagtggatggacaagatccagagctgcatctccgatgcgtag

SEQ ID NO: 220966 - DNA, 5550 bp, Artificial Sequence
  derived and/or modified sequence
atggcccggctggccgactacttcatcgtggtgggctatgaccacgagaagccaggcagcggggagggcctgggcaagatcatccagcgcttcccccagaaggactgggatgacacccccttcccccagggcatcgagctgttctgccagcccggcggctggcagctgagccgggagaggaagcagcccaccttctttgtggtggtgctgacagacatcgacagcgacagacactactgcagctgcctgaccttctatgaggccgagatcaacctgcagggcaccaagaaggaggagattgaaggagaggccaaggtgtctggcctcatccagcctgctgaggtgtttgcccccaagagcctggtgctggtgtcccggctgtactacccagagatcttccgggcctgcctgggcctcatctacacagtgtatgtggacagcctgaatgtgtccctggagagcctcatcgccaacctgtgtgcctgcctggtgcctgctgctgggggcagccagaagctgttcagcctgggcgctggggaccggcagctgatccagacccccctgcatgacagcctgcccatcaccggcacctctgtggccctgctcttccagcagctgggcatccagaatgtgctgagcctcttctgtgctgtgctgacagagaacaaggtgctcttccacagcgccagcttccagaggctgagtgatgcctgccgggccctggagagcctgatgttccccctgaagtacagctacccctacatccccatcctgcctgcccagctgctggaggtgctgagcagccccacccccttcatcatcggcgtgcacagcgtcttcaagacagatgtgcatgagctgctggatgtgatcatcgctgacctggatggcggcaccatcaagatccctgagtgcatccacctgagcagcctgcctgagcccctgctgcaccagacccagagcgccctgagcctcatcctgcacccagacctggaggtggccgaccacgccttccccccacccaggacagccctgagccacagcaagatgctggacaaggaggtgcgggctgtgttcctgcggctgtttgcccagctgttccagggctaccgcagctgcctgcagctgatccgcatccatgctgagcctgtgatccacttccacaagacagccttcctgggccagaggggcctggtggagaatgacttcctgaccaaggtgctgagcggcatggcctttgctggctttgtgtctgagcggggccccccctaccgcagctgtgacctgtttgatgagctggtggcctttgaggtggagcgcatcaaggtggaggagaacaaccctgtgaagatgatcaagcacgtgcgggagctggccgagcagctgttcaagaatgaaaaccccaacccccacatggccttccagaaggtgccccggcccacagagggcagccacctgcgggtgcacatcctgcccttccctgagatcaatgaggcccgggtgcaggagctgatccaggagaatgtggccaagaaccagaatgcccccccagccaccagaattgagaagaagtgtgtggtgcctgctggcccccctgtggtgtccatcatggacaaggtgaccaccgtcttcaacagcgcccagaggctggaggtggtgaggaactgcatctccttcatctttgagaacaagatcctggagacagagaagaccctgcctgctgccctgcgggccctgaagggcaaggccgcccggcagtgcctgacagatgagctgggcctgcacgtgcagcagaacagagccatcctggaccaccagcagtttgactacatcatccgcatgatgaactgcaccctgcaggactgcagcagcctggaggagtacaacattgctgctgccctgctgcccctgaccagcgccttctacaggaagctggcccctggggtgtcccagtttgcctacacctgtgtgcaggaccaccccatctggaccaaccagcagttctgggagaccaccttctacaatgctgtgcaggagcaggtgcgcagcctgtacctgagcgccaaggaggacaaccacgccccccacctgaagcagaaggacaagctgcctgatgaccactaccaggagaagacagccatggacctggccgctgagcagctgcggctgtggcccaccctgagcaagagcacccagcaggagctggtgcagcacgaggagagcaccgtcttcagccaggccatccactttgccaacctgatggtgaacctgctggtgcccctggacaccagcaagaacaagctgctgcggaccagcgcccctggggactgggagagcggcagcaacagcatcgtgaccaacagcattgctggctctgtggccgagagctatgacacagaaagtggctttgaggacagtgaaaatacagacatcgccaacagcgtggtgcgcttcatcacccgcttcatcgacaaggtgtgcacagagagcggcgtgacccaggaccacatcaagagcctgcactgcatgatccctggcatcgtggccatgcacatcgagaccctggaggccgtgcaccgggagagccggcggctgccccccatccagaagcccaagatcctgcggcctgccctgctgcccggggaggagatcgtgtgtgagggcctgcgggtgctgctggaccctgatggccgggaggaggccaccggcggcctgctgggcggcccccagctgctgcctgctgagggcgccctcttcctgaccacctaccgcatcctcttccggggcacccctcatgaccagctggtgggggagcagacagtggtgcgctccttccccatcgccagcatcaccaaggagaagaagatcaccatgcagaaccagctgcagcagaacatgcaggagggcctgcagatcaccagcgccagcttccagctgatcaaggtggcctttgatgaggaggtgtccccagaggtggtggagatcttcaagaagcagctgatgaagttccgctacccccagagcatcttcagcacctttgcctttgctgctggccagaccaccccccagatcatcctgcccaagcagaaggagaagaacaccagcttccgcaccttcagcaagaccatcgtgaagggggccaagagagctgggaagatgaccatcggccggcagtacctgctgaagaagaagacaggcaccatcgtggaggagcgggtgaaccggcccggctggaatgaagatgatgatgtgtctgtgtctgatgagagcgagctgcccaccagcaccaccctgaaggccagcgagaagagcaccatggagcagctggtggagaaggcctgcttccgggactaccagaggctgggcctgggcaccatcagcggcagcagcagccgcagcaggcctgagtacttccgcatcacagccagcaacaggatgtacagcctgtgccgcagctacccaggcctgctggtggtgccccaggccgtgcaggacagcagcctgccccgggtggcccgctgctaccgccacaaccggctgcctgtggtgtgctggaagaacagccgcagcggcaccctgctgctgcggagcggcggcttccatggaaaaggagtggtgggcctcttcaagagccagaacagcccccaggccgcccccaccagcagcctggagagcagcagcagcattgagcaggagaagtacctgcaggccctgctgaatgctgtgtctgtgcaccagaagctgcggggcaacagcaccctgactgtgcggcctgcctttgccctgagccctggggtgtgggccagcctgcggagcagcaccaggctcatcagcagccccaccagcttcattgatgtgggcgcccggctggccggcaaggaccacagcgccagcttcagcaacagcagctacctgcagaaccagctgctgaagaggcaggccgccctgtacatctttggagagaagagccagctgaggaacttcaaggtggagtttgccctgaactgtgaatttgtgcctgtggagttccacgagatccggcaggtgaaggccagcttcaagaagctgatgagggcctgcatccccagcaccatccccacagattctgaggtgaccttcctgaaggccctgggggacagcgagtggttcccccagctgcaccgcatcatgcagctggccgtggtggtgtctgaggtgctggagaatggcagctctgtgctggtgtgcctggaggagggctgggacatcacagcccaggtgaccagcctggtgcagctgctgagtgaccccttctaccgcaccctggagggcttccagatgctggtggagaaggagtggctgagctttggccacaagttcagccagaggagcagcctgaccctgaactgccagggcagcggctttgcccctgtgttcctgcagttcctggactgtgtgcaccaggtgcacaaccagtaccccacagaatttgagttcaacctgtactacctgaagttcctggccttccactacgtgagcaaccgcttcaagaccttcctgctggacagcgactatgaaaggctggagcacggcaccctgtttgatgacaagggggagaagcacgccaagaagggcgtgtgcatctgggagtgcatcgacaggatgcacaagaggagccccatcttcttcaactacctgtacagccccctggagattgaggccctgaagcccaacgtgaatgtgagcagcctgaagaagtgggactactacatcgaggagaccctgagcacaggccccagctatgactggatgatgctgacccccaagcacttccccagtgaagattctgacctggccggggaggccggccccaggagccagaggagaacagtgtggccctgctatgatgatgtgtcctgcacccagccagatgccctgaccagcctcttcagcgagattgagaagctggagcacaagctgaaccaggcccctgagaagtggcagcagctgtgggagcgggtgacagtggacctgaaggaggagcccaggacagacaggagccagaggcacctgagccgcagccctggcatcgtgtccaccaacctgcccagctaccagaagaggagcctgctgcacctgcctgacagctccatgggagaggagcagaacagcagcatcagccccagcaatggagtggagaggagagctgccaccctgtacagccagtacaccagcaagaatgatgagaacagaagctttgagggcaccctgtacaagagaggagccctgctgaagggctggaagccccgctggtttgtgctggatgtgaccaagcaccagctgcgctactatgattctggagaggacaccagctgcaagggccacatcgacctggccgaggtggagatggtgatcccagctggccccagcatgggcgcccccaagcacaccagtgacaaggccttctttgacctgaagaccagcaagagggtgtacaacttctgtgcccaggacggccagagcgcccagcagtggatggacaagatccagagctgcatcagtgatgcctag

SEQ ID NO: 220967 - DNA, 5550 bp, Artificial Sequence
  derived and/or modified sequence
atggcccggctggccgactacttcatcgtggtgggctacgaccacgagaaaccggggtcgggcgaaggcttaggaaaaattattcaaaggtttccccaaaaggactgggacgacactcctttccctcaaggcattgaacttttctgtcagccggggggctggcagctctcacgggagcgtaagcagcctactttttttgtggtggtgctgacagacattgactccgaccgccattactgtagctgtttgacattctacgaggctgagataaacctccaaggcacaaagaaggaagagattgaaggagaagccaaggtatctggactgatacaaccggctgaggtgttcgctcctaaaagcctggtattagtctctcgcctatactatccagagatctttcgtgcatgtctgggtttgatatacaccgtgtatgtggacagtctgaacgtatcactagaaagccttattgccaatctgtgtgcatgcttagtgcccgccgcaggtggaagccaaaagctgttcagtttaggggctggagaccgacaacttatccagactccactgcacgactcacttcctattacaggaaccagcgtggctctcttatttcagcagcttggtatccaaaacgtcctgagcttattctgtgccgttttgacagagaataaggtgctcttccactccgcaagcttccaaaggttgtctgatgcctgccgggcattggaaagcctcatgttcccactgaagtatagctatccgtacatacctattctgcctgcccaattattggaggttctttcatcccccacacctttcatcataggagtgcacagcgttttcaagacagatgtgcacgagctcctggatgtcataattgcagatctcgacgggggaaccattaaaatccctgagtgcattcacttatcaagtctgccggagcccctcctgcaccagacccagagcgcactgtcattgatcctccatcctgatctcgaggtggccgatcacgcctttccgccacctaggaccgccctgtcacactctaaaatgctggacaaggaagtgcgcgctgtgttcctcagacttttcgcgcaactgtttcaaggctatcggtcatgtctacagcttattcgcatccacgccgagccagtgatccatttccacaagacagctttcctgggccagagagggttggtagaaaatgactttctgacaaaggttctatcaggtatggcctttgccggcttcgtatctgaacgaggccccccttaccggtcttgcgacttatttgacgaactggttgcctttgaggtggaaaggatcaaggtggaagagaacaaccccgtaaaaatgattaagcacgtgcgggagctcgcagaacagttgttcaaaaatgaaaatccgaatcctcatatggctttccagaaagtgccgcggcctacggagggttcccatctgcgagtgcatatactgccctttcctgaaatcaacgaggcacgggtccaggaactgatccaggagaatgtcgcgaaaaatcagaacgctcctcctgcgactaggattgagaagaaatgcgtggtgcctgccggaccacccgtggttagtatcatggacaaagtgaccacagtattcaatagtgctcagcgactggaggtggtgagaaactgcatcagtttcatcttcgaaaacaaaatcctcgagactgagaaaaccctgccagccgctctacgagccctgaaaggcaaggccgctcgacagtgccttactgacgagctcggcttgcacgttcaacagaatcgcgcgattctggaccaccagcaattcgattacattattaggatgatgaactgtacactgcaggactgttcctctctggaggaatacaatattgcggctgctctgctcccactcaccagcgcgttctataggaagctggctcccggcgtgagccagttcgcatacacctgtgtgcaggaccatccgatctggactaatcagcagttctgggagaccaccttttataacgctgtccaggaacaggtgcggtccttgtatttgtctgctaaggaagataatcatgccccccacctgaagcagaaggataagctcccagatgaccattatcaggaaaagacagccatggacctggctgccgagcaactacgcctttggccaactctgtctaagtccacacagcaggaactggtgcagcatgaggagagcacagtgttctctcaggcaatccattttgcaaacctgatggttaatttgctggtgccattggatacaagtaagaacaagctattacggacatcagctcccggggactgggagtccgggagcaatagcattgtgacaaactctattgcaggaagcgttgcggaaagctacgacaccgaatccggtttcgaagatagcgaaaataccgatattgcgaacagcgtggtgagattcattactagatttatcgataaggtttgcactgaatctggcgtgacgcaggatcatatcaagtcgctgcattgcatgatccccggaattgtggccatgcacattgagactctggaggcagtgcacagagagtccaggcgtttacctcccatccagaagccaaagattctgcggccggcgctcctcccgggggaagaaattgtatgcgagggcctgcgagtgctgctcgaccctgacgggagagaggaggctacgggggggctcttgggtgggccccaactcctacctgccgaaggagcactgtttctgactacctaccggatactgtttaggggcaccccccacgaccagttagtaggagagcaaaccgtagtgagatcctttccaatcgcctctatcaccaaagagaagaaaatcaccatgcaaaaccaacttcagcagaatatgcaggaaggacttcagattacaagtgcctccttccagttgatcaaagtggcgttcgatgaggaggtcagtcctgaggtcgtggaaattttcaaaaaacagctgatgaaatttcggtacccccaatctatcttctccactttcgccttcgcagcaggtcaaaccactcctcagattatactacccaagcagaaagaaaaaaataccagtttccgtacattttccaagactatcgtgaagggcgcaaaaagggccgggaaaatgacaatcggacgccagtatctactcaaaaagaagacagggacgattgtggaggaacgagtgaatcggcctggttggaacgaagatgatgatgtgtcagtatctgacgaatccgagctgcctacatctacaacccttaaggctagtgagaagtctaccatggagcaactcgtggaaaaggcctgcttccgtgactaccagagactgggtcttgggactatctccggcagttcttctagatcacggccagaatacttcagaataactgccagtaatcggatgtactccctttgtagatcctatccagggctgctggtagttccacaagctgtgcaggattcgagcttgcctcgagtggctagatgctaccgccacaaccgacttccagtcgtttgttggaaaaattcacgctcgggtaccttactattacggtccggaggttttcacggtaaaggtgtggtcggcctttttaagagtcagaattcaccacaggccgctcctacgtcatcccttgaaagcagtagctcaatcgagcaggagaaatatctgcaagcgttgctcaatgctgtcagcgtccaccaaaagctgcggggcaattcgacattgaccgtcaggcctgccttcgccctttctccaggagtctgggcttctctgaggagctcaacaagactcatcagctcacctacgtcctttatagatgtgggcgctcggctcgcagggaaagaccattcagcttcattcagcaactcaagctacttacagaaccaactgctgaaaaggcaggcagcattatatatatttggcgaaaagagccaactgcggaactttaaggtggagttcgctctgaactgtgagtttgtgcctgtcgagttccacgagattcgccaggtgaaggcatcctttaagaagctgatgcgcgcatgcatcccaagcacgatccccacagactctgaagtgacattcttgaaggcactcggggatagtgagtggttccctcaactccaccgcatcatgcaattggctgtggttgttagcgaggtgctggaaaacgggtcgtccgtgttagtgtgtctggaagagggctgggacataaccgcccaggtgactagcttagtgcagctgctgagcgacccattttacagaactctggagggatttcagatgctggtggagaaggagtggctcagttttggccataaatttagtcagcgctcaagcctcaccctcaactgccagggaagcggcttcgctccggtgtttttgcagtttctcgattgcgtgcaccaggtgcataaccagtatcccaccgagttcgaattcaatctgtactaccttaaattcctcgccttccactatgtgtcaaatcgattcaagacatttctgctcgacagcgactatgagcgcctggaacatggcactctcttcgatgataagggagaaaaacacgctaaaaagggcgtgtgtatctgggagtgtatcgaccggatgcataaaagatctcccattttctttaactatctctattcacccctcgaaattgaagccctaaaaccaaacgtgaatgtcagctcactcaagaagtgggattactacattgaggaaacgttgagcactggtccatcgtacgactggatgatgttgacacccaagcacttcccgtcggaggacagtgacctggccggcgaagcgggtcctagaagtcagagacggaccgtgtggccatgttacgatgacgtgtcgtgcacccagccggatgcattaacatctctgttttctgaaatcgagaagcttgagcacaagctgaaccaagcgcccgagaaatggcaacaattgtgggagcgggtaactgtggacttaaaggaagagcctcgaacagacaggtcccaaaggcatctgtcaagaagccccgggatcgtttccacaaacttacccagctatcaaaagaggtccttgctgcacctgccagattccagcatgggagaggaacagaactcatccatttcccctagcaacggggtcgagagacgcgccgccacactttacagccaatacacaagtaagaacgatgagaacagatcattcgagggtacattgtataagcgtggagccctcttaaaaggctggaagccgaggtggttcgtgctcgacgtgacgaaacatcagctccgctactacgacagtggtgaggacaccagttgcaaaggtcacattgacctcgcagaggtggagatggtaatcccggccggacccagtatgggggcccccaagcacacatccgataaagcgtttttcgatctgaaaacctcaaaaagagtttataacttctgtgcacaagacggccagagcgcccagcagtggatggataaaatccaaagctgtatcagcgacgcctag

SEQ ID NO: 220968 - DNA, 5550 bp, Artificial Sequence
  derived and/or modified sequence
atggccaggctcgccgactactttatagtcgtgggctacgaccacgaaaagcccggatctggcgagggcctggggaagataatacagcgctttccacagaaagattgggatgacaccccgttccctcagggtatagaactattctgtcagcccggagggtggcagctgtcaagagagaggaagcagccaacattcttcgtggtggtgttaaccgacatcgactcagatagacattactgtagctgtttgactttctacgaagccgagatcaatctgcagggcacaaagaaggaggagatcgaaggtgaagccaaggttagcggactgatccagcctgccgaggtgtttgccccaaagtccttggtgctggtgagcaggttatactatcctgaaatttttcgtgcatgcctgggccttatctatacagtgtacgtggacagcttgaacgtgagtctggagtcattgatcgcaaatctctgcgcttgtctcgtcccagccgcaggtggttcccagaaactcttttctctgggcgcaggagacagacaactcattcaaacccccttacatgatagtctgcctatcactggtacgtccgtagcactgcttttccagcaactagggatccaaaatgtgctctccctgttttgcgcggtgctcacagaaaacaaggttctgtttcatagcgcctcatttcagcggctctctgacgcctgcagggctcttgaaagcttaatgttccctctcaaatactcatacccatacatccccatcctgcctgcccaactgctggaggtactctccagccccactccctttatcattggcgttcacagcgtgtttaagacagacgttcatgagttactcgacgtgataattgcagatctggacggtggcaccataaagatccctgaatgcattcatctatcaagcctgcccgaacctctcctgcatcagacccagtcagctttatcactgatcctccaccccgaccttgaggtcgcggatcacgcgttcccaccaccacggaccgcgctaagccactcaaaaatgctcgataaggaggtccgtgccgtttttctgcggttatttgcccagctctttcagggatatagatcctgccttcagctgatccgaatccacgcggaaccagtgatccacttccacaaaaccgccttcctggggcaacgaggtttggtggagaacgattttttaaccaaggtcctctccggtatggccttcgctggctttgtctctgaacgaggccctccctatcgctcatgcgatctgttcgacgaactcgtcgccttcgaggttgagcggataaaggttgaagaaaacaatcccgtgaaaatgattaagcatgtgcgagaattggccgagcagctgtttaaaaatgagaaccccaatccacacatggccttccagaaagtcccacggccaactgagggtagtcacctccgcgtgcacatcctcccattccccgaaataaacgaagcccgtgtgcaagagttgatacaggaaaacgtcgccaagaaccagaacgccccaccggcaacccgaattgagaaaaaatgcgtggttcccgctggaccccctgttgtatccattatggataaggttactactgtgtttaactccgcacagcggctggaggttgtgcgaaactgtatctcttttatttttgaaaataaaatccttgaaaccgagaaaactctcccagctgctctgagggccttgaagggaaaggccgctagacagtgcttaaccgacgagctgggcctccatgtgcagcagaacagagctatactggatcatcagcaattcgattatataattcgtatgatgaactgtacactgcaggattgctcatccctggaggagtataatattgctgctgccctcctgccccttacctcagcattctacagaaagctggcccctggtgtgtctcagtttgcctacacttgcgtgcaagatcaccccatttggacaaatcagcagttttgggagacaacattttacaatgctgtgcaggagcaggtccgatctctatatctgtcggccaaagaggataaccatgcaccacaccttaaacagaaggataagttaccagatgaccattaccaggaaaagacagctatggatctggccgctgagcagctgagactctggcccacccttagtaaatccacccagcaagagttggtgcagcacgaagaatctactgtgttttcccaggctatacattttgccaacctgatggttaacttactggtcccactggatacgtcaaagaacaaacttctcaggacttctgctcccggtgactgggagtcgggctccaactctattgtcaccaactccatcgcaggatctgtggctgaaagctacgacacagaatctggctttgaggacagcgaaaacaccgacattgccaactcagtggtgcggttcatcacccggttcattgataaggtttgtactgaatctggggtgacacaggatcacataaaaagcttgcactgtatgataccaggtattgttgcgatgcacatcgagacactcgaggccgtccatagagaaagccgcaggctgcctcccatacaaaagccaaaaatcctccgacctgccttgctccccggtgaagagatcgtgtgtgaaggtctgcgagtcctgctcgacccagatggccgtgaagaagcgactggcggactcctgggcggtccccagttactgcccgcagaaggtgcgctcttcctcactacataccggatcctgtttagaggaactccccatgaccagctggtcggggagcagactgtggtgcggtccttcccgatcgccagcattaccaaggaaaaaaagattaccatgcagaaccagcttcagcagaacatgcaggagggacttcagatcacaagcgccagcttccagcttattaaggtggcctttgatgaggaggtatcccccgaagtcgtcgaaatattcaagaagcagctcatgaagtttcgttacccgcagtctattttcagcacgttcgctttcgctgctgggcagaccactccccagattatcttgcccaagcaaaaggaaaaaaatacctccttcagaacattctcaaagacaatcgtcaagggagctaagagagctggaaagatgactatcggcagacagtatctcctgaaaaaaaaaaccggaacaatcgttgaggaacgagtcaacagaccaggatggaatgaagacgatgatgtaagtgtatccgacgagagcgaattgcctacctctacaacgctcaaggcttctgagaagtcaactatggagcagttggtcgaaaaggcttgtttccgggactaccagagattggggctagggaccattagtgggagcagttctaggagccgacccgagtatttccggatcaccgcatcaaaccgcatgtacagcctatgccgatcctatccaggactattggtcgttccccaagccgttcaggattcctccctgcccagagtcgctcggtgttacaggcacaatcgcctgcccgtggtatgctggaaaaatagtaggtcaggcaccttgctgttacggagtggcggttttcacgggaagggtgtggtgggactctttaagtcacagaacagcccccaggctgccccaacttcttccctcgaatctagtagttctatagaacaggagaaatacctccaggcgctgctcaacgccgtgtcggtgcatcagaaattgagaggaaactccacactgaccgtgcgtccagccttcgcccttagcccaggcgtgtgggcttccttgcgttctagtaccaggttgatttcgagtcccacttcatttatcgatgttggtgcccgtttggcaggtaaagaccactccgcgtcattttccaattcatcctacctgcagaatcagctcctgaagcggcaggctgcattgtatatcttcggagaaaagtctcagctgcgcaactttaaagtcgagttcgctctgaactgcgagtttgtgcccgtcgagttccatgagatccgtcaggtgaaggcgtcttttaagaagctcatgagggcgtgcattccttccacgatacctacggactccgaggtgacatttctaaaggctctcggggacagcgagtggtttccacagttgcacaggataatgcaacttgccgttgtcgtcagtgaagtattggagaatggcagctccgttctggtgtgtttggaagagggctgggacattaccgcgcaggtgactagcctggtccagctcctttctgacccattttacaggactcttgagggtttccagatgctcgtcgagaaggagtggctctcctttggacacaagttttctcaaaggtcaagcctaaccctaaactgccagggctctgggtttgcccctgtattcctccaatttctggattgtgtgcaccaggtgcacaaccagtaccccacggaattcgagtttaacctgtattaccttaaattcctggcgttccattatgtgagtaatcgatttaaaaccttcctactcgactccgactatgaacgccttgaacatggtacgctcttcgacgataaaggcgagaagcacgctaaaaagggcgtctgcatttgggaatgcatcgatcgaatgcataaaaggtcgcccatatttttcaattatctttattctcctctcgagattgaagctctcaaaccaaatgtaaacgtctcttcgttgaaaaagtgggattattacattgaagaaacgctgagcacaggtccatcctatgattggatgatgctgacacctaagcatttccccagcgaagattctgatctggcaggagaggccggtcctaggtcccagaggaggaccgtttggccatgctatgatgatgtgtcttgtacacagcccgatgctctcacatcgctcttttcagagatagagaaacttgagcataagctgaaccaagctcctgagaagtggcaacaactttgggagagagtaacggtcgacctgaaagaagagcctcgcacagatagatcccagcggcacctttctcgctcccctggcatcgtcagtacgaatctaccatcatatcagaagagatcattattacacttacccgactcgtctatgggggaagaacagaacagcagtattagtccctccaacggggttgagcgacgggctgccacattgtactcccagtacacttctaagaacgatgaaaatcggagtttcgaaggaactctctataaacggggtgccctcttgaaaggctggaagccgcgttggtttgtgctggacgtgacaaaacatcagctgcgctactacgatagcggggaggacacatcctgtaaaggtcacatcgatcttgccgaggtcgaaatggtcatacctgcaggacccagcatgggcgctcctaaacacactagtgacaaggcttttttcgatctcaagacatcgaagcgagtctacaatttctgtgcacaggatggccagtcagcacaacagtggatggacaagattcagagttgcattagcgacgcataa

SEQ ID NO: 220969 - DNA, 7439 bp, Artificial Sequence
  derived and/or modified sequence
ggttgtcaaacatggctgaagcgctgccgctgccgctactgccgctgcagggaaaatgctgagccctcccgggccgggtgggcggcggcggcgagggcggcgacggggacccgcttcccgagcgcggcggcggcggccatggcccggctggctgactacttcatcgtggtaggctatgaccacgagaagccaggatcaggagaaggtctggggaaaataatccagagatttccacagaaggactgggatgatacaccttttccacagggaattgagttgttttgtcagcctggcgggtggcagctgtccagagagaggaagcagccaacgttctttgtggttgtcctgacagacattgactcagatcgacattactgctcatgcctaaccttctatgaggcagagatcaatcttcagggaacaaagaaggaagagattgaaggtgaagcaaaagtgtctggtttaattcagcctgcagaagtgtttgctcccaaaagcctggtgttggtatccagattatattatccagaaatttttagggcttgcctgggtttgatctataccgtgtatgtggacagcctgaatgtctccttggaaagtctaattgcaaacctttgtgcctgccttgtcccagcggctggagggtctcagaagctgttttctttgggtgcaggagatagacagttgatccagactcctttacatgatagtcttcctatcacgggcactagtgtggctctcctgttccagcaattgggaattcaaaatgtcctcagcctcttttgtgcagtcctcacagaaaataaggttctcttccattctgcaagtttccagagacttagtgatgcttgtagagccctggaatctttaatgtttcctcttaaatatagttatccttatatccctattctcccggctcagctactggaagttctaagttccccaacgcctttcattattggagtacattctgtctttaaaactgatgtccatgaacttttagatgtaatcatagcagatttggatggaggcactattaaaattcccgaatgtattcacctctcttccctcccagaaccacttctacatcagactcaatcagctctttctttgattttacacccagatttggaagtagcagatcatgcttttcctcctccacgaacagctttatcccactcaaaaatgctggataaagaggtgcgagccgttttccttagattatttgcacaactcttccaaggatatagatcctgcctgcaacttataagaattcatgcagagccagtaatacatttccacaagacagcattcttggggcagcgtggtttggtcgagaatgatttcctcactaaagtactcagtggaatggcatttgcaggttttgtttcagaaagaggtcctccttatagatcttgtgatctctttgatgagttggtagcctttgaagtagagagaattaaagttgaagaaaataacccagtgaagatgataaagcatgtcagggaacttgctgagcaactattcaaaaatgagaatccaaatcctcatatggcattccagaaagttccacggccaacagaaggatcccatttgcgagttcatattcttcctttcccagagattaatgaagcccgggttcaggaattaatacaggaaaatgttgctaagaaccagaatgcacctcctgccacacgaatagaaaagaaatgtgttgtgccagcaggtccacctgttgtttcgataatggacaaggtgacgacagttttcaacagtgcacaaagactagaagttgtcagaaactgtatctcattcatatttgaaaataaaattttggaaactgaaaagacccttcctgctgcactcagagcccttaaaggaaaggcagcaagacagtgtctcactgatgaattgggtttgcatgtccagcaaaaccgggcaatattagaccatcaacagtttgactacataataaggatgatgaattgtactctacaggattgttcaagtttagaagaatacaacattgccgcagcattactccctttgaccagtgctttctataggaaacttgcccctggagtcagccagtttgcttacacgtgtgtacaagaccaccccatttggacaaatcagcaattttgggagacaaccttttacaatgcagtgcaggaacaggttcgctccctttatctctcagccaaggaagacaatcatgccccgcatctgaagcaaaaggataagcttcctgatgaccattatcaggagaagacagcaatggacctggcagctgagcaactacgcctttggcctaccctgagcaagtcaactcagcaagagctagtgcaacatgaggaaagcactgtctttagtcaggccattcactttgcaaacctcatggtgaacctgctagttccactcgacacaagtaaaaacaagctcctaagaacatcagcgccaggtgactgggagagcggaagcaacagcattgtcacaaacagtattgcaggaagtgtagctgagagctatgatacagagagtgggtttgaagattcagagaatactgacattgccaattctgttgtgcggttcattacccgatttattgacaaagtttgtacagagagtggagttactcaggatcacatcaagagccttcattgcatgataccaggaattgtagctatgcacattgagaccctagaagcagtacatcgagaaagcagaagacttccgcctattcagaagcccaagattcttagacctgctctgctgccaggagaagaaattgtctgtgagggtcttcgagtcttgctggatcctgatggaagagaagaagctactggaggtcttcttggaggccctcagctcctgccagcagaaggagccttgttcctcaccacatacagaattctcttcagaggaacaccccatgatcagttagtgggtgagcagacagttgtgcggagctttcccattgcctccatcaccaaggagaagaagattacaatgcagaaccagctacagcagaacatgcaagaaggactgcagatcacatcagcatcttttcagttgattaaggtagcatttgatgaagaagtcagtccagaagtagtagagatctttaagaaacagctgatgaagttccgttatcctcagtccattttcagtacctttgcttttgctgctggacaaactaccccacaaataattttaccaaaacagaaggaaaagaacacttcttttcgtaccttctcaaaaacaattgtgaaaggtgccaaaagggcagggaaaatgacaattgggcggcaatatttactgaagaagaagacagggacaattgtggaagaaagagtaaatcgtcctggatggaatgaagatgatgatgtatctgtttcagatgagagtgagctccccacaagtaccaccctgaaggcctccgagaagtctacaatggaacagttggtggaaaaagcttgtttcagagactatcagcgtttaggtttaggaaccataagtggcagctcttcccgttcaagacccgagtattttagaattactgcctccaacaggatgtattcactctgccggagctatcctggccttttagtcgtacctcaagctgtacaggacagtagtttaccaagagtagctcgctgctatcgacacaatcgcctgcctgttgtatgttggaagaactcaagaagtggtactctgctcctccgatctggaggattccatgggaagggagtcgttggtcttttcaaatctcagaactcccctcaggccgctcctacctcctctttagaatcttccagtagcatagaacaagagaaatacttgcaagccttactgaatgctgtttctgtccatcagaaactcagaggcaacagcactcttactgtcaggccagcctttgctctatctccaggtgtgtgggcaagtcttcgctctagcactcgcttgatcagctctccaacatccttcattgatgttggcgcccggctggcaggcaaggatcactcggcctccttcagtaacagcagctacctacaaaaccagctcttgaaacggcaagcagccctttacatatttggtgaaaagtcgcaactaaggaacttcaaggtagaatttgctttaaattgtgagtttgttcctgttgaatttcatgaaatccggcaagtgaaagccagttttaagaagctgatgagggcttgtatcccaagcaccatccctactgactcagaagtgaccttcctgaaagcgctgggagattctgagtggttcccacagcttcacaggataatgcagctggctgtggttgtatcagaagtacttgagaatggttcctcagttttggtctgtttggaggaaggctgggacatcactgcacaagtgacatccctggttcagttactcagtgatcccttttataggacacttgaaggcttccagatgttggttgaaaaagagtggctctcttttggtcacaaattcagtcagaggagcagcttgaccctcaactgtcaggggagtggttttgctccagtcttcttacagttcttagactgtgtacaccaggttcacaaccagtatccaactgagtttgaattcaatctctattacttaaagttcttggctttccactatgtgtctaatcgctttaaaacatttctcctggattcagactatgaaagattagagcacggaactttatttgatgataaaggagaaaagcatgccaaaaaaggagtctgtatttgggaatgtattgacagaatgcacaagaggagtcccattttctttaattatttatattcaccattggaaatagaggctctaaagcccaatgtaaacgtctctagcctcaagaagtgggattactacatagaagagaccctgtccacaggcccttcctatgactggatgatgctaacccccaagcacttcccctccgaagactctgacctggctggagaagctgggccacggagccagaggagaacagtgtggccatgctatgatgatgtcagctgtactcagcctgatgctctcaccagccttttcagtgaaattgaaaaattggagcacaaattgaaccaagcccctgagaagtggcagcagctgtgggaaagggtaaccgtggaccttaaagaagaaccaagaacagatcgctcccaaagacacctgtcgagatccccaggaattgtgtctaccaacctaccttcctatcagaagaggtctctgctacatctcccagacagcagcatgggggaggaacagaattccagcatctccccatccaatggagtggagcgaagagcagccacgctctatagccagtatacatccaagaatgatgaaaacaggtcctttgagggaacactttataaaagaggggctttgctgaaaggttggaagccccgttggtttgttttggatgtaacaaaacatcagctgcgctactatgactcaggtgaggacacaagctgtaaaggccacattgatctggctgaagtagaaatggtcatccctgctggccccagcatgggagccccaaagcacacaagtgacaaggctttctttgatctcaagaccagcaaacgtgtgtataacttctgcgcccaggatggacagagtgcccagcaatggatggacaagatccagagttgtatctctgatgcctgatgcccatggtcaacccacgcagaagaaacagaagaactcatgctgccagatagatagaaaaagaagcatggatccttgaggagctgacaacaagttatcccagggcctgaggttctcctgcccagtcccctcttgcaggggttgctatatctacttaacctgaataggtgtttcacacaggtctggtcaacagccccatgcactccctgtatcttgcactaaatttttctaacagggtcttagtggttaatgatcagaagatgtctcctgagccaactgtgaacctcacccaggcaaaatggctaccacctacttgggtccttcttcatgaaagctatagatccttttttgttctctgaggtcataatttcctcggagacctgtttaacaagcaaaaatcaaaaccctccaagattgtctcatattctacctggactaggtttcctatgagagacatctacttgtaatgcctgacctttgagatgctcagttctctggtgctgccaaaagatgcttccatggtccgtgctctgccagtggggttcacaacaagagacgtcattgttcagtagcaggcaaagagggagcacacagcattattctgatggaaaaagattatccagggaatggtacaacaatgaccagcccaatgcaggaaaacactacttccaaaacactgaattctctagaccagaggtgctctgaggatccagggccttgtgttcttatgtatcttctgcttcctgacagcttctttttcaaaataacatgcaaaaaaagctgaatgcactaactcacaaaacaaacacttgcactgaattcccaatgaagtgaagatgttggaaagacagaggccagctatttaggaccatacgcacctgtgacaagggctgtgttgaccacagtcacactgtggcatgactggatacccaaactacacttctacacatgaaaagtaagaactgtctttagattttctttactttgataacttgtgattgtttagcttaagacccaagaaatgctgtttgctcatggtaaacagaaacagcatcttcgctacaaccactgacaccagctggcgtcataggtagctagatcattgcatttgttttgaaatgttaatatgttaaatactaaactaatatttcaaaaatgtgtatatatgatttctatatccttgtttttcagatagcctgcttataatttaatataaattaactgatgcattcataagatttcaataatgaaatggttcccttttaaaaaataaaaatactttgtagattaaaaataaatcagaatttcaaatttaaaattgtccacacactaggaaatagaactgtgttaatatataagaaatctggggataattaagaatgaaggacttttctatcatttccattttataaattgccacctgtgaaaatggtttttgcacattatttgtatttttctttgtatatgaaataattttttgtactttgtaaaatatggagcccattgtaccttcagctatttgagactatacacagtgcttcttttgtaactggattactttaactttcgtgaaggcattacattgcctcacattcactaaccaccttgaattaaatttatttcttaagaaaaagcatccctcatttactgtgaactaaagttcattctgtagtgcacagcattcaggagggtaacactcaggattcatacatgggactaaaggttcaagaataaaacaaagcatgacccac

SEQ ID NO: 220970 - DNA, 5550 bp, Artificial Sequence
  derived and/or modified sequence
atggccagactggccgactacttcatcgtggtgggctacgaccacgagaagcccggcagcggcgagggcctgggcaagatcatccagagattcccccagaaggactgggacgacacccccttcccccagggcatcgagctgttctgccagcccggcggctggcagctgagcagagagagaaagcagcccaccttcttcgtggtggtgctgaccgacatcgacagcgacagacactactgcagctgcctgaccttctacgaggccgagatcaacctgcagggcaccaagaaggaggagatcgagggcgaggccaaggtgagcggcctgatccagcccgccgaggtgttcgcccccaagagcctggtgctggtgagcagactgtactaccccgagatcttcagagcctgcctgggcctgatctacaccgtgtacgtggacagcctgaacgtgagcctggagagcctgatcgccaacctgtgcgcctgcctggtgcccgccgccggcggcagccagaagctgttcagcctgggcgccggcgacagacagctgatccagacccccctgcacgacagcctgcccatcaccggcaccagcgtggccctgctgttccagcagctgggcatccagaacgtgctgagcctgttctgcgccgtgctgaccgagaacaaggtgctgttccacagcgccagcttccagagactgagcgacgcctgcagagccctggagagcctgatgttccccctgaagtacagctacccctacatccccatcctgcccgcccagctgctggaggtgctgagcagccccacccccttcatcatcggcgtgcacagcgtgttcaagaccgacgtgcacgagctgctggacgtgatcatcgccgacctggacggcggcaccatcaagatccccgagtgcatccacctgagcagcctgcccgagcccctgctgcaccagacccagagcgccctgagcctgatcctgcaccccgacctggaggtggccgaccacgccttccccccccccagaaccgccctgagccacagcaagatgctggacaaggaggtgagagccgtgttcctgagactgttcgcccagctgttccagggctacagaagctgcctgcagctgatcagaatccacgccgagcccgtgatccacttccacaagaccgccttcctgggccagagaggcctggtggagaacgacttcctgaccaaggtgctgagcggcatggccttcgccggcttcgtgagcgagagaggccccccctacagaagctgcgacctgttcgacgagctggtggccttcgaggtggagagaatcaaggtggaggagaacaaccccgtgaagatgatcaagcacgtgagagagctggccgagcagctgttcaagaacgagaaccccaacccccacatggccttccagaaggtgcccagacccaccgagggcagccacctgagagtgcacatcctgcccttccccgagatcaacgaggccagagtgcaggagctgatccaggagaacgtggccaagaaccagaacgccccccccgccaccagaatcgagaagaagtgcgtggtgcccgccggcccccccgtggtgagcatcatggacaaggtgaccaccgtgttcaacagcgcccagagactggaggtggtgagaaactgcatcagcttcatcttcgagaacaagatcctggagaccgagaagaccctgcccgccgccctgagagccctgaagggcaaggccgccagacagtgcctgaccgacgagctgggcctgcacgtgcagcagaacagagccatcctggaccaccagcagttcgactacatcatcagaatgatgaactgcaccctgcaggactgcagcagcctggaggagtacaacatcgccgccgccctgctgcccctgaccagcgccttctacagaaagctggcccccggcgtgagccagttcgcctacacctgcgtgcaggaccaccccatctggaccaaccagcagttctgggagaccaccttctacaacgccgtgcaggagcaggtgagaagcctgtacctgagcgccaaggaggacaaccacgccccccacctgaagcagaaggacaagctgcccgacgaccactaccaggagaagaccgccatggacctggccgccgagcagctgagactgtggcccaccctgagcaagagcacccagcaggagctggtgcagcacgaggagagcaccgtgttcagccaggccatccacttcgccaacctgatggtgaacctgctggtgcccctggacaccagcaagaacaagctgctgagaaccagcgcccccggcgactgggagagcggcagcaacagcatcgtgaccaacagcatcgccggcagcgtggccgagagctacgacaccgagagcggcttcgaggacagcgagaacaccgacatcgccaacagcgtggtgagattcatcaccagattcatcgacaaggtgtgcaccgagagcggcgtgacccaggaccacatcaagagcctgcactgcatgatccccggcatcgtggccatgcacatcgagaccctggaggccgtgcacagagagagcagaagactgccccccatccagaagcccaagatcctgagacccgccctgctgcccggcgaggagatcgtgtgcgagggcctgagagtgctgctggaccccgacggcagagaggaggccaccggcggcctgctgggcggcccccagctgctgcccgccgagggcgccctgttcctgaccacctacagaatcctgttcagaggcaccccccacgaccagctggtgggcgagcagaccgtggtgagaagcttccccatcgccagcatcaccaaggagaagaagatcaccatgcagaaccagctgcagcagaacatgcaggagggcctgcagatcaccagcgccagcttccagctgatcaaggtggccttcgacgaggaggtgagccccgaggtggtggagatcttcaagaagcagctgatgaagttcagatacccccagagcatcttcagcaccttcgccttcgccgccggccagaccaccccccagatcatcctgcccaagcagaaggagaagaacaccagcttcagaaccttcagcaagaccatcgtgaagggcgccaagagagccggcaagatgaccatcggcagacagtacctgctgaagaagaagaccggcaccatcgtggaggagagagtgaacagacccggctggaacgaggacgacgacgtgagcgtgagcgacgagagcgagctgcccaccagcaccaccctgaaggccagcgagaagagcaccatggagcagctggtggagaaggcctgcttcagagactaccagagactgggcctgggcaccatcagcggcagcagcagcagaagcagacccgagtacttcagaatcaccgccagcaacagaatgtacagcctgtgcagaagctaccccggcctgctggtggtgccccaggccgtgcaggacagcagcctgcccagagtggccagatgctacagacacaacagactgcccgtggtgtgctggaagaacagcagaagcggcaccctgctgctgagaagcggcggcttccacggcaagggcgtggtgggcctgttcaagagccagaacagcccccaggccgcccccaccagcagcctggagagcagcagcagcatcgagcaggagaagtacctgcaggccctgctgaacgccgtgagcgtgcaccagaagctgagaggcaacagcaccctgaccgtgagacccgccttcgccctgagccccggcgtgtgggccagcctgagaagcagcaccagactgatcagcagccccaccagcttcatcgacgtgggcgccagactggccggcaaggaccacagcgccagcttcagcaacagcagctacctgcagaaccagctgctgaagagacaggccgccctgtacatcttcggcgagaagagccagctgagaaacttcaaggtggagttcgccctgaactgcgagttcgtgcccgtggagttccacgagatcagacaggtgaaggccagcttcaagaagctgatgagagcctgcatccccagcaccatccccaccgacagcgaggtgaccttcctgaaggccctgggcgacagcgagtggttcccccagctgcacagaatcatgcagctggccgtggtggtgagcgaggtgctggagaacggcagcagcgtgctggtgtgcctggaggagggctgggacatcaccgcccaggtgaccagcctggtgcagctgctgagcgaccccttctacagaaccctggagggcttccagatgctggtggagaaggagtggctgagcttcggccacaagttcagccagagaagcagcctgaccctgaactgccagggcagcggcttcgcccccgtgttcctgcagttcctggactgcgtgcaccaggtgcacaaccagtaccccaccgagttcgagttcaacctgtactacctgaagttcctggccttccactacgtgagcaacagattcaagaccttcctgctggacagcgactacgagagactggagcacggcaccctgttcgacgacaagggcgagaagcacgccaagaagggcgtgtgcatctgggagtgcatcgacagaatgcacaagagaagccccatcttcttcaactacctgtacagccccctggagatcgaggccctgaagcccaacgtgaacgtgagcagcctgaagaagtgggactactacatcgaggagaccctgagcaccggccccagctacgactggatgatgctgacccccaagcacttccccagcgaggacagcgacctggccggcgaggccggccccagaagccagagaagaaccgtgtggccctgctacgacgacgtgagctgcacccagcccgacgccctgaccagcctgttcagcgagatcgagaagctggagcacaagctgaaccaggcccccgagaagtggcagcagctgtgggagagagtgaccgtggacctgaaggaggagcccagaaccgacagaagccagagacacctgagcagaagccccggcatcgtgagcaccaacctgcccagctaccagaagagaagcctgctgcacctgcccgacagcagcatgggcgaggagcagaacagcagcatcagccccagcaacggcgtggagagaagagccgccaccctgtacagccagtacaccagcaagaacgacgagaacagaagcttcgagggcaccctgtacaagagaggcgccctgctgaagggctggaagcccagatggttcgtgctggacgtgaccaagcaccagctgagatactacgacagcggcgaggacaccagctgcaagggccacatcgacctggccgaggtggagatggtgatccccgccggccccagcatgggcgcccccaagcacaccagcgacaaggccttcttcgacctgaagaccagcaagagagtgtacaacttctgcgcccaggacggccagagcgcccagcagtggatggacaagatccagagctgcatcagcgacgcctag

SEQ ID NO: 220971 - protein, 322 aa, Artificial Sequence
  derived and/or modified sequence
MLSPLPTGPLEACFSVQSRTSSPMEPPIPQSAPLTPNSVMVQPLLDSRMSHSRLQHPLTILPIDQVKTSHVENDYIDNPSLALTTGPKRTRGGAPELAPTPARCDQDVTHHWISFSGRPSSVSSSSSTSSDQRLLDHMAPPPVADQASPRAVRIQPKVVHCQPLDLKGPAVPPELDKHFLLCEACGKCKCKECASPRTLPSCWVCNQECLCSAQTLVNYGTCMCLVQGIFYHCTNEDDEGSCADHPCSCSRSNCCARWSFMGALSVVLPCLLCYLPATGCVKLAQRGYDRLRRPGCRCKHTNSVICKAASGDAKTSRPDKPF

SEQ ID NO: 220972 - protein, 299 aa, Artificial Sequence
  derived and/or modified sequence
MEPPIPQSAPLTPNSVMVQPLLDSRMSHSRLQHPLTILPIDQVKTSHVENDYIDNPSLALTTGPKRTRGGAPELAPTPARCDQDVTHHWISFSGRPSSVSSSSSTSSDQRLLDHMAPPPVADQASPRAVRIQPKVVHCQPLDLKGPAVPPELDKHFLLCEACGKCKCKECASPRTLPSCWVCNQECLCSAQTLVNYGTCMCLVQGIFYHCTNEDDEGSCADHPCSCSRSNCCARWSFMGALSVVLPCLLCYLPATGCVKLAQRGYDRLRRPGCRCKHTNSVICKAASGDAKTSRPDKPF

SEQ ID NO: 220973 - DNA, 969 bp, Artificial Sequence
  derived and/or modified sequence
atgctgagccccctgcccaccggccccctggaggcctgcttcagcgtgcagagcagaaccagcagccccatggagccccccatcccccagagcgcccccctgacccccaacagcgtgatggtgcagcccctgctggacagcagaatgagccacagcagactgcagcaccccctgaccatcctgcccatcgaccaggtgaagaccagccacgtggagaacgactacatcgacaaccccagcctggccctgaccaccggccccaagagaaccagaggcggcgcccccgagctggcccccacccccgccagatgcgaccaggacgtgacccaccactggatcagcttcagcggcagacccagcagcgtgagcagcagcagcagcaccagcagcgaccagagactgctggaccacatggcccccccccccgtggccgaccaggccagccccagagccgtgagaatccagcccaaggtggtgcactgccagcccctggacctgaagggccccgccgtgccccccgagctggacaagcacttcctgctgtgcgaggcctgcggcaagtgcaagtgcaaggagtgcgccagccccagaaccctgcccagctgctgggtgtgcaaccaggagtgcctgtgcagcgcccagaccctggtgaactacggcacctgcatgtgcctggtgcagggcatcttctaccactgcaccaacgaggacgacgagggcagctgcgccgaccacccctgcagctgcagcagaagcaactgctgcgccagatggagcttcatgggcgccctgagcgtggtgctgccctgcctgctgtgctacctgcccgccaccggctgcgtgaagctggcccagagaggctacgacagactgagaagacccggctgcagatgcaagcacaccaacagcgtgatctgcaaggccgccagcggcgacgccaagaccagcagacccgacaagcccttctag

SEQ ID NO: 220974 - DNA, 969 bp, Artificial Sequence
  derived and/or modified sequence
atgctcagtcccctgcctaccggcccgctcgaggcgtgtttcagtgtacaatcgcggacatcctctcctatggaacccccaattcctcaatcagctcctctgacaccaaactcagtcatggtgcagccgctcctcgatagcagaatgtcacattctcgtctacagcatccgctaaccattctgcctatcgaccaggtcaaaactagccacgtggagaatgactatatcgacaacccctccctagcgttgaccaccgggcctaagcgaacacggggcggtgcacccgagctggcccccacacccgcaagatgtgatcaagatgttacacatcactggatctccttctctggcaggccatcctctgtgtccagcagttcaagcacatcgtctgaccaaagactgctcgatcatatggccccaccacccgtggctgaccaggcgagtcccagagcggtgcgcatccagccgaaagtcgttcactgccaacctttagaccttaaggggcccgcagtgcctcctgaactagataaacacttcctcttgtgcgaggcctgtggcaagtgcaagtgcaaggaatgtgctagccctagaacgttgccatcttgttgggtctgcaatcaggagtgcctttgttcagcccagaccctggtcaactacgggacctgcatgtgtctggtccaaggaatattctatcactgcaccaatgaggatgacgaaggttcttgtgccgaccatccttgcagctgcagtaggtctaattgctgcgccaggtggagtttcatgggcgctctgtcagtggtgctgccctgtttattatgttacctcccagcaaccgggtgtgtaaagctggcccagcggggttacgataggctgcgaaggccaggatgtagatgcaaacacacaaacagtgtcatctgtaaagcagccagcggggacgcaaaaacgtccagacccgataagccattctag

SEQ ID NO: 220975 - DNA, 969 bp, Artificial Sequence
  derived and/or modified sequence
atgctgagccccctgcccaccggccccctggaggcctgcttctctgtgcagagcaggaccagcagccccatggagccccccatcccccagagcgcccccctgacccccaacagcgtgatggtgcagcccctgctggacagcaggatgagccacagccggctgcagcaccccctgaccatcctgcccatcgaccaggtgaagaccagccacgtggagaatgactacatcgacaaccccagcctggccctgaccaccggccccaagaggacccggggcggggcccctgagctggcccccaccccagcccgctgtgaccaggatgtgacccaccactggatctccttcagcggccggcccagctctgtgagcagcagcagcagcaccagcagtgaccagaggctgctggaccacatggcccctcctcctgtggccgaccaggccagccccagggctgtgcgcatccagcccaaggtggtgcactgccagcccctggacctgaagggccctgctgtgcccccagagctggacaagcacttcctgctgtgtgaggcctgtgggaagtgcaagtgcaaggaatgtgccagccccaggaccctgcccagctgctgggtgtgcaaccaggagtgcctgtgcagcgcccagaccctggtgaactacggcacctgcatgtgcctggtgcagggcatcttctaccactgcaccaatgaagatgatgagggcagctgtgccgaccacccctgcagctgcagccgcagcaactgctgtgcccgctggagcttcatgggcgccctgtctgtggtgctgccctgcctgctgtgctacctgcctgccaccggctgtgtgaagctggcccagaggggctatgaccggctgcggcggcccggctgccgctgcaagcacaccaacagcgtcatctgcaaggccgccagcggagatgccaagaccagcaggccagacaagcccttctag

SEQ ID NO: 220976 - DNA, 969 bp, Artificial Sequence
  derived and/or modified sequence
atgctgagccccctgcccaccggccccctggaggcctgcttcagcgtccagagtaggaccagctcaccgatggagcctccgattccccagagcgccccgctcaccccaaacagcgtcatggttcagcccctgcttgacagcaggatgtctcactccaggttgcaacaccctttgaccatcttgccaatagatcaggtgaagacctcacacgtagaaaacgactacattgataatccgtccctggccttgacgaccggtcctaaacgcactcgcgggggggctcctgagctagctcctactccagccagatgcgaccaggacgtgacccaccactggatttcttttagcgggcgcccttcctctgtaagcagttcctcctctacgtcttctgaccagagactcttggaccatatggcccctccgccagtcgcggaccaggcttctccccgggcggtgagaattcagccaaaggtggtgcattgtcagccacttgatctgaaaggccccgctgtgccgccagaactcgataaacatttcctactgtgcgaagcgtgcggaaagtgtaaatgcaaagagtgcgcttcacctcgcactttaccctcctgctgggtgtgtaatcaggagtgcctttgctctgcgcagaccctggttaactacggcacctgtatgtgcctggtccaggggatcttctatcattgcactaacgaagacgacgagggctcctgcgctgaccacccgtgctcttgcagtaggagcaactgttgtgctcggtggtcattcatgggagccctctcggtggttctgccttgcttgctgtgctaccttcctgcaactggctgcgtgaagctggcacagcgcggctatgaccgcctgaggcgaccagggtgtagatgcaagcatactaattcggtgatatgtaaagctgcctctggagatgcgaaaacgtctaggcccgataaaccattttag

SEQ ID NO: 220977 - DNA, 969 bp, Artificial Sequence
  derived and/or modified sequence
atgttgtcccccttaccaaccgggccacttgaggcctgcttctccgttcagagtcggacttcttctcctatggagccgcctatcccgcagagtgcacctctgaccccaaattcagtaatggtgcagcctcttctcgatagccgcatgtcacatagcagactccagcaccccctcacaattcttccgatcgaccaggtgaagactagtcatgtggaaaatgattatatcgacaacccatccctcgccctgactacaggcccaaaacgaacgcgtggcggagcacctgaattagcccctacccctgccaggtgtgaccaagatgtgacgcatcattggatctccttcagtggaagaccatcaagcgtttcctcttcgtctagcaccagctctgatcagagactgcttgatcacatggccccacccccagtggcagaccaggccagtcctagggcagtgcgaatccagcctaaagtggttcactgtcagccccttgatctgaagggaccagccgtgccacctgaactcgataaacattttctcctatgtgaggcctgtggaaaatgcaagtgcaaagaatgtgcttcacctcgcactctaccgtcgtgctgggtttgtaatcaggagtgcttgtgcagtgctcaaactcttgttaactacggtacctgcatgtgtcttgttcaggggatcttctaccactgcacaaacgaagatgatgaggggagctgcgccgatcatccttgctcttgctcacgaagcaattgttgtgcgaggtggtcatttatgggagccctgtcagtggtgcttccgtgcctgctgtgctacttaccagcaactggctgcgtgaaattggcacagcggggttacgaccgtctgagaagacctggctgccggtgcaaacatactaactctgtcatatgcaaggccgctagcggggacgccaagacatctcgcccagacaagccattctag

SEQ ID NO: 220978 - DNA, 4938 bp, Artificial Sequence
  derived and/or modified sequence
gcgagctgagctgacagcgcggagctggcgctgtggagcgcagggagccttgccggttcctccgaccggcgtctgcgagtacagcggcggctaacctgccccggcttcaggatttacacagacgtggggcgatgcttgtgaccctgcagctcctcaaaccagcctgtattgagcggtttgcagcctgatgctcagccccctccccacagggcccctagaagcctgtttctccgtacagtccaggacctccagccccatggagcccccgatcccacagagcgcccccttgactcccaactcagtcatggtccagccccttcttgacagccggatgtcccacagccggctccagcacccactcaccatcctacccattgaccaggtgaagaccagccatgtggagaatgactacatagacaaccctagcctggccctgaccaccggcccaaagcggacccggggcggggccccagagctggccccgacgcccgcccgctgtgaccaggatgtcacccaccattggatctccttcagcgggcgccccagctctgtgagcagcagcagcagcacatcctctgaccaacggctcttagaccacatggcaccaccacccgtggctgaccaggcctcaccaagggctgtgcgcatccagcccaaggtggtccactgccagccgctggacctcaagggcccggcggtcccacccgagctggacaagcacttcttgctgtgcgaggcctgtgggaagtgtaaatgcaaggagtgtgcatccccccggacgttgccttcctgctgggtctgcaaccaggagtgcctgtgctcagcccagactctggtcaactatggcacgtgcatgtgtttggtgcagggcatcttctaccactgcacgaatgaggacgatgagggctcctgcgctgaccacccctgctcctgctcccgctccaactgctgcgcccgctggtccttcatgggtgctctctccgtggtgctgccctgcctgctctgctacctgcctgccaccggctgcgtgaagctggcccagcgtggctacgaccgtctgcgccgccctggttgccgctgcaagcacacgaacagcgtcatctgcaaagcagccagcggggatgccaagaccagcaggcccgacaagcctttctgacagtttgtgtcgaagccccagtgctctgcctggaaacctggttctcttctgacatctaagaagactgcagcaaggtcagaggttttagcctcctgaggctgaccttgctagtctgcccactccctacccccagcttcggaaaatacagagaccaccaccacgtaccctgtattccccaaggtgatgaagaagcactttggggctttttttcagggtcctgaaactttgtgtcaaacagacaatgcaggggcagggtgtggtttggggggaaatttttctttttcagaagacagaacacagatgtggacacatatccggaaactgcagctgcttgaatgccttcccagcccctccttctccctccctccctccgcccccccccccttcctcttttccattgtctttggctctcacaggagctagctgcctgggaggaattgttaactgagtaccagggtacctttaaagaagacccttggagtcttctataccttcttctccttccccatctcactccaccccactttgtccctgatgtcttggggaaggtgtagaacaccctagcagttcctattgtatatacttgggagccactgagaacagaggacggccagtgagtccaagcctcgttcctccttctgcctccccggagccacaggatggatttaggagccactgctcagtgcacttctcccttccaactgcatcaactaactctcgggggtgttctgctcaccacaccgtccttcggttcttactgagtcacagactcgcctgcccactacgtgtcctgggttctctctactcagatcccttccagaaactttatatgggtagaggaagccagggcggcaaatgcgagaccaaatatcattttgccaatgagtctgaggctgtggtctctggatccagtcattatgtttttatagaataattaaaccggatgctaacggtgttttaaaaaataataataaaacaacttgtttccttttggccacccccaggaagggctgatttcaaaatctgggggcgagcaacctcaaggaacacaatttccctccctatcaacaagaggattttaacagcaaagaagagaggcagcacctcccattggcagaatgaccgctgagccaggctgggtttgggtttcttctcttctgattctgctgctcactgtcatagccttttgtgtatagtgatgtgtctgtatctttaatgtaaatagagagatgatgaaaaaagagtctattttagtgttaggaagccccagcaggggagtcggaagagcttggaagagctggggagagggtaggggaaaggtttttccaggggccactgggtttgagccctgcttctgtgcacagccacaccaccctctcccgacagccctcaaagacgtagcaactctttctctcaaggtgctaaaggactcagaaggtgcagcacgtccagtgggtaggtacttgttgcatgcaaaagctgtagtgtatctggtccttcctccccagcttttgtgtggggttcttgctttgtgtggtattttgttttcccctctaatgagagggcatggcctgagtcagaagagctaccccaggtgaaactggaagtgcatgaggcagagcgtccgtagcatttccagtttgttctgtataggaacagaggtgcctccgggaaggaggcagcgaggtaggtagctatgataggcacctaatgcttctcaaggacttattttttccttcttgaagactagtagtaacatcttatgatttagagtaagttgattgtaaccataggtatttattgattggaggaagggagggtcatattattttcggctttatttatgtaacatttgctagcttgtaaaaggcgaatgtgaaatattgcatctgcattttccaaggctgattcgtgtagctacccttgccacagttgtgacggatgtatggatgttcttgaacatttcagaaggagtggtagaaaaaaacacacattcagccaaccacttatatgaattgaatgtatcagaagtgtactgaagggactggagatggttttcctcagatgagggggccccaaaattgatagtgcacatctgcacgctttctgcgaggcctcagaacttcccagggcccctccctcaaattgtctccatgggaaacttgacccagtggcaagttgcactttggtgatcttggtggtctacacacccgttctgtggagagtcgatttacataagctgtgtatacacacacacacacacacacacacacccctaccccacactgactgtctaccgacaaagaccctatttcctggcaaacggcctcctgaaccctgactttttgtgtacatacttgtaaacacggatttttctgggttttggtttgctttttccttttttccccctgcccctgttctagcttgttcttcttggtttgctttcaacctgcttgatggatgtctgcagagtgctctctaagagtccacctcagtgcctcgtgtgctcagtggtcatgggaaaggagcgaaggaaccatccttggttctcccagcttggttgtgtagcaatccctcagcattgtttttctcagcttcttggcaaaaattaaaacaacaacaacaacaacaacaacaacaacaaacagaaggataaactggcttgcctgtggaccctccccggctctggggccagtcgagagccactgagggacccagcactcagagacacaacacacatgtgtagctgcttctggctgagtgtgtttcctgtcaccaatggcctgtttggctggacgatgcctcggcttgaccttttttgaaaagtgctggttagttcccgcccctggtaaacctggggtaggtgggggttctgtcttaactcgaggggcacctgggatccaggacgcttctagggggctctggctgcccgtgttaatgaaggacagcgcttccgcgagcaccctgggaactgggtcttgggtagcaaagccctcccagagaaaagattgggcacaactaaggctttcctgagcaggaagggggtgaagaccaatcccttcctttggtcctttggtacgcaccccctcagagctgagatggaagacatggctagttcttttcagccttgtggagcctgtcagtcgccatcatacctcgagtgaggcccagctagataatgacttgtccaagatggcacacgtggaaagttgatctgcaccagaacccggatgactgtcaccttgaagcatcctgttctccttctgtgctgtcccaggaagtgtctggcgggcgtgggcagcacagctctacactgtacgattcactagggcatcctgcgagcctcactagccttctggttcatgcctttgacaagcatttttgtgccccctctgcttactgtgacagtcgatgatgaatcttgcgttgccattttctgctgtgggtaactgcgtgcagtgtcttgccttgctttctcttcttactgtcccacagcttggtttcatgttacaaacagaaaagctcgaggctcccaccccgccacatcccaacttcatttccccctcactgtagcccatttccaccccaccacaaagttgccacaggttttctttgtatagaatatttattttgaagctctattttaatagtatttattttagaaagtctactattgtaagagttcttctgtttgtgaagaaaaaaacaagttaaaaactgaatgtactgatttagaaaatatatataaatatatattgttaaatatacacgggactgccgtt

SEQ ID NO: 220979 - DNA, 2379 bp, Artificial Sequence
  derived and/or modified sequence
attttcccaggcagtggttgcaacatcgccgcggaggtagcgagctgagctgacagcgcggagctggcgctgtggagcgcagggagccttgccggttcctccgaccggcgtctgcgagtacagcggcggctaacctgccccggcttcaggatttacacagacgtggggcgatgcttgtgaccctgcagctcctcaaaggcccctagaagcctgtttctccgtacagtccaggacctccagccccatggagcccccgatcccacagagcgcccccttgactcccaactcagtcatggtccagccccttcttgacagccggatgtcccacagccggctccagcacccactcaccatcctacccattgaccaggtgaagaccagccatgtggagaatgactacatagacaaccctagcctggccctgaccaccggcccaaagcggacccggggcggggccccagagctggccccgacgcccgcccgctgtgaccaggatgtcacccaccattggatctccttcagcgggcgccccagctctgtgagcagcagcagcagcacatcctctgaccaacggctcttagaccacatggcaccaccacccgtggctgaccaggcctcaccaagggctgtgcgcatccagcccaaggtggtccactgccagccgctggacctcaagggcccggcggtcccacccgagctggacaagcacttcttgctgtgcgaggcctgtgggaagtgtaaatgcaaggagtgtgcatccccccggacgttgccttcctgctgggtctgcaaccaggagtgcctgtgctcagcccagactctggtcaactatggcacgtgcatgtgtttggtgcagggcatcttctaccactgcacgaatgaggacgatgagggctcctgcgctgaccacccctgctcctgctcccgctccaactgctgcgcccgctggtccttcatgggtgctctctccgtggtgctgccctgcctgctctgctacctgcctgccaccggctgcgtgaagctggcccagcgtggctacgaccgtctgcgccgccctggttgccgctgcaagcacacgaacagcgtcatctgcaaagcagccagcggggatgccaagaccagcaggcccgacaagcctttctgacagtttgtgtcgaagccccagtgctctgcctggaaacctggttctcttctgacatctaagaagactgcagcaaggtcagaggttttagcctcctgaggctgaccttgctagtctgcccactccctacccccagcttcggaaaatacagagaccaccaccacgtaccctgtattccccaaggtgatgaagaagcactttggggctttttttcagggtcctgaaactttgtgtcaaacagacaatgcaggggcagggtgtggtttggggggaaatttttctttttcagaagacagaacacagatgtggacacatatccggaaactgcagctgcttgaatgccttcccagcccctccttctccctccctccctccgcccccccccccttcctcttttccattgtctttggctctcacaggagctagctgcctgggaggaattgttaactgagtaccagggtacctttaaagaagacccttggagtcttctataccttcttctccttccccatctcactccaccccactttgtccctgatgtcttggggaaggtgtagaacaccctagcagttcctattgtatatacttgggagccactgagaacagaggacggccagtgagtccaagcctcgttcctccttctgcctccccggagccacaggatggatttaggagccactgctcagtgcacttctcccttccaactgcatcaactaactctcgggggtgttctgctcaccacaccgtccttcggttcttactgagtcacagactcgcctgcccactacgtgtcctgggttctctctactcagatcccttccagaaactttatatgggtagaggaagccagggcggcaaatgcgagaccaaatatcattttgccaatgagtctgaggctgtggtctctggatccagtcattatgtttttatagaataattaaaccggatgctaacggtgttttaaaaaataataataaaacaacttgtttccttttggccacccccaggaagggctgatttcaaaatctgggggcgagcaacctcaaggaacacaatttccctccctatcaacaagaggattttaacagcaaagaagagaggcagcacctcccattggcagaatgaccgctgagccaggctgggtttgggtttcttctcttctgattctgctgctcactgtcatagccttttgtgtatagtgatgtgtctgtatctttaatgtaaatagagagatgatg

SEQ ID NO: 220980 - DNA, 553 bp, Artificial Sequence
  derived and/or modified sequence
ttttatgctatgcaactgccttgcagttgactttttcttgcctggcctctgtaaggcctgaggctcctcggccaccctgtacctccctatcctcgggcaccgagctgtgccaggccccggagcccccaggccgcgctagggctgcggtgggggttgaaggtgcgtttacataacaccaggcgtgtgggagctggaggaagaggttgcgaatgtaggagagataaggctcctgctttccctccttccttcttggtggtaccaggcttgacatcacagagaagaggatagagacgccagcctgtattgagcggtttgcagcctgatgctcagccccctccccacaggtacaaatgcaggcccctagaagcctgtttctccgtacagtccaggacctccagccccatggagcccccgatcccacagagcgcccccttgactcccaactcagtcatggtccagccccttcttgacagccggatgtcccacagccggctccagcacccactcaccatcctacccattgaccaggtgaagaccagccatgtggagaatg

SEQ ID NO: 220981 - DNA, 846 bp, Artificial Sequence
  derived and/or modified sequence
atgggtagccgcggacagggcctgttacttgcttattgtttgctgctggcattcgcctccggtctggtgctgagtcgcgtgccccatgtgcagggcgagcaacaagagtgggaaggcactgaagaactgcctagtcccccagatcacgcggagcgcgctgaggaacagcacgaaaagtaccggccaagccaagatcagggactccctgcatccagatgtctcaggtgctgcgatcctgggacatcaatgtacccagccactgccgtaccacagattaacatcactatcttgaaaggcgaaaaaggcgacagaggcgataggggattacagggaaaatatggcaagaccggcagcgcaggcgctcgcggacacactggtccgaaaggacagaaagggtcaatgggcgcaccaggggagcgctgcaaaagccattatgcagcttttagtgtgggtaggaagaagcccatgcatagcaaccattactatcagacggtgatattcgacactgaattcgtcaacctgtatgaccacttcaatatgtttaccggtaagttttattgctacgtgcctgggctttacttcttcagtcttaacgtgcacacgtggaatcaaaaggagacctacctgcacattatgaaaaatgaggaggaagtggtcatcctgttcgcccaggttggagatagaagcatcatgcagtcccaatccctaatgctcgaacttagagagcaagaccaggtttgggtgcgcttatataagggtgaacgggagaacgcgatcttttctgaagagcttgatacctatatcaccttctccgggtacctcgtgaagcacgctacagaaccctag

SEQ ID NO: 220982 - DNA, 846 bp, Artificial Sequence
  derived and/or modified sequence
atgggctcccgtggtcagggcctcctgctggcatattgccttctgctagccttcgccagtggactggtgttgagtcgggtgccgcatgtccagggagagcagcaggaatgggagggaacggaggaactccccagcccacccgaccatgccgaacgggctgaagagcagcacgaaaagtatagacccagtcaagaccagggcttgcccgcatctaggtgccttagatgttgcgaccccggaacttctatgtaccctgcgaccgctgtgcctcagataaacatcacgattctgaaaggggagaagggagatcggggagaccgagggctgcagggaaaatacggcaagaccggcagtgctggcgctcggggacacacaggccctaaagggcagaaagggtcgatgggagctccgggagagcggtgtaagtctcactacgccgcattttccgtggggagaaaaaagcctatgcatagcaatcactactatcagaccgttatctttgataccgaatttgtaaatttatacgaccattttaacatgtttacaggcaagttttactgttatgtgcccggactgtacttttttagcctaaacgtgcacacttggaaccagaaggagacctacctccacatcatgaagaacgaggaggaggtcgtaatcctgtttgctcaggtgggggacagaagcatcatgcagtcccaaagtctcatgctggaactccgcgaacaagaccaggtgtgggtacggctttataagggagagcgcgagaatgctattttttctgaagaactagacacgtacattacattcagcggttatctggtgaagcacgccactgaaccctag

SEQ ID NO: 220983 - DNA, 846 bp, Artificial Sequence
  derived and/or modified sequence
atggggtctagggggcaaggcctgctcctcgcctattgcctgctgctcgctttcgcttctggtttggttctgtcaagggttccccacgtgcagggcgagcagcaggaatgggaaggcacggaagagctgcccagtccaccagaccatgctgaacgagctgaagagcagcatgaaaaatatcgtccctcacaggaccagggcctccccgcgtcgagatgtctaagatgttgcgatcccggtacatccatgtatcctgccacagcagtaccccagattaatatcaccatccttaaaggcgagaagggagatagaggggacagaggactccagggcaagtacgggaagacaggctcagcaggcgccagaggtcacactggtccaaaaggacaaaaagggagcatgggtgcgcctggcgaacgctgcaagagccactacgccgcttttagcgtcggccgcaaaaaaccaatgcattctaatcattactaccaaacagttatttttgacaccgaattcgttaatttatatgatcacttcaatatgttcacaggtaagttttactgctatgtccccggtctatactttttcagtttaaatgtgcacacttggaaccagaaggaaacttatctccatatcatgaagaatgaagaagaggtagtgatcctgtttgcccaagtgggcgataggtctataatgcagtcccagtctctgatgttagagctccgcgagcaagatcaggtgtgggtccgattgtacaagggggaaagagagaacgctatattttctgaagaacttgacacgtacatcaccttttcgggctacctcgtcaaacatgctaccgaaccttag

SEQ ID NO: 220984 - DNA, 846 bp, Artificial Sequence
  derived and/or modified sequence
atgggtagtagaggccaaggtctgttgctggcttactgcctcctactcgcatttgcctctggtttggttttaagtcgcgtcccacacgtgcagggcgagcaacaagagtgggagggcacagaggaattgccttcaccccccgaccacgctgagagggctgaagagcaacatgaaaaataccgcccaagccaagatcagggactacccgcttcgagatgcctgcgctgttgcgaccccggcaccagtatgtatccagcaacagccgtcccacaaattaacatcactatacttaagggcgaaaaaggggaccgaggcgaccggggcctgcaaggcaagtacggaaaaactggctcagcaggcgcaaggggacacacagggccaaaggggcaaaaaggcagcatgggcgcccccggagagaggtgcaagagccactacgctgcattcagcgttgggcgcaaaaagccaatgcacagcaaccactattatcagactgtgatcttcgacacagagttcgtgaacctatatgaccatttcaatatgttcaccggaaaattttactgctacgtgcccggcctttacttcttctccctaaacgtgcacacctggaaccagaaggaaacataccttcacatcatgaagaacgaagaagaggttgtgattttatttgcccaagtgggcgatagaagtattatgcagtcgcagtcactgatgctggagctgagggaacaagatcaggtctgggtgaggctatacaagggtgaaagggaaaacgccattttctctgaggaacttgacacgtatatcactttttcaggttatttggtcaaacatgccaccgagccatag

SEQ ID NO: 220985 - DNA, 846 bp, Artificial Sequence
  derived and/or modified sequence
atgggttccagaggccaaggattactgctggcgtattgtctcctgcttgcattcgcctcaggcttagtgctgagccgagtgccccatgttcagggggaacagcaagaatgggaggggactgaagagctaccatcaccaccagatcacgccgaaagggccgaggaacagcacgagaaatacagaccgtctcaggaccaaggactgcccgccagtaggtgtctgagatgctgcgaccccgggaccagcatgtatcccgccactgccgtgccacagattaatatcaccattctcaagggagagaagggagatagaggggacagaggactccagggcaagtacgggaagacaggctcagcaggcgccagaggtcacactggtccaaaaggacaaaaagggagcatgggtgcgcctggcgaacgctgcaagagccactacgccgcttttagcgtcggccgcaaaaaaccaatgcattctaatcattactaccaaacagttatttttgacaccgaattcgttaatttatatgatcacttcaatatgttcacaggtaagttttactgctatgtccccggtctatactttttcagtttaaatgtgcacacatggaaccagaaagagacctatctacatattatgaaaaacgaggaagaggttgttattttgtttgcacaagtaggagatcggtcgatcatgcaatcccagtcattaatgcttgaactcagagaacaggaccaagtttgggtgagactgtacaagggcgagcgcgaaaacgccatcttcagtgaagaactggacacttacatcaccttttctggctatctcgtgaagcatgctaccgagccttag

SEQ ID NO: 220986 - DNA, 846 bp, Artificial Sequence
  derived and/or modified sequence
atggggagtcggggacagggactcctgttagcttattgtttactgttggctttcgcctctggcctggtgctgtctagagtccctcacgttcagggagaacaacaggaatgggagggtactgaagaactgccaagccctcccgaccacgctgaacgagccgaagagcaacatgaaaaatataggcctagtcaggaccaaggattgcccgcctccagatgtctccgttgctgcgatcccggcacctcgatgtacccagctactgccgtcccacaaattaatatcactatactgaagggagaaaaaggagacaggggcgaccgagggctacaggggaagtacggcaaaaccgggagcgcaggagcccgcggtcacaccggaccaaagggacagaaaggatctatgggcgcacctggtgaaagatgtaaatctcactacgctgctttctccgtgggaagaaagaagcctatgcacagtaatcattactatcagactgtgatctttgataccgaattcgtcaatctatatgaccatttcaacatgtttaccggaaaattttattgctacgtaccaggactctatttcttctccctgaacgttcacacatggaatcagaaagagacatacctgcatataatgaaaaacgaggaagaagtggtcattctgttcgcccaggtaggggaccgatctatcatgcagtcacagagcctcatgctagagctgcgagaacaggaccaggtgtgggtgcgcctctacaaaggagagagagagaatgcaatcttttcagaagaattagacacttacattactttttctggatacctagttaaacatgccacggagccctag

SEQ ID NO: 220987 - DNA, 846 bp, Artificial Sequence
  derived and/or modified sequence
atgggcagcagaggccagggcctgctgctggcctactgcctgctgctggccttcgccagcggcctggtgctgagcagagtgccccacgtgcagggcgagcagcaggagtgggagggcaccgaggagctgcccagcccccccgaccacgccgagagagccgaggagcagcacgagaagtacagacccagccaggaccagggcctgcccgccagcagatgcctgagatgctgcgaccccggcaccagcatgtaccccgccaccgccgtgccccagatcaacatcaccatcctgaagggcgagaagggcgacagaggcgacagaggcctgcagggcaagtacggcaagaccggcagcgccggcgccagaggccacaccggccccaagggccagaagggcagcatgggcgcccccggcgagagatgcaagagccactacgccgccttcagcgtgggcagaaagaagcccatgcacagcaaccactactaccagaccgtgatcttcgacaccgagttcgtgaacctgtacgaccacttcaacatgttcaccggcaagttctactgctacgtgcccggcctgtacttcttcagcctgaacgtgcacacctggaaccagaaggagacctacctgcacatcatgaagaacgaggaggaggtggtgatcctgttcgcccaggtgggcgacagaagcatcatgcagagccagagcctgatgctggagctgagagagcaggaccaggtgtgggtgagactgtacaagggcgagagagagaacgccatcttcagcgaggagctggacacctacatcaccttcagcggctacctggtgaagcacgccaccgagccctag

SEQ ID NO: 220988 - DNA, 2716 bp, Artificial Sequence
  derived and/or modified sequence
acatctggctgggcttcgctccttgcgcgtctgtcccactttctccctctcttcctttactttcgagaaaccgcgcttccgcttctggtcgcagagacctcggagaccgcgccggggagacggaggtgctgtgggtgggggggacctgtggctgctcgtaccgccccccaccctcctcttctgcactgccgtcctccggaagaccttttcccctgctctgtttccttcaccgagtctgtgcatcgccccggacctggccgggaggaggcttggccggcgggagatgctctacgggcggcgcgggaggagcggccggcgggacggagggctgaagaacaacatgaaaaatacaggcccagtcaggaccaggggctccctgcttcccggtgcttgcgctgctgtgaccccggtacctccatgtacccggcgaccgccgtgccccagatcaacatcactatcttgaaaggggagaagggtgaccgcggagatcgaggcctccaagggaaatatggcaaaacaggctcagcaggggccaggggccacactggacccaaagggcagaagggctccatgggggcccctggggagcggtgcaagagccactacgccgccttttcggtgggccggaagaagcccatgcacagcaaccactactaccagacggtgatcttcgacacggagttcgtgaacctctacgaccacttcaacatgttcaccggcaagttctactgctacgtgcccggcctctacttcttcagcctcaacgtgcacacctggaaccagaaggagacctacctgcacatcatgaagaacgaggaggaggtggtgatcttgttcgcgcaggtgggcgaccgcagcatcatgcaaagccagagcctgatgctggagctgcgagagcaggaccaggtgtgggtacgcctctacaagggcgaacgtgagaacgccatcttcagcgaggagctggacacctacatcaccttcagtggctacctggtcaagcacgccaccgagccctagctggccggccacctcctttcctctcgccaccttccacccctgcgctgtgctgaccccaccgcctcttccccgatccctggactccgactccctggctttggcattcagtgagacgccctgcacacacagaaagccaaagcgatcggtgctcccagatcccgcagcctctggagagagctgacggcagatgaaatcaccagggcggggcacccgcgagaaccctctgggaccttccgcggccctctctgcacacatcctcaagtgaccccgcacggcgagacgcgggtggcggcagggcgtcccagggtgcggcaccgcggctccagtccttggaaataattaggcaaattctaaaggtctcaaaaggagcaaagtaaaccgtggaggacaaagaaaagggttgttatttttgtctttccagccagcctgctggctcccaagagagaggccttttcagttgagactctgcttaagagaagatccaaagttaaagctctggggtcaggggaggggccgggggcaggaaactacctctggcttaattcttttaagccacgtaggaactttcttgagggataggtggaccctgacatccctgtggccttgcccaagggctctgctggtctttctgagtcacagctgcgaggtgatgggggctggggccccaggcgtcagcctcccagagggacagctgagccccctgccttggctccaggttggtagaagcagccgaagggctcctgacagtggccagggacccctgggtcccccaggcctgcagatgtttctatgaggggcagagctcctggtacatccatgtgtggctctgctccacccctgtgccaccccagagccctggggggtggtctccatgcctgccaccctggcatcggctttctgtgccgcctcccacacaaatcagccccagaaggccccggggccttggcttctgttttttataaaacacctcaagcagcactgcagtctcccatctcctcgtgggctaagcatcaccgcttccacgtgtgttgtgttggttggcagcaaggctgatccagaccccttctgcccccactgccctcatccaggcctctgaccagtagcctgagaggggctttttctaggcttcagagcaggggagagctggaaggggctagaaagctcccgcttgtctgtttctcaggctcctgtgagcctcagtcctgagaccagagtcaagaggaagtacacgtcccaatcacccgtgtcaggattcactctcaggagctgggtggcaggagaggcaatagcccctgtggcaattgcaggaccagctggagcagggttgcggtgtctccacggtgctctcgccctgcccatggccaccccagactctgatctccaggaaccccatagcccctctccacctcaccccatgttgatgcccagggtcactcttgctacccgctgggcccccaaacccccgctgcctctcttccttccccccatcccccacctggttttgactaatcctgcttccctctctgggcctggctgccgggatctggggtccctaagtccctctctttaaagaacttctgcgggtcagactctgaagccgagttgctgtgggcgtgcccggaagcagagcgccacactcgctgcttaagctcccccagctctttccagaaaacattaaactcagaattgtgttttcagc

SEQ ID NO: 220989 - DNA, 846 bp, Artificial Sequence
  derived and/or modified sequence
atgggatctcggggacaggggctcctgttggcctattgcttgcttctagcttttgctagcggtctcgtcctaagccgcgtgcctcacgtgcagggtgagcagcaagagtgggagggaaccgaggaactgccgtctcctccagatcacgcggagagggctgaggaacagcacgagaaatatcggccatctcaggaccagggcctgcccgcaagcagatgtctgaggtgctgtgatccaggaacatccatgtaccctgcaactgcggtgccccaaataaatatcaccatccttaagggagaaaagggtgaccgtggagatcgcgggcttcaggggaagtatggaaagacgggttctgccggtgcgagggggcacaccggaccaaagggccagaaaggctcgatgggcgctccgggcgagagatgtaagtcccactatgccgcattctctgtcggtagaaaaaaacctatgcactcaaatcactactaccagacagtgattttcgataccgagttcgttaatctatacgaccacttcaatatgtttactggtaagttttattgctacgttccgggactgtacttctttagtcttaatgtgcatacatggaatcagaaggagacatatctgcacataatgaaaaacgaggaggaggtggtaatcctattcgcccaagttggtgaccgatcaattatgcagtcccagtctctcatgctcgagttgcgcgaacaggaccaagtatgggtccgcctgtacaaaggagagcgcgaaaacgctattttctccgaagagctggatacttatattaccttctccggttacctggtcaagcacgcgacagaaccttag

SEQ ID NO: 220990 - DNA, 846 bp, Artificial Sequence
  derived and/or modified sequence
atggggagccgggggcaggggctgctgcttgcttactgcctcctgttagccttcgcctccggacttgtgctctcacgcgtgcctcatgtccagggcgaacagcaggagtgggagggcactgaagaactgccatccccacccgatcacgctgaacgcgctgaagagcaacatgaaaaatatcgtcctagccaagaccaggggcttcccgctagcaggtgtctgcggtgttgcgatcccggtaccagtatgtatccagctacagccgtcccccagataaatattaccatattgaaaggggagaagggcgaccgtggggaccggggattgcagggaaaatacggcaagaccgggtccgccggggctagaggccacacgggaccaaagggtcagaaaggctctatgggggcccctggagagcgatgcaagagccactacgctgctttttcagtgggtcgaaagaagcctatgcattcaaatcactactatcagacggttatattcgacacagaatttgtaaacctgtatgatcactttaatatgtttacaggaaaattttactgttacgttccaggcctgtatttcttcagtctaaacgttcacacctggaatcaaaaagagacttatctacatattatgaagaacgaggaggaggtggtgatactatttgcccaggtgggagacaggagtatcatgcagagtcaatctttgatgctagaactgcgagagcaggatcaggtgtgggttcgactttacaagggcgagcgggaaaacgccatatttagcgaggaacttgacacatatatcactttttccgggtatctggtgaagcacgccacagagccatag

SEQ ID NO: 220991 - DNA, 846 bp, Artificial Sequence
  derived and/or modified sequence
atgggcagccggggccagggcctgctgctggcctactgcctgctgctggcctttgccagcggcctggtgctgagccgggtgccccacgtgcagggcgagcagcaggagtgggagggcacagaggagctgcccagccccccagaccacgccgagagagctgaggagcagcacgagaagtaccggcccagccaggaccagggcctgcctgccagccgctgcctgcgctgctgtgaccccggcacctccatgtacccagccacagctgtgccccagatcaacatcaccatcctgaagggggagaagggggacagaggagaccggggcctgcagggcaagtatggcaagacaggcagcgctggggcccggggccacacaggccccaagggccagaagggctccatgggcgcccctggagagcgctgcaagagccactacgccgccttctctgtgggcaggaagaagcccatgcacagcaaccactactaccagaccgtcatctttgacacagaatttgtgaacctgtatgaccacttcaacatgttcaccgggaagttctactgctacgtgcccggcctgtacttcttcagcctgaatgtgcacacctggaaccagaaggagacctacctgcacatcatgaagaatgaggaggaggtggtgatcctgtttgcccaggtgggggacaggagcatcatgcagagccagagcctgatgctggagctgcgggagcaggaccaggtgtgggtgcggctgtacaagggggagcgggagaatgccatcttcagcgaggagctggacacctacatcaccttcagcggctacctggtgaagcacgccacagagccctag

SEQ ID NO: 220992 - DNA, 846 bp, Artificial Sequence
  derived and/or modified sequence
atgggcagccggggccagggcctgctgctggcctactgcctgctgctggcgttcgcgtcgggtttggttctgtcccgagtgccccatgtgcagggcgaacagcaggaatgggagggcacagaagagctccccagcccaccggatcacgctgaacgagccgaagagcagcacgagaaataccggccttctcaggatcagggtcttccagcttctaggtgcctccgctgctgcgaccccgggacatccatgtatcctgcgaccgcagtcccacaaatcaacatcacaattctcaaaggcgagaaaggtgaccgtggagatcggggattgcagggaaaatatggtaagacaggaagtgcaggagcgcgcggccacacggggcccaagggccaaaaggggtcaatgggtgctcccggggagcgttgcaagagccattacgcagcgttctcagtgggccgaaaaaagcctatgcatagcaaccattattaccagacagtcatctttgacaccgagttcgtgaacctgtatgatcactttaatatgtttactggcaagttctactgctatgtaccaggtctgtatttctttagcctgaatgtccacacttggaaccaaaaagaaacttatctccatataatgaaaaacgaggaagaggtggtcatactttttgcccaggtgggagaccgatccattatgcagagtcagtctttgatgctggagctgcgcgagcaggaccaggtctgggtcagactctataaaggtgagcgggagaacgcaatcttctctgaggaactggacacgtacattaccttctccggttacctggtgaagcacgctactgaaccatag

SEQ ID NO: 220993 - DNA, 846 bp, Artificial Sequence
  derived and/or modified sequence
atgggcagccggggccagggcctgctgctggcctactgcctgctgctcgcctttgcaagtggactcgtgctcagccgggtgcctcacgtgcagggtgagcagcaagaatgggaaggcactgaggagctgcccagtcctcctgatcatgccgaacgtgcagaggaacagcatgaaaagtaccgcccatcacaggatcaaggtttgcccgctagcagatgcctcaggtgttgcgatcctggtacaagtatgtacccggccactgccgtcccacagataaacataacaatactgaaaggtgagaagggggacaggggggaccgtgggctgcaggggaaatatggcaagactgggtccgctggtgctaggggacacaccggccccaaagggcagaaggggtcaatgggtgcccccggtgagcgttgcaagagtcattatgccgcgttctcggttgggcgtaaaaaacctatgcattctaatcattattaccagacagtcatcttcgatacagaatttgtgaacctctatgatcatttcaatatgttcaccggaaaattctactgctatgtccccggcttgtattttttcagtctgaatgtgcatacctggaatcagaaagaaacatacctccacatcatgaaaaacgaagaggaagtggtaattcttttcgcccaggtgggagatcgtagcatcatgcagagtcagtccctgatgctcgaacttagagagcaggatcaggtgtgggttcgtttatataagggagagcgagaaaacgcaatcttttcagaagaattggatacctacatcacattcagcgggtaccttgttaagcacgctactgagccctag

SEQ ID NO: 220994 - RNA, 846 nt, Artificial Sequence
  derived and/or modified sequence
auggggucuagggggcaaggccugcuccucgccuauugccugcugcucgcuuucgcuucugguuugguucugucaaggguuccccacgugcagggcgagcagcaggaaugggaaggcacggaagagcugcccaguccaccagaccaugcugaacgagcugaagagcagcaugaaaaauaucgucccucacaggaccagggccuccccgcgucgagaugucuaagauguugcgaucccgguacauccauguauccugccacagcaguaccccagauuaauaucaccauccuuaaaggcgagaagggagauagaggggacagaggacuccagggcaaguacgggaagacaggcucagcaggcgccagaggucacacugguccaaaaggacaaaaagggagcaugggugcgccuggcgaacgcugcaagagccacuacgccgcuuuuagcgucggccgcaaaaaaccaaugcauucuaaucauuacuaccaaacaguuauuuuugacaccgaauucguuaauuuauaugaucacuucaauauguucacagguaaguuuuacugcuauguccccggucuauacuuuuucaguuuaaaugugcacacuuggaaccagaaggaaacuuaucuccauaucaugaagaaugaagaagagguagugauccuguuugcccaagugggcgauaggucuauaaugcagucccagucucugauguuagagcuccgcgagcaagaucagguguggguccgauuguacaagggggaaagagagaacgcuauauuuucugaagaacuugacacguacaucaccuuuucgggcuaccucgucaaacaugcuaccgaaccuuag

SEQ ID NO: 220995 - RNA, 846 nt, Artificial Sequence
  derived and/or modified sequence
auggguaguagaggccaaggucuguugcuggcuuacugccuccuacucgcauuugccucugguuugguuuuaagucgcgucccacacgugcagggcgagcaacaagagugggagggcacagaggaauugccuucaccccccgaccacgcugagagggcugaagagcaacaugaaaaauaccgcccaagccaagaucagggacuacccgcuucgagaugccugcgcuguugcgaccccggcaccaguauguauccagcaacagccgucccacaaauuaacaucacuauacuuaagggcgaaaaaggggaccgaggcgaccggggccugcaaggcaaguacggaaaaacuggcucagcaggcgcaaggggacacacagggccaaaggggcaaaaaggcagcaugggcgcccccggagagaggugcaagagccacuacgcugcauucagcguugggcgcaaaaagccaaugcacagcaaccacuauuaucagacugugaucuucgacacagaguucgugaaccuauaugaccauuucaauauguucaccggaaaauuuuacugcuacgugcccggccuuuacuucuucucccuaaacgugcacaccuggaaccagaaggaaacauaccuucacaucaugaagaacgaagaagagguugugauuuuauuugcccaagugggcgauagaaguauuaugcagucgcagucacugaugcuggagcugagggaacaagaucaggucugggugaggcuauacaagggugaaagggaaaacgccauuuucucugaggaacuugacacguauaucacuuuuucagguuauuuggucaaacaugccaccgagccauag

SEQ ID NO: 220996 - RNA, 846 nt, Artificial Sequence
  derived and/or modified sequence
auggguuccagaggccaaggauuacugcuggcguauugucuccugcuugcauucgccucaggcuuagugcugagccgagugccccauguucagggggaacagcaagaaugggaggggacugaagagcuaccaucaccaccagaucacgccgaaagggccgaggaacagcacgagaaauacagaccgucucaggaccaaggacugcccgccaguaggugucugagaugcugcgaccccgggaccagcauguaucccgccacugccgugccacagauuaauaucaccauucucaagggagagaagggagauagaggggacagaggacuccagggcaaguacgggaagacaggcucagcaggcgccagaggucacacugguccaaaaggacaaaaagggagcaugggugcgccuggcgaacgcugcaagagccacuacgccgcuuuuagcgucggccgcaaaaaaccaaugcauucuaaucauuacuaccaaacaguuauuuuugacaccgaauucguuaauuuauaugaucacuucaauauguucacagguaaguuuuacugcuauguccccggucuauacuuuuucaguuuaaaugugcacacauggaaccagaaagagaccuaucuacauauuaugaaaaacgaggaagagguuguuauuuuguuugcacaaguaggagaucggucgaucaugcaaucccagucauuaaugcuugaacucagagaacaggaccaaguuugggugagacuguacaagggcgagcgcgaaaacgccaucuucagugaagaacuggacacuuacaucaccuuuucuggcuaucucgugaagcaugcuaccgagccuuag

SEQ ID NO: 220997 - RNA, 846 nt, Artificial Sequence
  derived and/or modified sequence
auggggagucggggacagggacuccuguuagcuuauuguuuacuguuggcuuucgccucuggccuggugcugucuagagucccucacguucagggagaacaacaggaaugggaggguacugaagaacugccaagcccucccgaccacgcugaacgagccgaagagcaacaugaaaaauauaggccuagucaggaccaaggauugcccgccuccagaugucuccguugcugcgaucccggcaccucgauguacccagcuacugccgucccacaaauuaauaucacuauacugaagggagaaaaaggagacaggggcgaccgagggcuacaggggaaguacggcaaaaccgggagcgcaggagcccgcggucacaccggaccaaagggacagaaaggaucuaugggcgcaccuggugaaagauguaaaucucacuacgcugcuuucuccgugggaagaaagaagccuaugcacaguaaucauuacuaucagacugugaucuuugauaccgaauucgucaaucuauaugaccauuucaacauguuuaccggaaaauuuuauugcuacguaccaggacucuauuucuucucccugaacguucacacauggaaucagaaagagacauaccugcauauaaugaaaaacgaggaagaaguggucauucuguucgcccagguaggggaccgaucuaucaugcagucacagagccucaugcuagagcugcgagaacaggaccaggugugggugcgccucuacaaaggagagagagagaaugcaaucuuuucagaagaauuagacacuuacauuacuuuuucuggauaccuaguuaaacaugccacggagcccuag

SEQ ID NO: 220998 - protein, 747 aa, Artificial Sequence
  derived and/or modified sequence
MVPGSEGPARAGSVVADVVFVIEGTANLGPYFEGLRKHYLLPAIEYFNGGPPAETDFGGDYGGTQYSLVVFNTVDCAPESYVQCHAPTSSAYEFVTWLDGIKFMGGGGESCSLIAEGLSTALQLFDDFKKMREQIGQTHRVCLLICNSPPYLLPAVESTTYSGCTTENLVQQIGERGIHFSIVSPRKLPALRLLFEKAAPPALLEPLQPPTDVSQDPRHMVLVRGLVLPVGGGSAPGPLQSKQPVPLPPAAPSGATLSAAPQQPLPPVPPQYQVPGNLSAAQVAAQNAVEAAKNQKAGLGPRFSPITPLQQAAPGVGPPFSQAPAPQLPPGPPGAPKPPPASQPSLVSTVAPGSGLAPTAQPGAPSMAGTVAPGGVSGPSPAQLGAPALGGQQSVSNKLLAWSGVLEWQEKPKPASVDANTKLTRSLPCQVYVNHGENLKTEQWPQKLIMQLIPQQLLTTLGPLFRNSRMVQFHFTNKDLESLKGLYRIMGNGFAGCVHFPHTAPCEVRVLMLLYSSKKKIFMGLIPYDQSGFVNGIRQVITNHKQVQQQKLEQQQRGMGGQQAPPGLGPILEDQARPSQNLLQLRPPQPQPQGTVGASGATGQPQPQGTAQPPPGAPQGPPGAASGPPPPGPILRPQNPGANPQLRSLLLNPPPPQTGVPPPQASLHHLQPPGAPALLPPPHQGLGQPQLGPPLLHPPPAQSWPAQLPPRAPLPGQMLLSGGPRGPVPQPGLQPSVMEDDILMDLI

SEQ ID NO: 220999 - protein, 482 aa, Artificial Sequence
  derived and/or modified sequence
MVPGSEGPARAGSVVADVVFVIEGTANLGPYFEGLRKHYLLPAIEYFNGGPPAPFSQAPAPQLPPGPPGAPKPPPASQPSLVSTVAPGSGLAPTAQPGAPSMAGTVAPGGVSGPSPAQLGAPALGGQQSVSNKLLAWSGVLEWQEKPKPASVDANTKLTRSLPCQVYVNHGENLKTEQWPQKLIMQLIPQQLLTTLGPLFRNSRMVQFHFTNKDLESLKGLYRIMGNGFAGCVHFPHTAPCEVRVLMLLYSSKKKIFMGLIPYDQSGFVNGIRQVITNHKQVQQQKLEQQQRGMGGQQAPPGLGPILEDQARPSQNLLQLRPPQPQPQGTVGASGATGQPQPQGTAQPPPGAPQGPPGAASGPPPPGPILRPQNPGANPQLRSLLLNPPPPQTGVPPPQASLHHLQPPGAPALLPPPHQGLGQPQLGPPLLHPPPAQSWPAQLPPRAPLPGQMLLSGGPRGPVPQPGLQPSVMEDDILMDLI

SEQ ID NO: 221000 - protein, 534 aa, Artificial Sequence
  derived and/or modified sequence
MVPGSEGPARAGSVVADVVFVIEGTANLGPYFEGLRKHYLLPAIEYFNGGPPAETDFGGDVPGNLSAAQVAAQNAVEAAKNQKAGLGPRFSPITPLQQAAPGVGPPFSQAPAPQLPPGPPGAPKPPPASQPSLVSTVAPGSGLAPTAQPGAPSMAGTVAPGGVSGPSPAQLGAPALGGQQSVSNKLLAWSGVLEWQEKPKPASVDANTKLTRSLPCQVYVNHGENLKTEQWPQKLIMQLIPQQLLTTLGPLFRNSRMVQFHFTNKDLESLKGLYRIMGNGFAGCVHFPHTAPCEVRVLMLLYSSKKKIFMGLIPYDQSGFVNGIRQVITNHKQVQQQKLEQQQRGMGGQQAPPGLGPILEDQARPSQNLLQLRPPQPQPQGTVGASGATGQPQPQGTAQPPPGAPQGPPGAASGPPPPGPILRPQNPGANPQLRSLLLNPPPPQTGVPPPQASLHHLQPPGAPALLPPPHQGLGQPQLGPPLLHPPPAQSWPAQLPPRAPLPGQMLLSGGPRGPVPQPGLQPSVMEDDILMDLI

SEQ ID NO: 221001 - protein, 259 aa, Artificial Sequence
  derived and/or modified sequence
MVPGSEGPARAGSVVADVVFVIEGTANLGPYFEGLRKHYLLPAIEYFNGGPPAETDFGGDYGGTQYSLVVFNTVDCAPESYVQCHAPTSSAYEFVTWLDGIKFMGGGGESCSLIAEGLSTALQLFDDFKKMREQIGQTHRVCLLICNSPPYLLPAVESTTYSGCTTENLVQQIGERGIHFSIVSPRKLPALRLLFEKAAPGLAGAAAASDRCEPGPEAHGAGSGTRAACWGWLSPRPPPVKAASPPASRRTLRCQVRCC

SEQ ID NO: 221002 - DNA, 2244 bp, Artificial Sequence
  derived and/or modified sequence
atggtgccaggatcggaaggtcctgctagagctggcagcgtcgttgccgacgtggtgttcgtgattgagggcacagccaacctcgggccatatttcgagggcctcaggaagcactatctattacctgctatagagtacttcaatgggggcccgcccgcagagaccgattttggcggggattatggtgggacgcaatacagcttggttgtgttcaatactgttgattgcgcaccagagagctatgtgcaatgccatgccccgacttcatccgcatacgaattcgtgacttggttggatggaattaaattcatgggcggcggcggggagtcttgcagtctgatcgctgaaggtttaagtactgctttacagctcttcgacgacttcaaaaagatgcgcgaacagataggccagactcaccgcgtctgtcttctgatatgcaactcacctccgtacctgctacccgccgtggagtctaccacctattctggatgcactacggaaaacttggtgcagcaaatcggtgagcgaggtatccacttctccattgtgtcaccgcggaaactccccgccttaaggctcctcttcgaaaaggccgcacctccggcactgcttgaacctttgcagccccccaccgatgtgagtcaagatcctagacacatggtccttgtgagagggctggtcctgcctgtgggaggaggttcagcgcccggccctctgcagtctaaacaaccagtccccctgcctccggctgctcctagcggcgcaacactcagtgctgccccacagcaacccttgcctcccgtgccccctcaataccaggtgccaggcaatctctccgccgcccaagtggcggcacaaaacgcagtcgaggccgctaaaaatcagaaggcaggcctcgggccccgattttcccctatcacacctttacaacaagctgcccctggcgttggaccacctttctctcaagctcctgccccacagctaccacccggcccgccaggcgctcctaagcctccccctgcttcgcaacccagccttgttagtacggtggcccctggcagcggcctggctcctaccgcccagcccggagctccgtccatggccggcaccgtggctcccggaggggtatctgggccatccccggcacagttgggagcgcccgcccttggaggtcaacagagtgtatcaaacaaactgctagcatggagcggcgtgcttgagtggcaggagaagccgaagccagcttctgttgatgccaatacaaagctgacacgttctttgccctgccaggtgtacgttaaccacggtgagaatctgaaaaccgaacagtggccccagaagctgataatgcagctgattccccagcaactgctgaccacacttggcccactgtttcggaactcaagaatggtccagtttcatttcaccaacaaagacctggagtctcttaaaggattatatagaatcatggggaatgggttcgctggatgcgttcactttccacatacagctccctgcgaggtgcgagtgctcatgcttctgtacagcagcaaaaaaaaaatcttcatgggcctgattccatatgatcagagtggctttgttaatgggatcagacaagttatcaccaatcacaagcaggtgcagcagcagaaactggagcaacaacagagaggaatggggggtcagcaagccccaccgggactgggaccaatattggaggaccaggccagaccaagtcaaaatttactccaactgaggcccccccagccacagcctcagggcactgtaggcgcctcaggcgcaacaggccagcctcagcctcaagggactgcccagccgcctccaggggcccctcaggggccccctggggctgccagtgggccacctccccctggacccatactgcggcctcagaaccccggtgccaaccctcaactgaggtcccttctattgaatccccccccgccacagactggtgtaccaccaccgcaagccagtctgcaccaccttcagcctccaggagccccagcactacttccccctccccaccagggcctgggccagccacagctggggcctcccttgctgcaccctccaccagcccagagctggcccgcccaactcccaccaagggctcctctgccaggtcaaatgctcctgtcaggaggtcccaggggccctgtcccccagcccggtctgcagccatccgtgatggaagatgatattctcatggacctgatatag

SEQ ID NO: 221003 - DNA, 2268 bp, Artificial Sequence
  derived and/or modified sequence
atggtccctggctccgagggccctgcgagggcgggttctgttgtggccgatgtagtgtttgtgattgaaggaaccgcaaacctaggcccttattttgaaggactgagaaaacattatcttcttcccgcaatagagtactttaacgggggcccccccgccgagactgacttcgggggggattatggcggcacccaatacagcttagtggtgttcaacacagtcgattgtgctcccgagagttatgttcagtgtcacgcccccacttcttccgcatacgagttcgtcacatggctcgacggcatcaaattcatggggggagggggcgaatcctgcagcttgatcgccgaggggcttagcacagcactgcagcttttcgacgattttaagaaaatgcgagaacagataggccagactcatagagtctgcctgctcatatgcaactcacccccatatttgttgcccgcggtcgaatctaccacttactcaggctgcaccacagagaatttagtccagcagataggcgaaagaggcatccacttctccatcgtttctcctaggaagctgcctgccttacgcctgcttttcgaaaaagcagcccctcctgctttacttgagccactgcagccccccaccgacgtgtcacaggaccccaggcacatggtgctggtgcggggcctcgtgctgcccgtcggcggcgggagcgccccaggccctctgcagagtaagcaacctgtacccttaccaccagccgccccaagtggtgcaacactatcagcggctccccagcagccactgcccccagtcccccctcagtatcaggtgcccggcaacctgagcgccgcacaagttgcagcccagaatgccgtagaagccgccaaaaaccaaaaagccggtctaggtcctaggttcagtccaatcactccccttcagcaagccgcccccggcgtgggcccgccctttagccaagccccagccccccagctacctcccggtccacccggagcccctaaaccaccaccagcctcgcaaccctccctcgtgagtaccgtggcccccgggtcagggctcgcgccaactgcccagcccggcgcaccatctatggcaggaacagttgctcccggcggagtgagtggccccagtcccgcccagctgggtgctccagccctcggcggccagcaatccgtgagcaataagttgctcgcttggtcaggagtccttgagtggcaggagaagccaaaacctgccagcgttgacgccaatacaaagctgacccgctcgctcccctgccaggtgtacgtgaatcacggggaaaatctaaaaactgagcaatggccccagaagttgataatgcaactgattcctcagcagctgttgaccaccctcggaccactgtttaggaattctcggatggtccagttccatttcactaacaaggacctggaaagcctgaaaggcctgtatagaattatgggaaacggcttcgccggctgcgtccacttcccacacacagccccctgtgaagttcgggtgctcatgctgctgtacagcagcaagaaaaaaattttcatgggcctcataccttatgatcagtccggtttcgtgaacggtattcgacaggtcatcacaaatcacaaacaggtccagcagcaaaaactcgaacagcaacaacgggggatgggaggacagcaggccccccccggactgggacccatcctggaggaccaggccaggccatctcagaatctcctgcagctcagacctccccaaccccagccacagggaacggtgggcgcctcgggcgctaccggccagcctcaaccacagggcacagcgcagccccccccgggagccccccagggcccccccggcgcggcatctggcccgccccccccagggcctatcctgaggcctcagaatcccggtgcaaatccacagctcagatccctcttgctcaatcctcctccccctcagactggagtgcctcctccacaggctagtctccatcatcacctgccaagccctggtcctcacaacttcccactcgggcttcactgtcaagtgagaggccctggggggggtcagcgatctggcctttctgttccggcggcccccggcctggagcatcaggacagagtgctcctgggcagtaaagacattgggtccaagaacgaaggctcccccatccgggcatgttcaccagcctcctggagaacgacttctagctggatttcctctgagtcaccaactcccaacaaggtcccgttttag

SEQ ID NO: 221004 - DNA, 1449 bp, Artificial Sequence
  derived and/or modified sequence
atggtgcctggatctgaagggcctgcgcgtgcagggtccgtcgtagcagatgtagtgttcgtgatagaaggtactgctaaccttgggccatactttgaggggctcaggaaacactacctgttaccggccatagaatattttaatggcggccctccagcccctttctctcaggcccccgcccctcagttacctcccggaccacccggagctcccaaacccccacctgccagtcagccatccctggtctctactgtcgcacccggatctgggctcgccccgacagcccagccaggagctccttcaatggctgggacagtggcccctgggggggtgtccgggcccagtcccgctcagctgggcgcacctgccctggggggccaacaatccgttagcaataagctgttggcatggtcaggggtccttgaatggcaagaaaagccaaaacccgcatccgtggacgcaaacaccaagctaacccgcagcctgccgtgtcaggtttacgtcaaccatggggagaatctgaagaccgagcaatggccccagaaactcattatgcagttgatcccacaacagctgctaacaacactggggcctctttttcggaactctcgtatggtgcaattccatttcacaaacaaagatctggagtctctcaagggcctgtatagaatcatgggtaatggattcgctggatgcgtgcattttccacacacagccccatgtgaggttcgggtcttaatgctgctgtacagctctaagaaaaagatctttatgggcctgattccatatgaccagtctggctttgttaatggcatcagacaggtaatcactaatcacaagcaggtgcagcagcaaaaacttgagcagcagcagcgggggatgggtggtcagcaggctccgccaggtctgggcccgattctcgaggaccaggcacggccgtcccagaatctcttgcagctccgaccgcctcaacctcagccacaaggtacggtgggcgcaagcggagccaccggccagcctcagccccaaggcaccgcacagcctcctcccggggcccctcaaggaccccccggggcagcaagcggccccccccctccgggacctattctgcggccacaaaatccaggggctaatccccagctgcgcagccttcttctgaaccctcctccacctcagacaggcgtccctccgccacaagcatcactgcaccatctccagcccccgggcgccccagccttactcccaccaccccatcaggggcttggccagccccagctggggccgcctcttttgcatcctccacccgctcaatcatggccagcgcagttgccaccacgggcgcccctgcccggtcagatgttgttatcaggcgggccacgtggccccgttccacagcctgggttgcagccatctgtcatggaagacgatatattgatggacctgatctag

SEQ ID NO: 221005 - DNA, 2385 bp, Artificial Sequence
  derived and/or modified sequence
atggtgcccggctcagagggtcctgcgcgggctggatctgtggttgccgacgtggttttcgtaatcgagggtaccgccaacctcggcccttacttcgaaggcctacgaaaacattatttactccctgccatcgagtacttcaacggtggcccgcctgcagaaaccgacttcggcggggactacggcggaacccagtattctctcgtggttttcaatacagttgactgcgcgccggaaagctatgtgcaatgtcacgccccaaccagttctgcatacgaatttgtcacttggctggacggaattaagttcatggggggaggtggtgagtcctgtagccttattgcagaaggccttagcacagccctgcagcttttcgacgattttaaaaaaatgcgggaacagataggccagacccacagggtttgtcttctgatctgtaacagtccaccttacctcctgccagctgtggagtcaacgacatattccgggtgcactaccgagaatcttgtccagcaaatcggcgagaggggcattcatttttccatagtgtcaccccgtaaactgcctgcactgagactgttgttcgagaaggctgccccccccgctctgctggagcctttgcaacccccaacggatgtttctcaagaccctagacacatggtactggtgcggggccttgtgctcccagtgggggggggatcagcccccggtcccctgcaatcaaagcaaccagtccctctgcctcccgccgcccctagcggggctacactgtccgccgcccctcagcagccactcccccccgtgcccccacaatatcaggttcctggaaatctctccgcagctcaagtggccgctcagaatgcagtggaggcggcgaagaaccagaaagcgggcctcggaccgcggttcagtccaatcactccactgcagcaggctgctccaggagtcggccccccattctcccaggccccggcgccccagctccccccaggacccccaggcgccccgaagccccctccagcttcacaacctagcctggtctctactgtcgctcccggttcaggactggcgccaactgcccaaccaggtgcgccatccatggccggcaccgtcgccccaggcggggtcagcggcccatcacctgcacaactaggcgcacctgctcttggcgggcagcagagcgtatctaataagctgctggcttggagcggcgtcctggagtggcaggaaaaaccaaaacccgcctccgtggatgccaacaccaaactgacacggtctctcccttgtcaggtttatgttaaccacggtgagaatttgaaaaccgaacagtggccacagaagctcattatgcagctgattcctcagcaattgttaactaccctcgggcctttgttccggaactctcgaatggttcaatttcacttcactaataaagacctggagagtctgaagggtttgtatcggattatgggcaacggattcgccggttgcgttcacttcccccacaccgccccatgtgaggtgagagtcctgatgctgctgtacagtagtaagaagaaaatatttatgggattgattccctatgatcagagtggatttgtaaatggcatacggcaagtaattacaaatcataaacaggttcagcagcagaagctggagcagcagcagcggggcatgggcggccagcaagcgcctcccggcctgggacctatcttggaggaccaagctcgacctagccagaacctgctccagctgcgtcccccacaacctcagccccaggggaccgtgggggcttcaggggcaaccggccagccccagccacaggggaccgcacagcctcctccaggggccccccagggcccccccggggctgctagtggacccccaccccctggtcccattctgaggccacagaatccaggcgcaaaccctcaattgaggagcctgctgctcaatcctccacctcctcagacgggggttccaccaccacaggcctccctccaccatctgcagccccccggtgctcctgcactgctgcccccaccccaccagggactcggccagccacagcttgggccccctctactgcatccgccccctgacggggcgcgccggtctgacgcggcagagcgagggagcccaggaccaggtcgcagccctcagtcccctccactgccccttgggtttcctgtgcgccagcgggtcaccgcattccatgtgagcattaccagtgggaagaccaaagagcgtaggagggggccgtgcgtgagcagaaagatgggggcaagtctgtttctctgtggctccgaagaacatgcttacgtgttcaacatgcagacaaacagagtctgtgtagagcgaatacaacccgagacccccctttag

SEQ ID NO: 221006 - DNA, 2175 bp, Artificial Sequence
  derived and/or modified sequence
atggttcccggttccgaagggcccgctcgagctggctcagtagtggctgatgtcgtgtttgtcatcgagggtacagccaatcttggaccatattttgaggggttgaggaaacattatctgttaccagccattgaatattttaatggcggcccccccgctgagacagacttcgggggagattacggcggcacacagtacagcctggtggtcttcaacactgtagattgcgccccggagagctacgtccagtgccacgccccaacttcatcagcttacgaattcgtgacatggctggatgggattaagttcatgggagggggcggagagagctgtagcttaatcgcggaagggctctctacggccctgcagctgtttgacgattttaagaaaatgagagaacagattgggcagacccatagagtctgtctcctgatctgcaactcccctccgtatctgctgcccgctgtggagtcaacgacctactctggttgtactacagagaatctcgtgcagcagattggcgaacggggcatccatttctccattgtctctccccgaaaattacctgccttacgcctcctgttcgaaaaggccgctcctccggcactgttggagccactccagcccccgacggacgtaagtcaggatccccggcacatggttctcgtcagagggctggtgctccccgtgggcggaggtagcgcaccaggacctcttcagagcaagcagcccgtaccattaccacccgctgccccctcaggcgctacgttatccgccgctccacagcagcctctcccccccgtcccgccacaataccaagtaccaggcaatctcagcgccgcccaggtcgccgcacagaatgctgtcgaagctgccaagaaccaaaaagcaggcctcgggccacggttctccccaatcacgcccttgcaacaggccgccccaggagtcgggcctcctttctcgcaggcacctgcgcctcagctgcctccagggcccccgggtgctccaaagccgccccccgccagtcagccttctttggtgagcaccgtggcccccggtagcggcttggctccaacagcgcagcccggagcccctagtatggccgggacggtagctcccggtggtgtcagcggtcctagtcccgcacagcttggcgccccggccctgggaggccagcaatctgtatccaacaaactcttggcctggtccggagttctggaatggcaagagaaaccaaaacctgctagtgtcgatgccaataccaagttaactagatccctcccctgccaagtgtatgtaaatcacggtgaaaacttaaagactgagcagtggcctcagaagctaattatgcagctgatcccacagcagctcctgaccacactcggccctctttttagaaatagtcggatggtccagttccactttaccaacaaggacttggagagtctgaaaggcctctaccgaataatgggaaacgggtttgctggatgcgtgcatttccctcatacagctccatgcgaggtgcgggtccttatgctcctgtactcatccaagaaaaaaattttcatggggctgattccatacgatcagtcaggattcgtaaatggaattagacaggtaatcacaaatcacaagcaggtacaacagcagaagctggaacagcagcagagaggaatgggaggtcagcaagctcctcctgggctcggacctatcttagaggaccaggccagacccagccagaatcttttacaactccgacctccccagcctcagcctcccccaggcgcgcctcagggcccacccggcgccgccagcggaccgccccctccagggccaattctgcggcctcagaaccccggtgccaaccctcaactgcgcagcctgctactgaatccacctccgccacagaccggcgttccgcctccccaggcgtcactgcatcatcttcagccaccaggggccccggccctgcttcctcccccccaccagggtttagggcaaccccagctgggccctcccctgctacacccccctccagcacaatcctggcctgctcagctgccacctcgcgccccgttgcctggaaagggcactagagggagggccgaagtatggactgagtgtccaagcagttcatgggccagggcaccacgtccatccgccccaggcaaatag

SEQ ID NO: 221007 - DNA, 753 bp, Artificial Sequence
  derived and/or modified sequence
atgcttctgtactcttctaagaaaaagatcttcatgggactgataccctacgatcagagcggctttgttaacggaatccgccaggtcatcacgaatcacaaacaagtgcagcagcagaagttagaacagcagcagcgcggcatggggggccagcaagccccccctggcctggggcccatcctggaagaccaggccaggccatcacagaacctcttgcagctgcggccccctcagcctcagccccaggggacggtcggtgcctccggggccaccggacagccacagccccagggcacggcgcaaccgcctcctggtgcgccccaggggcccccaggagctgccagtgggcccccccctcccggaccaattttcggaccacggacactaggccctaccttatcttgtgaagcaagttcttccactcatcaccgacgccggctgggttgcccccaccccagacccccctccaccacatcttcacaccaggggcttctgagatgttgcctccgcaggcagggactcggtcagcctcagctgggtcctcactcatgcatacatcacctgccttcacctggacctcacaattttccactcggacttcattgccaggtgcggggccctggcggaggtcagcgctctggactgtccgtccccgcagctcccgggctagagcatcaggacagggttctactgggaagcaaggacatcgggagcaagaacgaaggctccccgatggccttcgccgagttgtag

SEQ ID NO: 221008 - DNA, 1605 bp, Artificial Sequence
  derived and/or modified sequence
atggtccccgggtcagagggaccagcacgagctggttccgttgtcgctgatgtcgtgtttgttattgaaggaacggccaacctgggtccctatttcgaggggcttagaaagcactacctcttgcctgctattgaatatttcaacggagggccccctgccgaaacagactttggtggtgacgttccaggaaatctttcagcagcacaggttgctgctcaaaacgctgtcgaggctgcgaaaaatcaaaaggctggactgggtccacgattcagccctatcacccccctccagcaagcagcccccggcgtcggccccccattctctcaggcccccgccccacagttgcctccaggtcctcctggggccccaaagccacccccagctagccagccatctcttgtttcaacagttgctcctggcagtggtctggcaccaaccgcccagcctggagctccctcgatggccgggacagtcgcccccggcggagtgtcaggaccgtcccccgcacagcttggtgctcccgccttggggggacagcagtctgtgtcaaacaagttactggcttggagcggagtgttggagtggcaggagaagcccaaacctgcttcggtggacgccaatactaagctgaccagatcactaccctgccaggtttacgtgaatcacggagagaatctgaaaacagagcaatggccacagaagctcattatgcagctcatcccccagcagttgcttactacgcttggccctctgttccgcaactctaggatggtgcagttccattttaccaacaaggatctagaatctctcaaaggtctttacagaattatgggaaacgggttcgctggatgcgttcactttcctcacacagctccgtgcgaggtccgagtgctcatgctgctttatagcagtaaaaaaaagatcttcatggggttgattccttatgaccagagcggtttcgtgaacggcattaggcaggtgatcacaaaccataaacaggtgcaacaacagaagctggagcaacagcaacgcgggatggggggtcagcaagccccaccgggtctggggcctatccttgaggaccaggcacgcccaagccagaaccttctgcagttacgaccaccacagcctcagcctcagggaaccgttggcgcaagtggtgccacagggcagccacagccccaaggcacggcgcagcccccacctggagccccccaaggaccacccggtgcagcttccgggccgccaccgcctgggcctattttaaggcctcagaaccctggcgccaacccccagctccggtcactgctgctgaatcctccacctccgcagactggggtgcccccaccgcaggcttcgctccatcacttgcagccaccgggcgcaccagccctgctccctcccccccatcaagggctgggacagcctcagctagggcctcccctgctgcaccctccccctgcccaatcctggcccgctcagcttccgccgagagcaccattgcccggacagatgctgctgagtggagggccccgcggcccggtccctcagcctggcttgcagccctctgtaatggaggacgacattctgatggacctaatttag

SEQ ID NO: 221009 - DNA, 1194 bp, Artificial Sequence
  derived and/or modified sequence
atggtgcccggctccgaaggccccgctcgcgctggctcagtcgtggcagacgtggtattcgtgatagaaggcaccgcaaatctcggcccttacttcgagggcctgagaaagcattatctgctaccagccatcgaatattttaatggaggcccccctgccgaaaccgatttcggcggcgattatggtgggactcagtatagcctcgttgtgttcaatacagtggactgtgcccccgagtcatacgtccagtgccatgcccctaccagtagtgcgtatgagttcgtcacgtggctggacggaataaagtttatggggggtgggggggaatcatgttccctgattgccgaaggcctttctacagctctgcagctttttgacgattttaaaaagatgcgtgaacaaatcggacagacacacagagtgtgcctcctgatctgcaacagccccccatacctgctccccgcggtcgaaagcacaacctactctggttgtacaacagagaacttggtccagcagattggtgagcggggaatccacttcagcatcgtaagtccacggaagctgccagctctgagacttctcttcgagaaagctgctccgcccgctttgttggaacccctgcaaccccccactgatgtgtcacaagatccgaggcatatggtcctcgtgagagggttagtgctgcccgtgggaggtggttcggcaccagggcccctccagtccaaacagccagtccctcttcccccggcggccccatctggagccacactgagcgctgctccccagcagccgttgccgcctgtgccaccccaatatcaggtgccaggcaacttgagcgctgcacaggtagccgcccagaacgcggttgaagctgccaaaaaccagaaggcgggtcttggcccacggttcagccccatcacccctctacagcaagcagcacccggggtgggacctccgttcagtcaggcgcctgccccagctttgctccccccccctcaccagggattgggccaaccccaactcgggcctcccctgcttcaccctcctccagcccagagctggccagctcagcttcccccccgagctcctttgcccgggcagatgctgctctctggcggccccagagggcccgttccacaacctggactccaaccgtcggtgatggaagatgacatcctaatggacctcatatag

SEQ ID NO: 221010 - DNA, 780 bp, Artificial Sequence
  derived and/or modified sequence
atggtccccggctctgagggacccgcacgcgcaggcagtgttgtggccgatgtagtcttcgtgattgagggtacagccaacttgggcccctacttcgaaggcctgcgtaagcactatttgttgcccgcaatagaatacttcaatggtggtccaccagctgaaaccgacttcggcggagactacggtggtactcagtactcactcgtcgtctttaacacggtcgattgcgcgcccgagtcctacgtacagtgccatgctcctacttcttcagcctatgaattcgtgacctggctcgatgggatcaagtttatgggcggcggaggagagagttgttctctgattgctgaggggctttcaactgcgctgcaactctttgacgattttaaaaagatgcgtgaacagattggacaaacccatcgcgtgtgcctgctcatctgcaactctccaccctatctcctccccgccgtcgaatccacgacatattccggctgtaccacagagaatttggtgcagcagataggcgagcgcgggatccacttctccattgtgagcccccggaagttgcccgcgctccgtctgcttttcgagaaggcagctccaggcctcgccggcgcagccgccgcaagcgatcgatgcgagccaggcccggaagcccacggcgccggcagcggcacgagagccgcctgttggggatggctgtctccgaggcctccccccgtgaaagcagcatcacctcccgctagcaggcgaaccctgcgatgtcaggtgcgttgttgctag

SEQ ID NO: 221011 - DNA, 246 bp, Artificial Sequence
  derived and/or modified sequence
atgactcggaccgagagccccgcgacctggatgggtcagctgggcgccgccgcgtggatgcgcacgcttagtcctcaggcagcacaggtgctggttcgaccactcgctcaagaagatgccgtaggggcagctgctgccgcccgcggacgaatggggggaagctccacccgagaagtgcctagggcacacccagtgaccggttgctccgcggaaattattaacaagaaatgtcagctggacctctag

SEQ ID NO: 221012 - DNA, 2244 bp, Artificial Sequence
  derived and/or modified sequence
atggtgcccggcagcgagggccctgcccgggccggctctgtggtggctgatgtggtgtttgtgattgagggcacagccaacctgggcccctactttgagggcctgaggaagcactacctgctgcctgccatcgagtacttcaacggcggccccccagctgagacagactttggaggagactatggaggcacccagtacagcctggtggtgttcaacacagtggactgtgcccctgagagctatgtgcagtgccacgcccccaccagcagcgcctatgaatttgtgacctggctggatggcatcaagttcatgggcggcggcggggagagctgcagcctgattgctgagggcctgagcacagccctgcagctgtttgatgacttcaagaagatgagggagcagatcggccagacccaccgggtgtgcctgctgatctgcaacagccccccctacctgctgcctgctgtggagagcaccacctacagcggctgcaccacagagaacctggtgcagcagattggagagcggggcatccacttcagcatcgtgagccccaggaagctgcctgccctgcggctgctgtttgagaaggccgcccccccagccctgctggagcccctgcagcccccaacagatgtgtcccaggaccccaggcacatggtgctggtgcggggcctggtgctgcctgtgggcggcggcagcgcccctggccccctgcagagcaagcagcctgtgcccctgcccccagctgcccccagcggggccaccctgtctgctgccccccagcagcccctgccccctgtgcccccccagtaccaggtgcccggcaacctgtctgctgcccaggtggccgcccagaatgctgtggaggccgccaagaaccagaaggccggcctgggcccccgcttcagccccatcacccccctgcagcaggccgcccctggggtgggcccccccttcagccaggccccagccccccagctgcccccaggccccccaggggcccccaagcccccaccagccagccagcccagcctggtgtccacagtggcccctggcagcggcctggcccccacagcccagcccggggcccccagcatggccggcaccgtggcccctggaggagtgtctggccccagccctgcccagctgggcgccccagccctgggcggccagcagagcgtgagcaacaagctgctggcctggagcggcgtgctggagtggcaggagaagcccaagccagcctctgtggatgccaacaccaagctgaccaggagcctgccctgccaggtgtatgtgaaccacggggagaacctgaagacagagcagtggccccagaagctgatcatgcagctgatcccccagcagctgctgaccaccctgggccccctcttcaggaacagcaggatggtgcagttccacttcaccaacaaggacctggagagcctgaagggcctgtaccgcatcatgggaaatggatttgctggctgtgtgcacttcccccacacagccccctgtgaggtgcgggtgctgatgctgctgtacagcagcaagaagaagatcttcatgggcctcatcccctatgaccagagcggctttgtgaatggcatccggcaggtgatcaccaaccacaagcaggtgcagcagcagaagctggagcagcagcagaggggcatgggcggccagcaggcccctcctggcctgggccccatcctggaggaccaggcccggcccagccagaacctgctgcagctgcggcccccccagccccagccccagggcaccgtgggcgccagcggggccaccggccagccccagccccagggcacagcccagcccccacctggggccccccagggccccccaggggccgccagcggccccccacctcctggccccatcctgcggccccagaaccctggggccaacccccagctgcggagcctgctgctgaaccccccaccaccccagacaggagtgcccccaccccaggccagcctgcaccacctgcagcccccaggggccccagccctgctgcccccaccccaccagggcctgggccagccccagctgggcccccccctgctgcaccccccaccagcccagagctggccagcccagctgcccccccgggcccccctgcccggccagatgctgctgagcggcggcccccggggccctgtgccccagcccggcctgcagcccagcgtgatggaggatgacatcctgatggacctgatctag

SEQ ID NO: 221013 - DNA, 2268 bp, Artificial Sequence
  derived and/or modified sequence
atggtgcccggcagcgagggccctgcccgggccggctctgtggtggctgatgtggtgtttgtgattgagggcacagccaacctgggcccctactttgagggcctgaggaagcactacctgctgcctgccatcgagtacttcaacggcggccccccagctgagacagactttggaggagactatggaggcacccagtacagcctggtggtgttcaacacagtggactgtgcccctgagagctatgtgcagtgccacgcccccaccagcagcgcctatgaatttgtgacctggctggatggcatcaagttcatgggcggcggcggggagagctgcagcctgattgctgagggcctgagcacagccctgcagctgtttgatgacttcaagaagatgagggagcagatcggccagacccaccgggtgtgcctgctgatctgcaacagccccccctacctgctgcctgctgtggagagcaccacctacagcggctgcaccacagagaacctggtgcagcagattggagagcggggcatccacttcagcatcgtgagccccaggaagctgcctgccctgcggctgctgtttgagaaggccgcccccccagccctgctggagcccctgcagcccccaacagatgtgtcccaggaccccaggcacatggtgctggtgcggggcctggtgctgcctgtgggcggcggcagcgcccctggccccctgcagagcaagcagcctgtgcccctgcccccagctgcccccagcggggccaccctgtctgctgccccccagcagcccctgccccctgtgcccccccagtaccaggtgcccggcaacctgtctgctgcccaggtggccgcccagaatgctgtggaggccgccaagaaccagaaggccggcctgggcccccgcttcagccccatcacccccctgcagcaggccgcccctggggtgggcccccccttcagccaggccccagccccccagctgcccccaggccccccaggggcccccaagcccccaccagccagccagcccagcctggtgtccacagtggcccctggcagcggcctggcccccacagcccagcccggggcccccagcatggccggcaccgtggcccctggaggagtgtctggccccagccctgcccagctgggcgccccagccctgggcggccagcagagcgtgagcaacaagctgctggcctggagcggcgtgctggagtggcaggagaagcccaagccagcctctgtggatgccaacaccaagctgaccaggagcctgccctgccaggtgtatgtgaaccacggggagaacctgaagacagagcagtggccccagaagctgatcatgcagctgatcccccagcagctgctgaccaccctgggccccctcttcaggaacagcaggatggtgcagttccacttcaccaacaaggacctggagagcctgaagggcctgtaccgcatcatgggaaatggatttgctggctgtgtgcacttcccccacacagccccctgtgaggtgcgggtgctgatgctgctgtacagcagcaagaagaagatcttcatgggcctcatcccctatgaccagagcggctttgtgaatggcatccggcaggtgatcaccaaccacaagcaggtgcagcagcagaagctggagcagcagcagaggggcatgggcggccagcaggcccctcctggcctgggccccatcctggaggaccaggcccggcccagccagaacctgctgcagctgcggcccccccagccccagccccagggcaccgtgggcgccagcggggccaccggccagccccagccccagggcacagcccagcccccacctggggccccccagggccccccaggggccgccagcggccccccacctcctggccccatcctgcggccccagaaccctggggccaacccccagctgcggagcctgctgctgaaccccccaccaccccagacaggagtgcccccaccccaggccagcctgcaccaccacctgcccagccctggcccccacaacttccccctgggcctgcactgccaggtgcggggccctgggggcggccagaggagcggcctgtctgtgcctgctgcccctggcctggagcaccaggacagagtgctgctgggcagcaaggacatcggcagcaagaatgaaggcagccccatccgggcctgcagccctgcctcctggaggaccaccagctcctggatcagcagcgagagccccacccccaacaaggtgcccttctag

SEQ ID NO: 221014 - DNA, 1449 bp, Artificial Sequence
  derived and/or modified sequence
atggtgcccggcagcgagggccctgcccgggccggctctgtggtggctgatgtggtgtttgtgattgagggcacagccaacctgggcccctactttgagggcctgaggaagcactacctgctgcctgccatcgagtacttcaacggcggccccccagcccccttcagccaggccccagccccccagctgcccccaggccccccaggggcccccaagcccccaccagccagccagcccagcctggtgtccacagtggcccctggcagcggcctggcccccacagcccagcccggggcccccagcatggccggcaccgtggcccctgggggcgtgtctggccccagccctgcccagctgggcgccccagccctgggcggccagcagagcgtgagcaacaagctgctggcctggagcggcgtgctggagtggcaggagaagcccaagccagcctctgtggatgccaacaccaagctgaccaggagcctgccctgccaggtgtatgtgaaccacggggagaacctgaagacagagcagtggccccagaagctgatcatgcagctgatcccccagcagctgctgaccaccctgggccccctcttcaggaacagcaggatggtgcagttccacttcaccaacaaggacctggagagcctgaagggcctgtaccgcatcatgggaaatggatttgctggctgtgtgcacttcccccacacagccccctgtgaggtgcgggtgctgatgctgctgtacagcagcaagaagaagatcttcatgggcctcatcccctatgaccagagcggctttgtgaatggcatccggcaggtgatcaccaaccacaagcaggtgcagcagcagaagctggagcagcagcagaggggcatgggcggccagcaggcccctcctggcctgggccccatcctggaggaccaggcccggcccagccagaacctgctgcagctgcggcccccccagccccagccccagggcaccgtgggcgccagcggggccaccggccagccccagccccagggcacagcccagcccccacctggggccccccagggccccccaggagctgccagcggccccccacctcctggccccatcctgcggccccagaaccctggggccaacccccagctgcggagcctgctgctgaaccccccaccaccccagacaggagtgcccccaccccaggccagcctgcaccacctgcagcccccaggggccccagccctgctgcccccaccccaccagggcctgggccagccccagctgggcccccccctgctgcaccccccaccagcccagagctggccagcccagctgcccccccgggcccccctgcccggccagatgctgctgagcggcggcccccggggccctgtgccccagcccggcctgcagcccagcgtgatggaggatgacatcctgatggacctgatctag

SEQ ID NO: 221015 - DNA, 2385 bp, Artificial Sequence
  derived and/or modified sequence
atggtgcccggcagcgagggccctgcccgggccggctctgtggtggctgatgtggtgtttgtgattgagggcacagccaacctgggcccctactttgagggcctgaggaagcactacctgctgcctgccatcgagtacttcaacggcggccccccagctgagacagactttggaggagactatggaggcacccagtacagcctggtggtgttcaacacagtggactgtgcccctgagagctatgtgcagtgccacgcccccaccagcagcgcctatgaatttgtgacctggctggatggcatcaagttcatgggcggcggcggggagagctgcagcctgattgctgagggcctgagcacagccctgcagctgtttgatgacttcaagaagatgagggagcagatcggccagacccaccgggtgtgcctgctgatctgcaacagccccccctacctgctgcctgctgtggagagcaccacctacagcggctgcaccacagagaacctggtgcagcagattggagagcggggcatccacttcagcatcgtgagccccaggaagctgcctgccctgcggctgctgtttgagaaggccgcccccccagccctgctggagcccctgcagcccccaacagatgtgtcccaggaccccaggcacatggtgctggtgcggggcctggtgctgcctgtgggcggcggcagcgcccctggccccctgcagagcaagcagcctgtgcccctgcccccagctgcccccagcggggccaccctgtctgctgccccccagcagcccctgccccctgtgcccccccagtaccaggtgcccggcaacctgtctgctgcccaggtggccgcccagaatgctgtggaggccgccaagaaccagaaggccggcctgggcccccgcttcagccccatcacccccctgcagcaggccgcccctggggtgggcccccccttcagccaggccccagccccccagctgcccccaggccccccaggggcccccaagcccccaccagccagccagcccagcctggtgtccacagtggcccctggcagcggcctggcccccacagcccagcccggggcccccagcatggccggcaccgtggcccctggaggagtgtctggccccagccctgcccagctgggcgccccagccctgggcggccagcagagcgtgagcaacaagctgctggcctggagcggcgtgctggagtggcaggagaagcccaagccagcctctgtggatgccaacaccaagctgaccaggagcctgccctgccaggtgtatgtgaaccacggggagaacctgaagacagagcagtggccccagaagctgatcatgcagctgatcccccagcagctgctgaccaccctgggccccctcttcaggaacagcaggatggtgcagttccacttcaccaacaaggacctggagagcctgaagggcctgtaccgcatcatgggaaatggatttgctggctgtgtgcacttcccccacacagccccctgtgaggtgcgggtgctgatgctgctgtacagcagcaagaagaagatcttcatgggcctcatcccctatgaccagagcggctttgtgaatggcatccggcaggtgatcaccaaccacaagcaggtgcagcagcagaagctggagcagcagcagaggggcatgggcggccagcaggcccctcctggcctgggccccatcctggaggaccaggcccggcccagccagaacctgctgcagctgcggcccccccagccccagccccagggcaccgtgggcgccagcggggccaccggccagccccagccccagggcacagcccagcccccacctggggccccccagggccccccaggggccgccagcggccccccacctcctggccccatcctgcggccccagaaccctggggccaacccccagctgcggagcctgctgctgaaccccccaccaccccagacaggagtgcccccaccccaggccagcctgcaccacctgcagcccccaggggccccagccctgctgcccccaccccaccagggcctgggccagccccagctgggcccccccctgctgcaccccccaccagatggagcccggcggagtgatgctgctgagcggggcagccctggccctggccgcagcccccagagcccccccctgcccctgggcttccctgtgcggcagagggtgacagccttccacgtgtccatcaccagcggcaagaccaaggagaggagaagaggcccctgtgtgtccaggaagatgggcgccagcctcttcctgtgtggcagcgaggagcacgcctacgtgttcaacatgcagaccaacagagtgtgtgtggagcgcatccagcctgagacccccctgtag

SEQ ID NO: 221016 - DNA, 2175 bp, Artificial Sequence
  derived and/or modified sequence
atggtgcccggcagcgagggccctgcccgggccggctctgtggtggctgatgtggtgtttgtgattgagggcacagccaacctgggcccctactttgagggcctgaggaagcactacctgctgcctgccatcgagtacttcaacggcggccccccagctgagacagactttggaggagactatggaggcacccagtacagcctggtggtgttcaacacagtggactgtgcccctgagagctatgtgcagtgccacgcccccaccagcagcgcctatgaatttgtgacctggctggatggcatcaagttcatgggcggcggcggggagagctgcagcctgattgctgagggcctgagcacagccctgcagctgtttgatgacttcaagaagatgagggagcagatcggccagacccaccgggtgtgcctgctgatctgcaacagccccccctacctgctgcctgctgtggagagcaccacctacagcggctgcaccacagagaacctggtgcagcagattggagagcggggcatccacttcagcatcgtgagccccaggaagctgcctgccctgcggctgctgtttgagaaggccgcccccccagccctgctggagcccctgcagcccccaacagatgtgtcccaggaccccaggcacatggtgctggtgcggggcctggtgctgcctgtgggcggcggcagcgcccctggccccctgcagagcaagcagcctgtgcccctgcccccagctgcccccagcggggccaccctgtctgctgccccccagcagcccctgccccctgtgcccccccagtaccaggtgcccggcaacctgtctgctgcccaggtggccgcccagaatgctgtggaggccgccaagaaccagaaggccggcctgggcccccgcttcagccccatcacccccctgcagcaggccgcccctggggtgggcccccccttcagccaggccccagccccccagctgcccccaggccccccaggggcccccaagcccccaccagccagccagcccagcctggtgtccacagtggcccctggcagcggcctggcccccacagcccagcccggggcccccagcatggccggcaccgtggcccctggaggagtgtctggccccagccctgcccagctgggcgccccagccctgggcggccagcagagcgtgagcaacaagctgctggcctggagcggcgtgctggagtggcaggagaagcccaagccagcctctgtggatgccaacaccaagctgaccaggagcctgccctgccaggtgtatgtgaaccacggggagaacctgaagacagagcagtggccccagaagctgatcatgcagctgatcccccagcagctgctgaccaccctgggccccctcttcaggaacagcaggatggtgcagttccacttcaccaacaaggacctggagagcctgaagggcctgtaccgcatcatgggaaatggatttgctggctgtgtgcacttcccccacacagccccctgtgaggtgcgggtgctgatgctgctgtacagcagcaagaagaagatcttcatgggcctcatcccctatgaccagagcggctttgtgaatggcatccggcaggtgatcaccaaccacaagcaggtgcagcagcagaagctggagcagcagcagaggggcatgggcggccagcaggcccctcctggcctgggccccatcctggaggaccaggcccggcccagccagaacctgctgcagctgcggcccccccagccccagcccccacctggggccccccagggccccccaggagctgccagcggccccccacctcctggccccatcctgcggccccagaaccctggggccaacccccagctgcggagcctgctgctgaaccccccaccaccccagacaggagtgcccccaccccaggccagcctgcaccacctgcagcccccaggggccccagccctgctgcccccaccccaccagggcctgggccagccccagctgggcccccccctgctgcaccccccaccagcccagagctggccagcccagctgcccccccgggcccccctgcccgggaagggcacccggggccgggcagaggtgtggacagaatgtcccagcagctcctgggcccgggccccccggcccagcgcccctgggaagtag

SEQ ID NO: 221017 - DNA, 753 bp, Artificial Sequence
  derived and/or modified sequence
atgctgctgtacagcagcaagaagaagatcttcatgggcctcatcccctatgaccagagcggctttgtgaatggcatccggcaggtgatcaccaaccacaagcaggtgcagcagcagaagctggagcagcagcagaggggcatgggcggccagcaggcccctcctggcctgggccccatcctggaggaccaggcccggcccagccagaacctgctgcagctgcggcccccccagccccagccccagggcaccgtgggcgccagcggggccaccggccagccccagccccagggcacagcccagcccccacctggggccccccagggccccccaggagctgccagcggccccccacctcctggccccatcttcggccccaggaccctgggccccaccctgagctgtgaggccagcagcagcacccaccacagaagaaggctgggctgcccccacccccggccccccagcaccaccagcagccaccagggcctgctgcgctgctgcctgcggcggcagggcctgggccagccccagctgggcccccacagctgcatccaccacctgcccagccctggcccccacaacttccccctgggcctgcactgccaggtgcggggccctgggggcggccagaggagcggcctgtctgtgcctgctgcccctggcctggagcaccaggacagagtgctgctgggcagcaaggacatcggcagcaagaatgaaggcagccccatggcctttgctgagctgtag

SEQ ID NO: 221018 - DNA, 1605 bp, Artificial Sequence
  derived and/or modified sequence
atggtgcccggcagcgagggccctgcccgggccggctctgtggtggctgatgtggtgtttgtgattgagggcacagccaacctgggcccctactttgagggcctgaggaagcactacctgctgcctgccatcgagtacttcaacggcggccccccagctgagacagactttggaggagatgtgcccggcaacctgtctgctgcccaggtggccgcccagaatgctgtggaggccgccaagaaccagaaggccggcctgggcccccgcttcagccccatcacccccctgcagcaggccgcccctggggtgggcccccccttcagccaggccccagccccccagctgcccccaggccccccaggggcccccaagcccccaccagccagccagcccagcctggtgtccacagtggcccctggcagcggcctggcccccacagcccagcccggggcccccagcatggccggcaccgtggcccctgggggcgtgtctggccccagccctgcccagctgggcgccccagccctgggcggccagcagagcgtgagcaacaagctgctggcctggagcggcgtgctggagtggcaggagaagcccaagccagcctctgtggatgccaacaccaagctgaccaggagcctgccctgccaggtgtatgtgaaccacggggagaacctgaagacagagcagtggccccagaagctgatcatgcagctgatcccccagcagctgctgaccaccctgggccccctcttcaggaacagcaggatggtgcagttccacttcaccaacaaggacctggagagcctgaagggcctgtaccgcatcatgggaaatggatttgctggctgtgtgcacttcccccacacagccccctgtgaggtgcgggtgctgatgctgctgtacagcagcaagaagaagatcttcatgggcctcatcccctatgaccagagcggctttgtgaatggcatccggcaggtgatcaccaaccacaagcaggtgcagcagcagaagctggagcagcagcagaggggcatgggcggccagcaggcccctcctggcctgggccccatcctggaggaccaggcccggcccagccagaacctgctgcagctgcggcccccccagccccagccccagggcaccgtgggcgccagcggggccaccggccagccccagccccagggcacagcccagcccccacctggggccccccagggccccccaggagctgccagcggccccccacctcctggccccatcctgcggccccagaaccctggggccaacccccagctgcggagcctgctgctgaaccccccaccaccccagacaggagtgcccccaccccaggccagcctgcaccacctgcagcccccaggggccccagccctgctgcccccaccccaccagggcctgggccagccccagctgggcccccccctgctgcaccccccaccagcccagagctggccagcccagctgcccccccgggcccccctgcccggccagatgctgctgagcggcggcccccggggccctgtgccccagcccggcctgcagcccagcgtgatggaggatgacatcctgatggacctgatctag

SEQ ID NO: 221019 - DNA, 1194 bp, Artificial Sequence
  derived and/or modified sequence
atggtgcccggcagcgagggccctgcccgggccggctctgtggtggctgatgtggtgtttgtgattgagggcacagccaacctgggcccctactttgagggcctgaggaagcactacctgctgcctgccatcgagtacttcaacggcggccccccagctgagacagactttggaggagactatggaggcacccagtacagcctggtggtgttcaacacagtggactgtgcccctgagagctatgtgcagtgccacgcccccaccagcagcgcctatgaatttgtgacctggctggatggcatcaagttcatgggcggcggcggggagagctgcagcctgattgctgagggcctgagcacagccctgcagctgtttgatgacttcaagaagatgagggagcagatcggccagacccaccgggtgtgcctgctgatctgcaacagccccccctacctgctgcctgctgtggagagcaccacctacagcggctgcaccacagagaacctggtgcagcagattggagagcggggcatccacttcagcatcgtgagccccaggaagctgcctgccctgcggctgctgtttgagaaggccgcccccccagccctgctggagcccctgcagcccccaacagatgtgtcccaggaccccaggcacatggtgctggtgcggggcctggtgctgcctgtgggcggcggcagcgcccctggccccctgcagagcaagcagcctgtgcccctgcccccagctgcccccagcggggccaccctgtctgctgccccccagcagcccctgccccctgtgcccccccagtaccaggtgcccggcaacctgtctgctgcccaggtggccgcccagaatgctgtggaggccgccaagaaccagaaggccggcctgggcccccgcttcagccccatcacccccctgcagcaggccgcccctggggtgggcccccccttcagccaggccccagccccagccctgctgcccccaccccaccagggcctgggccagccccagctgggcccccccctgctgcaccccccaccagcccagagctggccagcccagctgcccccccgggcccccctgcccggccagatgctgctgagcggcggcccccggggccctgtgccccagcccggcctgcagcccagcgtgatggaggatgacatcctgatggacctgatctag

SEQ ID NO: 221020 - DNA, 780 bp, Artificial Sequence
  derived and/or modified sequence
atggtgcccggcagcgagggccctgcccgggccggctctgtggtggctgatgtggtgtttgtgattgagggcacagccaacctgggcccctactttgagggcctgaggaagcactacctgctgcctgccatcgagtacttcaacggcggccccccagctgagacagactttggaggagactatggaggcacccagtacagcctggtggtgttcaacacagtggactgtgcccctgagagctatgtgcagtgccacgcccccaccagcagcgcctatgaatttgtgacctggctggatggcatcaagttcatgggcggcggcggggagagctgcagcctgattgctgagggcctgagcacagccctgcagctgtttgatgacttcaagaagatgagggagcagatcggccagacccaccgggtgtgcctgctgatctgcaacagccccccctacctgctgcctgctgtggagagcaccacctacagcggctgcaccacagagaacctggtgcagcagattggagagcggggcatccacttcagcatcgtgagccccaggaagctgcctgccctgcggctgctgtttgagaaggccgcccctggcctggccggggctgctgctgccagtgacagatgtgagcccggccctgaggcccatggagctggcagcggcaccagggctgcctgctggggctggctgagccccaggcctcctcctgtgaaggccgccagccccccagccagcaggaggaccctgcgctgccaggtgcgctgctgctag

SEQ ID NO: 221021 - DNA, 2341 bp, Artificial Sequence
  derived and/or modified sequence
atttctgctcattccgcggcgtcggctgcggctgcagtggtggtggcgggtaccgcacggggtatggtccccgggtccgagggcccggcccgcgccgggagcgtggtggccgacgtggtgtttgtgattgagggtacggccaacctgggaccctacttcgaggggctccgcaagcactacctgctcccggccatcgagtattttaatggtggtcctcctgctgagacggacttcgggggagactatggggggacccagtacagcctcgtggtgttcaacacagtggactgcgctcccgagtcctacgtacaatgtcacgctcccaccagcagcgcctatgagtttgtcacctggctcgatggcattaagttcatgggcgggggtggtgagagctgcagcctcatcgcggaaggactcagcacagccttgcagctgtttgatgacttcaagaagatgcgcgagcagattggccagacgcaccgggtctgcctcctcatctgcaactcacccccatacttgttgcctgctgttgagagcaccacgtactctggatgcacaactgagaatcttgtgcagcagattggggagcgggggatccacttctccattgtgtctccccggaagctgcctgcgcttcggcttctgtttgagaaggcagcccccccggccttgctggagccgctgcagcctccgacagatgtgagccaggacccgaggcacatggtgctggttcggggactcgtgctgcctgttgggggtggctcagccccaggccccctccagtcaaagcagccagtccccctgcctcccgccgcaccctcaggtgccactctctcagcagccccccagcagcctctgccccccgtccccccgcagtaccaggttcccgggaacctgagtgcagctcaggtggccgcgcagaatgcagtggaggctgccaagaaccagaaggctgggctgggccctcgcttctcgcccatcacccctctccaacaagctgctcccggagtgggtccccccttcagccaggccccagctccccaactacccccaggaccccctggcgcccccaagccaccacctgcttcccagcccagtctggtctccactgtggcccctggctccggcctggctcccacggcacagcccggggcaccgtccatggcaggcactgtggccccaggaggggtgagcggcccttccccagcccagctgggagccccagccctcggtgggcagcagtcagtctccaataagcttctggcctggagcggggtcctggagtggcaagagaaacccaaacctgcctcagtggatgccaacaccaagctgacgcggtcactgccctgccaggtctacgtgaatcatggcgagaacctgaagacggagcagtggccccagaagctgatcatgcagctcatcccccagcagctgctgaccaccctgggccctttgttccggaactcaaggatggtccagttccatttcaccaacaaggacctggagtctctcaaaggcctctaccgcatcatgggcaacggcttcgcgggctgcgtgcacttcccccacacggcgccctgtgaggtgcgcgtgctcatgctcctgtactcgtccaagaagaagatcttcatgggcctcatcccctacgaccagagcggcttcgtcaacggcatccggcaggtcatcaccaaccacaagcaggtccagcagcagaagctggagcagcagcagcgaggaatggggggacagcaggcacccccagggctggggcccattctggaggaccaagccaggccctcacagaatctgctccagctccgcccaccgcagccccagcctcagggtaccgtaggggcctctggggccacggggcagccccagccccaaggtactgcccagcccccgccaggtgcccctcaaggccctcctggagcagcttctggcccaccccctcctggacccatccttcggccccagaaccctggggccaaccctcagctgcgaagcctcctcctcaacccaccaccgccgcagactggggtgcccccaccccaggcctccctccaccacctccagccaccaggggctcctgcgctgctgcctccgccgcaccagggcctggggcagccccagttggggcccccactcctgcatccaccacctgcccagtcctggcccgcacaacttccccctcgggctccactgccaggtcagatgctgctgagcgggggtccccggggcccggtcccccagccgggcctgcagcccagcgtcatggaggacgacatcctcatggatctcatctgaatccccaacacccaataaagttcctttttaacac

SEQ ID NO: 221022 - DNA, 2331 bp, Artificial Sequence
  derived and/or modified sequence
atttctgctcattccgcggcgtcggctgcggctgcagtggtggtggcgggtaccgcacggggtatggtccccgggtccgagggcccggcccgcgccgggagcgtggtggccgacgtggtgtttgtgattgagggtacggccaacctgggaccctacttcgaggggctccgcaagcactacctgctcccggccatcgagtattttaatggtggtcctcctgctgagacggacttcgggggagactatggggggacccagtacagcctcgtggtgttcaacacagtggactgcgctcccgagtcctacgtacaatgtcacgctcccaccagcagcgcctatgagtttgtcacctggctcgatggcattaagttcatgggcgggggtggtgagagctgcagcctcatcgcggaaggactcagcacagccttgcagctgtttgatgacttcaagaagatgcgcgagcagattggccagacgcaccgggtctgcctcctcatctgcaactcacccccatacttgttgcctgctgttgagagcaccacgtactctggatgcacaactgagaatcttgtgcagcagattggggagcgggggatccacttctccattgtgtctccccggaagctgcctgcgcttcggcttctgtttgagaaggcagcccccccggccttgctggagccgctgcagcctccgacagatgtgagccaggacccgaggcacatggtgctggttcggggactcgtgctgcctgttgggggtggctcagccccaggccccctccagtcaaagcagccagtccccctgcctcccgccgcaccctcaggtgccactctctcagcagccccccagcagcctctgccccccgtccccccgcagtaccaggttcccgggaacctgagtgcagctcaggtggccgcgcagaatgcagtggaggctgccaagaaccagaaggctgggctgggccctcgcttctcgcccatcacccctctccaacaagctgctcccggagtgggtccccccttcagccaggccccagctccccaactacccccaggaccccctggcgcccccaagccaccacctgcttcccagcccagtctggtctccactgtggcccctggctccggcctggctcccacggcacagcccggggcaccgtccatggcaggcactgtggccccaggaggggtgagcggcccttccccagcccagctgggagccccagccctcggtgggcagcagtcagtctccaataagcttctggcctggagcggggtcctggagtggcaagagaaacccaaacctgcctcagtggatgccaacaccaagctgacgcggtcactgccctgccaggtctacgtgaatcatggcgagaacctgaagacggagcagtggccccagaagctgatcatgcagctcatcccccagcagctgctgaccaccctgggccctttgttccggaactcaaggatggtccagttccatttcaccaacaaggacctggagtctctcaaaggcctctaccgcatcatgggcaacggcttcgcgggctgcgtgcacttcccccacacggcgccctgtgaggtgcgcgtgctcatgctcctgtactcgtccaagaagaagatcttcatgggcctcatcccctacgaccagagcggcttcgtcaacggcatccggcaggtcatcaccaaccacaagcaggtccagcagcagaagctggagcagcagcagcgaggaatggggggacagcaggcacccccagggctggggcccattctggaggaccaagccaggccctcacagaatctgctccagctccgcccaccgcagccccagcctcagggtaccgtaggggcctctggggccacggggcagccccagccccaaggtactgcccagcccccgccaggtgcccctcaaggccctcctggagcagcttctggcccaccccctcctggacccatccttcggccccagaaccctggggccaaccctcagctgcgaagcctcctcctcaacccaccaccgccgcagactggggtgcccccaccccaggcctccctccaccaccacctgcccagtcctggcccgcacaacttccccctcgggctccactgccaggtaaggggacccgggggagggcagaggtctggactgagtgtcccagcagctcctgggctagagcaccaagaccgagtgctcctgggaagtaaagacataggatccaagaatgagggttcccccatccgggcctgcagcccagcgtcatggaggacgacatcctcatggatctcatctgaatccccaacacccaataaagttcctttttaa

SEQ ID NO: 221023 - DNA, 1467 bp, Artificial Sequence
  derived and/or modified sequence
atggtccccgggtccgagggcccggcccgcgccgggagcgtggtggccgacgtggtgtttgtgattgagggtacggccaacctgggaccctacttcgaggggctccgcaagcactacctgctcccggccatcgagtattttaatggtggtcctcctgcccccttcagccaggccccagctccccaactacccccaggaccccctggcgcccccaagccaccacctgcttcccagcccagtctggtctccactgtggcccctggctccggcctggctcccacggcacagcccggggcaccgtccatggcaggcactgtggccccaggaggggtgagcggcccttccccagcccagctgggagccccagccctcggtgggcagcagtcagtctccaataagcttctggcctggagcggggtcctggagtggcaagagaaacccaaacctgcctcagtggatgccaacaccaagctgacgcggtcactgccctgccaggtctacgtgaatcatggcgagaacctgaagacggagcagtggccccagaagctgatcatgcagctcatcccccagcagctgctgaccaccctgggccctttgttccggaactcaaggatggtccagttccatttcaccaacaaggacctggagtctctcaaaggcctctaccgcatcatgggcaacggcttcgcgggctgcgtgcacttcccccacacggcgccctgtgaggtgcgcgtgctcatgctcctgtactcgtccaagaagaagatcttcatgggcctcatcccctacgaccagagcggcttcgtcaacggcatccggcaggtcatcaccaaccacaagcaggtccagcagcagaagctggagcagcagcagcgaggaatggggggacagcaggcacccccagggctggggcccattctggaggaccaagccaggccctcacagaatctgctccagctccgcccaccgcagccccagcctcagggtaccgtaggggcctctggggccacggggcagccccagccccaaggtactgcccagcccccgccaggtgcccctcaaggccctcctggagcagcttctggcccaccccctcctggacccatccttcggccccagaaccctggggccaaccctcagctgcgaagcctcctcctcaacccaccaccgccgcagactggggtgcccccaccccaggcctccctccaccacctccagccaccaggggctcctgcgctgctgcctccgccgcaccagggcctggggcagccccagttggggcccccactcctgcatccaccacctgcccagtcctggcccgcacaacttccccctcgggctccactgccaggtcagatgctgctgagcgggggtccccggggcccggtcccccagccgggcctgcagcccagcgtcatggaggacgacatcctcatggatctcatctgaatccccaacacccaataa

SEQ ID NO: 221024 - DNA, 2448 bp, Artificial Sequence
  derived and/or modified sequence
atttctgctcattccgcggcgtcggctgcggctgcagtggtggtggcgggtaccgcacggggtatggtccccgggtccgagggcccggcccgcgccgggagcgtggtggccgacgtggtgtttgtgattgagggtacggccaacctgggaccctacttcgaggggctccgcaagcactacctgctcccggccatcgagtattttaatggtggtcctcctgctgagacggacttcgggggagactatggggggacccagtacagcctcgtggtgttcaacacagtggactgcgctcccgagtcctacgtacaatgtcacgctcccaccagcagcgcctatgagtttgtcacctggctcgatggcattaagttcatgggcgggggtggtgagagctgcagcctcatcgcggaaggactcagcacagccttgcagctgtttgatgacttcaagaagatgcgcgagcagattggccagacgcaccgggtctgcctcctcatctgcaactcacccccatacttgttgcctgctgttgagagcaccacgtactctggatgcacaactgagaatcttgtgcagcagattggggagcgggggatccacttctccattgtgtctccccggaagctgcctgcgcttcggcttctgtttgagaaggcagcccccccggccttgctggagccgctgcagcctccgacagatgtgagccaggacccgaggcacatggtgctggttcggggactcgtgctgcctgttgggggtggctcagccccaggccccctccagtcaaagcagccagtccccctgcctcccgccgcaccctcaggtgccactctctcagcagccccccagcagcctctgccccccgtccccccgcagtaccaggttcccgggaacctgagtgcagctcaggtggccgcgcagaatgcagtggaggctgccaagaaccagaaggctgggctgggccctcgcttctcgcccatcacccctctccaacaagctgctcccggagtgggtccccccttcagccaggccccagctccccaactacccccaggaccccctggcgcccccaagccaccacctgcttcccagcccagtctggtctccactgtggcccctggctccggcctggctcccacggcacagcccggggcaccgtccatggcaggcactgtggccccaggaggggtgagcggcccttccccagcccagctgggagccccagccctcggtgggcagcagtcagtctccaataagcttctggcctggagcggggtcctggagtggcaagagaaacccaaacctgcctcagtggatgccaacaccaagctgacgcggtcactgccctgccaggtctacgtgaatcatggcgagaacctgaagacggagcagtggccccagaagctgatcatgcagctcatcccccagcagctgctgaccaccctgggccctttgttccggaactcaaggatggtccagttccatttcaccaacaaggacctggagtctctcaaaggcctctaccgcatcatgggcaacggcttcgcgggctgcgtgcacttcccccacacggcgccctgtgaggtgcgcgtgctcatgctcctgtactcgtccaagaagaagatcttcatgggcctcatcccctacgaccagagcggcttcgtcaacggcatccggcaggtcatcaccaaccacaagcaggtccagcagcagaagctggagcagcagcagcgaggaatggggggacagcaggcacccccagggctggggcccattctggaggaccaagccaggccctcacagaatctgctccagctccgcccaccgcagccccagcctcagggtaccgtaggggcctctggggccacggggcagccccagccccaaggtactgcccagcccccgccaggtgcccctcaaggccctcctggagcagcttctggcccaccccctcctggacccatccttcggccccagaaccctggggccaaccctcagctgcgaagcctcctcctcaacccaccaccgccgcagactggggtgcccccaccccaggcctccctccaccacctccagccaccaggggctcctgcgctgctgcctccgccgcaccagggcctggggcagccccagttggggcccccactcctgcatccaccacctgatggggccagaaggtcagatgctgctgagcgggggtccccggggcccggtcgttcgccacagtccccaccactccctcttggcttccctgtgaggcagagagtcactgccttccatgtctctatcacaagcggcaaaacgaaagagagaaggagagggccgtgtgtttcgagaaaaatgggagcgagcctatttctttgtggaagtgaagagcatgcctatgtgtttaatatgcaaacaaatcgtgtctgtgttgaaagaatacaacctgaaacgccactatga

SEQ ID NO: 221025 - DNA, 2710 bp, Artificial Sequence
  derived and/or modified sequence
attccgcggcgtcggctgcggctgcagtggtggtggcgggtaccgcacggggtatggtccccgggtccgagggcccggcccgcgccgggagcgtggtggccgacgtggtgtttgtgattgagggtacggccaacctgggaccctacttcgaggggctccgcaagcactacctgctcccggccatcgagtattttaatggtggtcctcctgctgagacggacttcgggggagactatggggggacccagtacagcctcgtggtgttcaacacagtggactgcgctcccgagtcctacgtacaatgtcacgctcccaccagcagcgcctatgagtttgtcacctggctcgatggcattaagttcatgggcgggggtggtgagagctgcagcctcatcgcggaaggactcagcacagccttgcagctgtttgatgacttcaagaagatgcgcgagcagattggccagacgcaccgggtctgcctcctcatctgcaactcacccccatacttgttgcctgctgttgagagcaccacgtactctggatgcacaactgagaatcttgtgcagcagattggggagcgggggatccacttctccattgtgtctccccggaagctgcctgcgcttcggcttctgtttgagaaggcagcccccccggccttgctggagccgctgcagcctccgacagatgtgagccaggacccgaggcacatggtgctggttcggggactcgtgctgcctgttgggggtggctcagccccaggccccctccagtcaaagcagccagtccccctgcctcccgccgcaccctcaggtgccactctctcagcagccccccagcagcctctgccccccgtccccccgcagtaccaggttcccgggaacctgagtgcagctcaggtggccgcgcagaatgcagtggaggctgccaagaaccagaaggctgggctgggccctcgcttctcgcccatcacccctctccaacaagctgctcccggagtgggtccccccttcagccaggccccagctccccaactacccccaggaccccctggcgcccccaagccaccacctgcttcccagcccagtctggtctccactgtggcccctggctccggcctggctcccacggcacagcccggggcaccgtccatggcaggcactgtggccccaggaggggtgagcggcccttccccagcccagctgggagccccagccctcggtgggcagcagtcagtctccaataagcttctggcctggagcggggtcctggagtggcaagagaaacccaaacctgcctcagtggatgccaacaccaagctgacgcggtcactgccctgccaggtctacgtgaatcatggcgagaacctgaagacggagcagtggccccagaagctgatcatgcagctcatcccccagcagctgctgaccaccctgggccctttgttccggaactcaaggatggtccagttccatttcaccaacaaggacctggagtctctcaaaggcctctaccgcatcatgggcaacggcttcgcgggctgcgtgcacttcccccacacggcgccctgtgaggtgcgcgtgctcatgctcctgtactcgtccaagaagaagatcttcatgggcctcatcccctacgaccagagcggcttcgtcaacggcatccggcaggtcatcaccaaccacaagcaggtccagcagcagaagctggagcagcagcagcgaggaatggggggacagcaggcacccccagggctggggcccattctggaggaccaagccaggccctcacagaatctgctccagctccgcccaccgcagccccagcccccgccaggtgcccctcaaggccctcctggagcagcttctggcccaccccctcctggacccatccttcggccccagaaccctggggccaaccctcagctgcgaagcctcctcctcaacccaccaccgccgcagactggggtgcccccaccccaggcctccctccaccacctccagccaccaggggctcctgcgctgctgcctccgccgcaccagggcctggggcagccccagttggggcccccactcctgcatccaccacctgcccagtcctggcccgcacaacttccccctcgggctccactgccaggtaaggggacccgggggagggcagaggtctggactgagtgtcccagcagctcctgggctagagcaccaagaccgagtgctcctgggaagtaaagacataggatccaagaatgagggttcccccatggcctttgcggagctctgagggctccgggaaagtacagcccatgggtccaaggacctagtgggttaagagcgtttcccatgatcctcctgtgtgtgctcctgggattgctgggaaatgtggtcttagggccagagaagtagttttggagaagggcccccaaaggctcatgggaaacagcatatttgtaactagatggggccagaaggtgcttctgttgggtcccccaagggctgcctagaaaacttagtgcctctgggccctcctgggcccaagggcctactgggagatgcagtcccttccccactgcccctcaggtcagatgctgctgagcgggggtccccggggcccggtcccccagccgggcctgcagcccagcgtcatggaggacgacatcctcatggatctcatctgaatccccaacacccaataaagttcctttttaacacac

SEQ ID NO: 221026 - DNA, 3332 bp, Artificial Sequence
  derived and/or modified sequence
ggtggcatcgctccagggtcttcctccatcccgcagctgtcttccctctgtgtgtgtctccacatggcattctctctgtatctttgtgtctgtgcttataaggacatcagtaattttggattaggccccattttcctgacctcatcttactacaattgcaaagaccctctttccagatagagtcaccttcacaggtgctggggactggaacctcagcttagctttctggttttgttttttgagacagagtttcactgttgtcagccaggctggagtgcagtggtgcaatcttggctcacagcaacttccgtctcctgggttcaagcgattctcctgcctcagcctcccaagtagctgggattacaggcatgtgccactatgcccagctaatttctgtattttttagtagagacagggtttcaccatgttggccaggttggtctcgaacttctgacctcaagtgatctgcctgcctcggcctcccaaagtgctaggattaccggtgtgagccaccgcgcccagcctcagcatagctttctgggagtcacagttcacactttgtaactcggggaaggagcagatcagttacttccgtgcaccaggcactcctgcaggaaagagaaccttagggggatcacctcacgagaccctcacagaaccttgtgaagaaggcattcctgagagttagtacttccggctgcaaatcacgtagtttcccaaacacatagataattgggggcactcggaaaaaatgttctcttatgattctgtgggtcacctgggctcagtgggccatctcgcttggcgactctcacggggttgccatcagatggcagctgagactctggtcatctgaaacctttactgggctggatgttcaaaacagctcctcacacagccctggctgttggctggggcttggctaggaccggccatcccagtgtctgcacatggcctgtccacgtggccacactgtggcagctgggttctgagagggcaggcgttgtaggagcaggcatttatattttgcacaggacaggacatctagagggggccagctattgggattggtttcataggtctgtgacatcagggacagggccctgtggttctcttggcctctcctttatagtcacaaggtagctctcatggctccacgcatcctgtgtgctttcatgaaggaggggaagggggctgtgtgtttccctttcttcaagacagcagaaactttctcagattccagagcaggcattcctttcacctcctatcccggacctaggccactgggcagcccctagttgatgggaggctgctgggagcaggtatccgtgactgtctggggctgggacatgttacagccccagacagcattgggaatgcaggggaggaggacacttggatatggaataggcagctagcagggtctgtctcaggcaggaaaccgaggctcagagaagtcaattcacttggccaaggtcagcctcgcctccctcaggagcccctgccctgaatgctccatgtgttacccccctgatgaccagtgatgtttcctgggtgcttcctgtgggctgagcctcaggcagggctcttgctgtggatcagacatcgcatagtcacagcgaccctgtgatgtgggagcactccccgtggtgtacactggccggtgctgagggctggaggatctcttggatacccggggtccgacccaccgttgatcacaggcctgtgggtaccacgctgtgcatctaggccgctctcccggccgtgaccctcagccgccctctgaggaggccgccgtggcattttatgcccaagaaactgggtccatgaggagcaggtggtggctgaaggttgaagagctgggctccagcactttctctccgctttccctctcagtgggcagctggaaccctagcttgccctgagcgcctcagtttctgtctccagagcaacccatagcacacctgttctccttaaccttctatagcagaaacctcacctcaccttgcctgtggggcctctagagccttctggaatggggagggggtcagggctgcctctttcagggcctgaatggttctgaagagctgttgtccacccaggcgggctgcgtgcacttcccccacacggcgccctgtgaggtgcgcgtgctcatgctcctgtactcgtccaagaagaagatcttcatgggcctcatcccctacgaccagagcggcttcgtcaacggcatccggcaggtcatcaccaaccacaagcaggtccagcagcagaagctggagcagcagcagcgaggaatggggggacagcaggcacccccagggctggggcccattctggaggaccaagccaggccctcacagaatctgctccagctccgcccaccgcagccccagcctcagggtaccgtaggggcctctggggccacggggcagccccagccccaaggtactgcccagcccccgccaggtgcccctcaaggccctcctggagcagcttctggcccaccccctcctggacccatcttcggccccagaaccctggggccaaccctcagctgcgaagcctcctcctcaacccaccaccgccgcagactggggtgcccccaccccaggcctccctccaccacctccagccaccaggggctcctgcgctgctgcctccgccgccagggcctggggcagccccagttggggccccactcctgcatccaccacctgcccagtcctggcccgcacaacttccccctcgggctccactgccaggtaaggggacccgggggagggcagaggtctggactgagtgtcccagcagctcctgggctagagcaccaagaccgagtgctcctgggaagtaaagacataggatccaagaatgagggttcccccatggcctttgcggagctctgagggctccgggaaagtacagcccatgggtccaaggacctagtgggttaagagcgtttcccatgatcctcctgtgtgtgctcctgggattgctgggaaatgtggtcttagggccagagaagtagttttggagaagggcccccaaaggctcatgggaaacagcatatttgtaactagatggggccagaaggtgcttctgttgggtcccccaagggctgcctagaaaacttagtgcctctgggccctcctgggcccaagggcctactgggagatgcagtcccttccccactgcccctcaggtcagatgctgctgagcgggggtccccggggcccggtcccccagccgggcctgcagcccagcgtcatggaggacgacatcctcatggatctcatctgaatccccaacacccaataaagttcctttttaac

SEQ ID NO: 221027 - DNA, 1623 bp, Artificial Sequence
  derived and/or modified sequence
atggtccccgggtccgagggcccggcccgcgccgggagcgtggtggccgacgtggtgtttgtgattgagggtacggccaacctgggaccctacttcgaggggctccgcaagcactacctgctcccggccatcgagtattttaatggtggtcctcctgctgagacggacttcgggggagacgttcccgggaacctgagtgcagctcaggtggccgcgcagaatgcagtggaggctgccaagaaccagaaggctgggctgggccctcgcttctcgcccatcacccctctccaacaagctgctcccggagtgggtccccccttcagccaggccccagctccccaactacccccaggaccccctggcgcccccaagccaccacctgcttcccagcccagtctggtctccactgtggcccctggctccggcctggctcccacggcacagcccggggcaccgtccatggcaggcactgtggccccaggaggggtgagcggcccttccccagcccagctgggagccccagccctcggtgggcagcagtcagtctccaataagcttctggcctggagcggggtcctggagtggcaagagaaacccaaacctgcctcagtggatgccaacaccaagctgacgcggtcactgccctgccaggtctacgtgaatcatggcgagaacctgaagacggagcagtggccccagaagctgatcatgcagctcatcccccagcagctgctgaccaccctgggccctttgttccggaactcaaggatggtccagttccatttcaccaacaaggacctggagtctctcaaaggcctctaccgcatcatgggcaacggcttcgcgggctgcgtgcacttcccccacacggcgccctgtgaggtgcgcgtgctcatgctcctgtactcgtccaagaagaagatcttcatgggcctcatcccctacgaccagagcggcttcgtcaacggcatccggcaggtcatcaccaaccacaagcaggtccagcagcagaagctggagcagcagcagcgaggaatggggggacagcaggcacccccagggctggggcccattctggaggaccaagccaggccctcacagaatctgctccagctccgcccaccgcagccccagcctcagggtaccgtaggggcctctggggccacggggcagccccagccccaaggtactgcccagcccccgccaggtgcccctcaaggccctcctggagcagcttctggcccaccccctcctggacccatccttcggccccagaaccctggggccaaccctcagctgcgaagcctcctcctcaacccaccaccgccgcagactggggtgcccccaccccaggcctccctccaccacctccagccaccaggggctcctgcgctgctgcctccgccgcaccagggcctggggcagccccagttggggcccccactcctgcatccaccacctgcccagtcctggcccgcacaacttccccctcgggctccactgccaggtcagatgctgctgagcgggggtccccggggcccggtcccccagccgggcctgcagcccagcgtcatggaggacgacatcctcatggatctcatctgaatccccaacacccaataa

SEQ ID NO: 221028 - DNA, 1212 bp, Artificial Sequence
  derived and/or modified sequence
atggtccccgggtccgagggcccggcccgcgccgggagcgtggtggccgacgtggtgtttgtgattgagggtacggccaacctgggaccctacttcgaggggctccgcaagcactacctgctcccggccatcgagtattttaatggtggtcctcctgctgagacggacttcgggggagactatggggggacccagtacagcctcgtggtgttcaacacagtggactgcgctcccgagtcctacgtacaatgtcacgctcccaccagcagcgcctatgagtttgtcacctggctcgatggcattaagttcatgggcgggggtggtgagagctgcagcctcatcgcggaaggactcagcacagccttgcagctgtttgatgacttcaagaagatgcgcgagcagattggccagacgcaccgggtctgcctcctcatctgcaactcacccccatacttgttgcctgctgttgagagcaccacgtactctggatgcacaactgagaatcttgtgcagcagattggggagcgggggatccacttctccattgtgtctccccggaagctgcctgcgcttcggcttctgtttgagaaggcagcccccccggccttgctggagccgctgcagcctccgacagatgtgagccaggacccgaggcacatggtgctggttcggggactcgtgctgcctgttgggggtggctcagccccaggccccctccagtcaaagcagccagtccccctgcctcccgccgcaccctcaggtgccactctctcagcagccccccagcagcctctgccccccgtccccccgcagtaccaggttcccgggaacctgagtgcagctcaggtggccgcgcagaatgcagtggaggctgccaagaaccagaaggctgggctgggccctcgcttctcgcccatcacccctctccaacaagctgctcccggagtgggtccccccttcagccaggccccagctcctgcgctgctgcctccgccgcaccagggcctggggcagccccagttggggcccccactcctgcatccaccacctgcccagtcctggcccgcacaacttccccctcgggctccactgccaggtcagatgctgctgagcgggggtccccggggcccggtcccccagccgggcctgcagcccagcgtcatggaggacgacatcctcatggatctcatctgaatccccaacacccaataa

SEQ ID NO: 221029 - DNA, 881 bp, Artificial Sequence
  derived and/or modified sequence
atggtccccgggtccgagggcccggcccgcgccgggagcgtggtggccgacgtggtgtttgtgattgagggtacggccaacctgggaccctacttcgaggggctccgcaagcactacctgctcccggccatcgagtattttaatggtggtcctcctgctgagacggacttcgggggagactatggggggacccagtacagcctcgtggtgttcaacacagtggactgcgctcccgagtcctacgtacaatgtcacgctcccaccagcagcgcctatgagtttgtcacctggctcgatggcattaagttcatgggcgggggtggtgagagctgcagcctcatcgcggaaggactcagcacagccttgcagctgtttgatgacttcaagaagatgcgcgagcagattggccagacgcaccgggtctgcctcctcatctgcaactcacccccatacttgttgcctgctgttgagagcaccacgtactctggatgcacaactgagaatcttgtgcagcagattggggagcgggggatccacttctccattgtgtctccccggaagctgcctgcgcttcggcttctgtttgagaaggcagcccccggccttgctggagccgctgcagcctccgacagatgtgagccaggacccgaggcacatggtgctggttcggggactcgtgctgcctgttgggggtggctcagccccaggccccctccagtcaaagcagccagtccccctgcctcccgccgcaccctcaggtgccaggtcagatgctgctgagcgggggtccccggggcccggtcccccagccgggcctgcagcccagcgtcatggaggacgacatcctcatggatctcatctgaatccccaacacccaataa

SEQ ID NO: 221030 - DNA, 2244 bp, Artificial Sequence
  derived and/or modified sequence
atggtgcccggcagcgagggccccgcccgggccggcagcgtggtggcagatgtagttttcgtgattgaggggactgccaatctgggtccttactttgagggtctgcgtaaacactatctgctgcctgccatagagtatttcaatgggggacctccagccgagacagactttggtggcgattacgggggaacgcagtattccctggtggtgttcaacacagtagactgcgcccccgaatcgtacgtccagtgtcatgccccaacatcttcagcctatgaattcgtgacctggctggacggtattaaattcatgggcggcggaggcgaatcatgctcgttgatagccgagggccttagcacagcactccaattgttcgacgacttcaagaaaatgcgcgaacaaattgggcaaacccatagagtgtgcctactgatctgcaacagccccccctatctgcttcccgcggtcgagtctaccacttattcgggctgcaccacagagaacctggtgcagcagattggtgagcgaggaattcacttttcgattgtgtcaccacgaaagctgcctgcgcttcgcctccttttcgaaaaggccgcaccccctgcgctcttggaacccttgcagccacccaccgacgtgtcccaggatcctaggcatatggtcctcgtccgagggcttgtcctgcctgtggggggcggcagcgcccccggcccacttcagtccaagcagccggtgccactacctccagccgccccctccggagccaccttgtctgccgctccgcaacagccactgccaccggtccccccgcagtatcaggtccctggtaatcttagtgcagcccaggttgccgcgcagaacgccgtggaggccgctaagaatcagaaagccggtcttggaccgagattcagtcccataaccccgcttcagcaggcagcacccggtgtggggccccctttttctcaagcccctgcgccacagctgccacccggaccaccgggagccccaaaaccccctcccgccagccagccatcgctggtgagtaccgtggcccccggtagcggccttgctcctaccgcccagccaggggcgccgtccatggccggaactgttgcccccgggggcgtgagcggtccatcacccgcgcagctaggtgcacccgcactgggtggtcaacagtcagtgtcaaataagctgctggcttggtcaggggtcctcgagtggcaagaaaagccaaaacctgccagcgtggatgccaacactaagttgactcggagcttaccttgtcaggtgtacgtgaaccatggtgagaacctgaagaccgaacaatggccgcagaagcttattatgcagctgattccccaacagctgctcacaacgctcgggcctctgttcaggaattcaaggatggtgcagtttcactttaccaataaagaccttgaatctctgaagggactctacagaattatggggaatggctttgcgggttgtgtgcactttccacataccgccccatgcgaggtcagggtactgatgctcttgtattccagcaagaagaaaatctttatgggactgattccgtacgatcagtccggttttgtgaacggcattaggcaggtaatcactaatcacaagcaagttcagcagcaaaagctggagcaacaacagaggggaatgggcggccagcaggctcctcctggcctcggccccattttagaagaccaggccagaccaagtcagaacctcctccaactgaggcccccccagcctcagccacaaggaacagttggcgccagcggagccaccggacagccacaaccccaggggactgcacagcccccccctggcgccccccagggccctccaggagccgcaagcgggccacctcccccgggtccaatcctaagacctcagaatcctggggcaaacccgcagctcaggtcgctgctgttgaatccacctcccccacagacaggtgtcccccccccacaggcatcactgcaccacctgcagcccccaggagcccctgccttgttgcccccccctcaccagggtctgggccagcctcaactgggccctccgctgctgcacccaccccccgcccagtcctggcctgcccagcttccaccgagggcacccctgccagggcagatgctgttaagcggtggcccccgcgggcccgtcccacagccgggcctgcagccaagtgttatggaagatgacattttgatggatttgatctag

SEQ ID NO: 221031 - DNA, 2268 bp, Artificial Sequence
  derived and/or modified sequence
atggtgcccggcagcgagggccccgcccgggccggcagcgtggtggctgacgtcgtgtttgtgatcgaaggtacagctaatcttggcccatacttcgagggcctacggaagcactatctactcccagctattgagtactttaacggaggaccccctgcagagactgattttggcggtgattatggaggcacgcagtattcacttgtcgtttttaacactgtggactgtgcgcccgaatcttacgtacaatgtcacgctcccacatccagtgcatatgagtttgtaacctggctcgacggcatcaaatttatgggcggcggcggcgagagctgctccctcatcgccgagggcctcagtaccgcactgcagttatttgacgattttaaaaaaatgagggagcagatcgggcaaacacaccgggtgtgcctgctcatctgtaactctccaccctatctcttgccggcggtcgaatccaccacctactccggttgcaccaccgagaatctggtacagcaaataggggagcgggggatccacttttcaatcgtgtccccaagaaagttgcccgctttgcgcctattatttgaaaaggcggccccccccgcactcttggaacccttacaaccacccacggacgtgtcacaagaccctcgacacatggttctggtccgcggactcgtgctgccggtgggcggcggcagcgccccagggccgctgcagagcaaacaacccgtccccctgccacctgccgctccctccggagcaacactaagtgctgctcctcaacagcctttaccacctgtcccacctcagtaccaggtaccaggaaatctctctgctgcccaggtcgcggcccaaaatgcagtggaagctgcgaaaaatcagaaggccggactgggcccccggttcagccctatcacacccctgcaacaggctgccccaggagttggcccccctttctcccaggcgcctgcaccccagctgccacctggccctccaggtgcgccaaaaccaccacccgcaagccagccgtcactggtctctaccgtcgcccccggcagtggcctcgcaccaacagcgcagccgggggctccctcaatggccggaactgtggcgccaggaggcgtatccggcccctcccctgctcagctaggagcaccggcgctcgggggacagcaatccgttagtaataaactgttggcctggagcggcgtgctggagtggcaagagaaaccaaagcctgcatctgtggatgcaaacacgaagcttacaaggagcttgccctgtcaggtgtatgtgaaccacggtgaaaatctaaagaccgaacagtggcctcagaagctaatcatgcaacttattcctcagcagctccttaccacattgggaccactctttaggaactcaagaatggtgcagtttcactttactaataaagatctggagtccctaaaggggctgtacagaatcatgggcaacgggttcgcaggatgtgtgcacttcccccatacagcaccctgtgaggtgagagtgcttatgctcctgtacagctcgaaaaagaagatctttatggggctcatcccttacgatcaatccggtttcgtgaatggcatccgtcaagtgattaccaatcataagcaggtacaacagcagaaactggagcagcagcagagaggaatgggaggacaacaggctcctccgggactgggccctatcctggaagaccaagccagaccaagccagaatctgctgcagctgcgaccacctcagccccagccgcaagggacggtcggcgccagcggggcaaccggccaaccgcagccacaggggaccgcacagccacctcccggggctcctcagggaccgcctggagctgctagcgggcctccccctccaggacctattctgaggccccagaatccaggggctaacccccagcttagatccctcctgcttaaccccccgccaccccagacaggcgtcccaccgccacaagcctcgctccaccaccatctgccatccccaggccctcacaattttcctctgggactacattgccaggtgcggggaccaggcgggggccagcgatccgggctctcggtgcccgccgcccccggcctcgagcatcaagaccgagtcctgctcgggtctaaggacatcgggtctaagaatgagggatccccgataagagcctgcagtccagccagttggagaaccacatcctcctggatttctagcgaatccccaacacccaacaaggtaccattctag

SEQ ID NO: 221032 - DNA, 1449 bp, Artificial Sequence
  derived and/or modified sequence
atggtgcccggcagcgagggccccgcccgggccggcagcgtggtggccgacgtggtgtttgttattgaggggactgccaatctagggccgtatttcgaaggactgaggaagcattatcttctccccgcaatcgagtattttaatggaggcccaccagcaccattcagtcaggctccagctccacagctgcctcctggacctcctggggcccctaagccccctcccgcttcccagccttctttagtgagtacggtggctcccggcagcgggttagcccctactgcccagccgggagcacctagcatggccgggactgtggccccaggcggtgtgtcaggaccctctcctgcacagctgggggcgcctgccctgggtggacaacagtccgtgagtaataagctcctggcttggtccggggtgttagaatggcaggagaaacctaagccagcctccgtggatgccaataccaaactcaccaggagcctcccctgccaagtgtatgttaaccacggggagaatttaaagaccgagcagtggccccaaaagctgataatgcaactgataccccagcagctcttgacaacgcttggcccattgtttagaaactcgcgtatggtacagtttcacttcaccaataaggacctggaatcgctgaagggactttacaggattatgggcaatgggttcgcagggtgcgtacatttccctcacacggccccttgcgaggtgagagtactgatgctgctgtactctagcaagaagaaaatctttatgggactcattccctacgaccagtccggttttgttaatggtatccgccaagtaattacgaatcacaagcaggtccaacaacaaaagcttgagcagcaacagagaggcatgggcggtcagcaagccccacctggtctgggccccatcctcgaggatcaggcaaggccttctcaaaacctgctgcagctgcggccaccccagccccaaccacaggggaccgtcggtgccagtggtgccactggccagccccaaccacaaggcacggcccagcccccccccggcgcaccccagggtccacctggggcggcctccgggcctccgccacccggacctatcctgaggccccagaacccaggggccaaccctcagctgagatctcttcttctgaatcctccgcctccccaaactggcgtccccccgccccaggccagccttcaccatctgcagccacccggagcacctgcactgcttcccccacctcatcaggggttaggtcagcctcagctcggaccacccctacttcatcccccccctgcgcagtcttggcccgcccaacttccaccccgcgctcccctccccggacagatgctcctgagcggtggccctagaggccctgtcccgcagcccggactccagccttccgtgatggaagacgatatcctgatggacctaatatag

SEQ ID NO: 221033 - DNA, 2385 bp, Artificial Sequence
  derived and/or modified sequence
atggtgcccggcagcgagggccccgcccgggccggcagcgtggtggccgacgtcgtctttgtcatcgagggtacagccaacttgggaccgtatttcgaaggtctgcgcaaacactatctgttgcctgccattgaatacttcaacggtggccccccagccgaaacagacttcggtggcgactacggaggtacccaatatagcttagtggttttcaacactgtcgactgtgctcctgaatcatatgtgcagtgccacgctcctacatcatctgcatatgaatttgtgacctggttagatggtataaaattcatgggaggtggcggagagtcatgctccttaatagcagagggtctgtctaccgccctgcagctttttgatgattttaaaaagatgagagaacagatcgggcaaacacatagagtttgtcttctcatctgtaactcaccaccctatctgctgcccgcagtggagagtaccacctactctggctgcactacggaaaacctagttcagcagattggggagcgcgggatccatttttccatagttagcccccggaaactgccagccctcaggctgctcttcgaaaaggccgcaccacctgcactgctggagcctttgcagccccccaccgacgtgagtcaggaccccagacatatggtcctagtcagggggcttgtgctccctgtgggagggggctcagcccctggaccactgcagtcgaagcaacccgtacctcttccccctgctgcccccagtggggcaacactcagtgcagcaccacagcagccattgccacccgtaccaccccagtaccaggttccagggaacttaagtgccgcacaggtggcggctcaaaatgcagtcgaggccgcaaaaaaccagaaggccggattagggcctaggttcagtccaataactcctcttcaacaggctgcacctggagtggggcctcctttttcccaggcccctgcgcctcagctgccgccagggcctcctggtgccccgaaacccccccctgcgtctcagccctcattggtttccactgtggctccgggcagcggtctagccccaactgctcaaccaggcgccccctctatggcggggaccgtcgcccccggtggagtgtctggaccttctcctgctcaattgggagcgcccgcactggggggacagcagtccgtgtctaataagcttctcgcctggtccggagtattagagtggcaagagaaaccaaagcctgccagcgtagatgcaaacacaaaactaacaagatcgttgccttgccaggtgtatgtcaatcacggtgagaacctgaaaaccgagcagtggccccaaaaattgattatgcagttaatccctcagcagctgttgactactttgggtccactcttcaggaactctaggatggtccagttccacttcaccaataaagatctggaaagtctgaaaggattatataggatcatggggaatgggtttgccgggtgtgtgcacttccctcatactgcgccgtgcgaggtccgtgttctgatgctactctacagtagcaaaaagaagatctttatggggttgataccatatgaccagtcagggttcgtaaatgggatccgccaggtcatcacaaaccacaagcaggtgcaacaacaaaagcttgagcagcagcaaagggggatgggcggccagcaagcccccccgggtcttgggcccatcctggaggaccaagcccggcctagtcagaacctgttgcagctgaggcctccgcaaccccagcctcagggaacagttggcgcctctggagctacgggccagccccagcctcaagggactgcacagcctccacctggagctccacagggcccaccaggtgcagcctctgggccccccccaccagggccaatcctgcggccacaaaaccctggagccaatccacaactacgcagtctattgctcaatccgcccccgcctcagacgggagttcctcctccgcaggccagcctacaccacctgcagccacctggtgcgcctgcacttctgcccccaccgcatcagggcctggggcagccccagctcggccctcctctactgcatccaccccctgatggcgctagaagatccgatgctgccgagagggggagtcccgggcctggaagaagcccccagtcgccgcccttacccctggggttccccgttcgtcaaagggttactgctttccatgtgtccatcacgtctggcaaaacaaaagagcggaggcgcggaccctgcgtcagcagaaagatgggagcgtcactcttcctctgcgggtccgaggaacatgcctacgtgttcaacatgcagaccaatcgcgtgtgtgtggaaagaatccagccagaaaccccactctag

SEQ ID NO: 221034 - DNA, 2175 bp, Artificial Sequence
  derived and/or modified sequence
atggtgcccggcagcgagggccccgcccgggccggcagcgtggtggctgacgttgttttcgtgatcgagggtactgctaacttgggaccctacttcgaaggactgcgcaagcactacctcctgccggccatcgagtattttaacgggggcccaccagcggagacagattttggtggagattacgggggaacgcagtatagcttggttgtgtttaacactgttgactgcgcacctgagagctacgttcagtgtcacgccccgacctcatcagcttacgagtttgtcacctggctggatggcattaagttcatgggcggcggcggtgaaagctgcagccttatcgccgaggggcttagcaccgccctccagcttttcgatgatttcaagaagatgagggagcagatcgggcaaacccaccgagtctgtctcctaatctgcaacagccctccttacctcctaccagcagtggagagcactacatattcgggctgtaccactgagaatctggtgcagcagatcggggagagaggcattcacttttccatcgtcagtcctcggaagctgcccgccctccgcctgctgttcgaaaaggctgcacctcccgccctgctagaacccctgcaaccgccaacagacgtatcccaggaccctcgtcatatggttctggtgcgtggcctggttcttccagtaggtggcggttccgctcccggacccctccaatcaaagcaaccagttccactgccaccagccgcgccttcgggcgctaccctcagcgctgcaccacagcagcccctgccccctgtgcccccacagtatcaagtgccaggaaacctcagcgcggcacaggtcgcagcacaaaacgccgtggaggctgccaaaaatcagaaggctggcctgggcccacgcttctcacctatcacaccactccagcaggctgctcccggcgtgggaccacccttcagtcaagctcctgctccccaactcccgcctggcccccctggcgcaccgaaacctcctcctgcctcccaacccagcctggtaagtacagtcgcccccggaagcggcctggcccctactgcccagcccggtgcaccgtccatggctggtacggtggcccctgggggagtgtccgggcctagcccagcccagctcggagcaccagcactcggaggccaacagtcagtctctaacaaactcctggcctggagcggtgtgctggagtggcaagaaaaacccaaacccgccagtgtagatgctaacactaaacttacccgctccctgccatgccaggtctacgtaaatcacggtgaaaatctgaaaactgagcagtggcctcagaagctgatcatgcagctgatccctcagcagttactgacaacactgggcccactctttcgtaatagcaggatggttcaatttcactttactaacaaggacctggagagcctcaaagggctatacagaataatggggaatggctttgccggatgtgtgcattttcctcacactgcaccatgcgaagttcgggtgcttatgctgctctacagttctaaaaagaagatcttcatgggcttgattccatatgaccaaagcggattcgttaacggcataagacaggtgattaccaaccataagcaggtgcaacagcagaaattagaacagcagcaaagggggatgggcggtcagcaggcccctccaggccttggtcccattcttgaagaccaggccagaccctcacagaatctgctgcagctcaggcctccacagcctcagcccccaccaggagcgccccagggcccgccaggagccgcatcaggacctccacccccaggaccaattttgcgcccccagaaccctggtgccaacccacaacttcgaagcctgctcctaaatcctcccccaccgcagaccggggtgccccctcctcaggcttctttacaccacctgcagccccccggagccccagctctgctgcctccccctcatcaaggcttgggccagccccagctgggccccccgctgctccatccccctcccgcacagagctggcctgcacagttaccacctcgggcccccctgcccgggaaaggcacgcggggcagagcagaggtgtggacggagtgcccaagttcttcgtgggccagggccccacgccctagcgctccggggaagtag

SEQ ID NO: 221035 - DNA, 753 bp, Artificial Sequence
  derived and/or modified sequence
atgctgctgtacagcagcaagaagaagatcttcatgggcctgatcccgtatgaccagtcaggatttgtcaacggtatacggcaggttattacgaatcacaagcaggtgcagcagcaaaaactggagcagcaacagagggggatgggcgggcagcaggctcctcccggactcgggcccattctggaggaccaggctagaccatcccagaatctcttgcagttgcggccacctcagccgcagccgcagggcaccgttggggcctccggcgcaaccggccaaccgcagccccagggcactgcccagccccctcctggggccccgcagggccccccgggtgcggctagcggaccccccccgccaggaccaatttttggcccacggactcttggtcctacactttcatgtgaggcctcctccagcacccaccataggcggcggctgggctgccctcatccccgcccaccttcaaccacaagcagtcatcagggcctgctgcgctgttgcctccggcggcagggcttgggtcagcctcagctgggaccccattcttgcatccatcatttgccgtcccccggccctcacaattttcccctagggctgcattgtcaagtcagagggccaggtggcggccaaagaagtggtctcagcgtacccgccgctccaggcctcgaacaccaggatagggtgttactgggaagcaaagacattgggagcaaaaacgagggatcgcctatggcattcgcagagctgtag

SEQ ID NO: 221036 - DNA, 1605 bp, Artificial Sequence
  derived and/or modified sequence
atggtgcccggcagcgagggccccgcccgggccggcagcgtggtggccgatgtggtgttcgtcatcgaaggcacagcaaacttgggcccatacttcgaggggctaagaaagcactatctgttacctgcaattgaatacttcaatggcgggcccccagccgaaactgacttcggaggagatgtgcctggcaacctcagtgccgcacaggtggcagctcaaaacgccgtggaggccgccaaaaaccaaaaagctgggctcggtccacgcttcagtcccattacccctttgcagcaagctgcacccggcgtggggccaccattcagtcaggctccagcgcctcagctgccgcccgggcctcccggtgcgcctaagccccccccggcctcacagcctagcctggtgtctaccgtggctcccgggtcaggcttggcacccactgcccagcccggcgccccttcgatggcaggaactgtggccccagggggagtatctggtccaagcccggcacagctaggtgccccagcactgggtggacagcagagtgtctcaaacaagctccttgcctggagcggcgtgctggagtggcaggagaagccaaagccagcttcagttgacgctaacaccaagctgacacgttctctaccatgccaagtgtacgtaaaccatggcgagaacttgaagaccgagcaatggcctcagaagcttattatgcagttgatccctcaacagctgctgacgaccctcggcccactctttagaaattcccgaatggtccagtttcatttcactaataaagaccttgaatccctgaaaggcttgtacaggatcatgggaaatggcttcgcaggatgtgttcactttccccataccgctccttgcgaagtgcgcgtgctcatgctgctatatagcagtaaaaagaagatcttcatgggactcatcccttatgaccagagcgggttcgtgaatggcatccgccaggtgataaccaaccacaagcaggtgcagcagcagaagttggaacagcaacagaggggaatggggggacaacaggcccctcccggactcggacctattctggaggatcaagcgcgaccatcacagaacttgttgcagttgagacccccccaaccccaaccgcagggcacagttggtgcttctggcgctaccggacagccacagccacagggtacagcccagcctcccccaggagctccccagggccctcccggtgcggcgtcagggcccccacctcccggtcccattctaagacctcaaaaccctggcgccaacccacagcttcgaagcctacttcttaatccacctcctccacagactggagtgccccctccccaggcctctctgcaccatctgcagccaccaggggcccccgctttattgccacccccccaccagggtctgggccagccacagctggggccaccattgcttcaccctcctcccgcacagtcctggcctgctcagctccccccgagggctcccctacccgggcaaatgctgctgtccggtggaccacgagggcctgtgccccagcctggtttacaaccatcagtcatggaggatgacatcttaatggacctgatttag

SEQ ID NO: 221037 - DNA, 1194 bp, Artificial Sequence
  derived and/or modified sequence
atggtgcccggcagcgagggccccgcccgggccggcagcgtggtggctgatgtagtattcgtgatcgagggcaccgccaatctgggaccgtactttgaaggcctgcggaaacactatcttctgcctgctattgagtactttaatgggggcccccccgccgagaccgattttggcggcgactatggagggacccaatacagcctggtagtctttaatacagttgactgcgctcctgaaagctatgtgcagtgtcacgcgccaacaagctcagcctatgagtttgtgacatggctggatggcataaagttcatggggggtggcggagaatcttgttcccttatcgctgaaggtctgtccactgccctgcagctcttcgatgactttaagaagatgcgagagcaaatcggtcagactcatagggtgtgtcttctgatatgcaactcgccgccctatttgctgccagctgtggagagtaccacctactctggctgtacgaccgagaatcttgtccagcagatcggagagcggggaatccatttctccatcgttagtccacggaagctgccagccttaagattattgttcgaaaaggccgccccccctgcattactggagcccttgcagccaccaactgacgttagccaggaccctcggcatatggtgctggttcgcgggctcgtattacccgtcggcggggggtccgcccctggccccctgcagagtaaacagcctgtaccactgccacccgcggccccatccggggcaacccttagtgcagcaccacagcagccactgccacccgtgccacctcaataccaagttcccggtaatctatccgccgcccaagtcgcagcgcagaacgctgtagaggcagctaagaatcagaaggctgggctaggcccccgtttttctcccataactccgctgcagcaggcggccccgggagtgggcccaccattctctcaggcccctgcccccgccctgctaccacctccacatcaggggctgggccagcctcagttgggacctcccctgctgcacccgcccccagcccagtcctggcctgcgcagttgccacctagggcacccctgccgggccagatgctgctgtcaggcgggccaagaggcccagtcccccagcccgggctgcaacctagtgtaatggaggacgatatcctcatggaccttatttag

SEQ ID NO: 221038 - DNA, 780 bp, Artificial Sequence
  derived and/or modified sequence
atggtgcccggcagcgagggccccgcccgggccggcagcgtggtggctgacgtggtgtttgtaatagaggggactgccaatctgggcccgtacttcgaaggtctgcgtaaacactaccttttacccgccattgagtacttcaatggaggaccccctgccgagacagatttcggcggggactacggcgggacccagtactcccttgttgtgttcaataccgtcgattgtgcccccgaatcctacgtgcagtgccacgcccccaccagcagcgcctacgagtttgttacctggttggacggcattaaatttatgggtggtgggggggagagttgctctttgattgccgagggcttgagtaccgctctgcagttgtttgacgacttcaagaagatgcgcgagcagatcggccaaactcaccgtgtctgtctgctgatttgcaattctcccccttatcttctcccagccgtagaatcaaccacatacagtggatgtacgactgaaaatctcgttcagcagattggggagcgcggaatacacttcagtatcgtgtccccacgaaagctgcccgcgttgagactgctctttgagaaggctgcccccggcctcgcgggagctgccgccgcttccgacagatgtgagcccgggcccgaagcccatggcgctggctcaggcacgcgggccgcttgctggggctggctgtctccaagaccaccacccgtgaaggcagcttcccctccggctagtcgcaggaccctccgttgtcaggttcggtgctgttag

SEQ ID NO: 221039 - DNA, 2244 bp, Artificial Sequence
  derived and/or modified sequence
atggtgccaggctcggaggggccagctcgggcagggagcgtggttgctgatgtggtgttcgtaatcgagggcactgcaaatctgggcccttactttgaggggttaagaaagcattatctgctgcccgcaattgagtacttcaacgggggaccgcctgccgaaaccgacttcggcggtgattatggagggacccagtacagccttgtagtgttcaacactgtggactgtgcgccagagagctacgtccagtgccacgcccctacctcttcagcctacgaatttgtgacctggctcgatggcatcaagttcatggggggaggcggtgagtcttgtagtctgatagctgaaggactgtccaccgctctgcaacttttcgatgactttaagaagatgcgcgaacagataggccagacccatcgagtctgtcttctgatatgtaattcaccaccatatctgctcccagcggtcgaatctaccacttacagcggatgcacaaccgagaacctagttcaacaaattggcgagcgcggaattcacttcagtatagtgtcccccagaaagttaccggctttgcggctcttgtttgagaaagccgcacctcccgcactgctagagcccctgcagcccccaacagatgtgtctcaggacccccgacacatggtgcttgtgcgtggattagttctgcccgtggggggaggttcggccccaggacctctgcagtcaaaacagcccgttccactgccaccagccgctcctagcggggcaactctgtccgccgctccccagcagcctctcccaccagttccaccccagtatcaggtacccggtaacctctccgctgcacaagtggctgcacaaaatgccgtcgaagccgctaaaaaccagaaggctggattgggaccacgattctcacccatcactcccctccagcaggcagctcccggagtgggacctcccttcagccaagcccctgcccctcagttgccgcctgggcctcctggagccccaaagccccctcctgcctcacagcctagtctcgtcagtacggttgcacccggttctggactggcccctaccgcacagccaggcgcaccaagtatggctggtacagtggccccagggggagtgagtgggccatcccctgcccaattgggtgcacccgcacttggcggtcaacagagcgtatcaaacaagctcctggcttggagtggagtgttggagtggcaagagaagccgaaacccgcatccgtggacgcaaatacaaagctcacccggagtctcccttgccaggtttacgttaatcacggcgaaaacctcaaaaccgaacagtggccccagaaattgattatgcagcttattccgcagcagctattaacgaccctggggccactgtttcgaaattcaaggatggtgcagttccatttcaccaacaaagacctggagagcctcaaggggctgtaccgaatcatgggcaacgggttcgcaggctgcgtgcactttcctcacaccgccccatgtgaggtgcgagtcctgatgctgttgtactccagtaagaagaagatcttcatgggcctaatcccctacgatcagtcgggattcgtgaatggcattagacaggtgattaccaatcataagcaggtccagcagcagaaactcgaacaacagcagcggggtatgggcggacagcaggcccctcccggtttgggcccaattttggaggaccaagctagacccagccaaaatttattacagctgagaccaccacaacctcagccacaagggaccgtgggcgcaagcggagccaccggccaaccacagccccagggcacagcgcagccccctcccggtgctccacaggggcctccgggagctgctagcggtcctccaccaccaggacctatcttaaggccgcagaaccccggagccaacccccaactccgtagcttgctgcttaatcccccaccgcctcagaccggcgtgcccccaccgcaggcttcacttcaccatcttcagccacctggagctccggcactgctccccccacctcaccaggggctcggccagccacagctcggaccccctctgctccacccaccacccgcacagtcctggcccgcacaactccctccgcgtgcccctctgccaggccagatgttgctgagcggcggacctcgcggtcccgtaccacagcctgggctacaaccctctgtaatggaggacgatatcctgatggatctgatctag

SEQ ID NO: 221040 - DNA, 2268 bp, Artificial Sequence
  derived and/or modified sequence
atggtccccggatcagaggggcctgccagggcagggagtgttgtggccgacgtcgtgtttgttatcgagggcacggccaatctggggccatattttgaggggctgcggaaacactacttgctgcctgctatcgagtactttaacggtgggcctccagccgagactgacttcgggggagactacgggggaacgcagtactctctggtggtattcaatactgtggactgtgcacctgaaagttacgtccagtgccatgcacccacatccagcgcttatgagtttgtgacctggctggacgggatcaaatttatgggaggcggaggagaatcctgctctctcatcgctgaggggttgtccaccgccctgcaactgtttgacgatttcaaaaagatgcgggaacagattggtcagactcaccgtgtgtgtctgctgatttgtaatagtccaccctatctgttgcccgctgtggaatctacgacatacagcgggtgtaccacagaaaatctcgtccagcaaatcggggagcgcggaattcattttagtattgtatcccccagaaagctacctgcgctgcggctgctatttgaaaaggccgcacccccagccctgctggaaccattgcagcccccaaccgatgtgtcacaggatcctcgccacatggtgcttgtgcgcggactggtactgccagtgggaggcggatcagctccaggcccacttcagagcaaacagcctgtaccccttccacctgcggcaccttccggagctacactgagtgccgctccccagcagccgcttcccccagtgcccccacaatatcaggtgccaggtaatctcagcgcagcacaggtggcagcgcaaaatgcggttgaggcagccaaaaatcagaaagccggtttgggtccccgatttagccctatcacaccattgcagcaggccgcacctggcgtgggtcccccattctcccaagctcctgcccctcagcttccgcctggacctcccggagcccctaagccaccgccagcttcgcagccctcacttgtgagcacagtggccccagggtctggactggctccaaccgcccagcccggagccccttcaatggccggtacagtcgctcccggtggcgtttcgggtccctctccagcgcagttgggagctcctgccctaggaggccagcagtccgtgagcaacaagctgctagcttggtccggggtactcgagtggcaggaaaagccaaagccggcttcagttgatgcaaacacaaaattgacccggtctctcccatgccaggtgtacgtcaaccatggggagaacttgaaaactgaacagtggccccagaaactcattatgcaacttattccccaacagctgctgaccacccttggacctctttttagaaactccaggatggtgcagtttcacttcacgaacaaagacttggagtctctaaaagggctctacaggataatggggaacggatttgctggctgtgtgcatttcccccacacggccccttgcgaagtccgagtgctgatgctgctgtacagcagcaagaagaagatctttatgggtctgatcccttacgatcagtctggctttgttaacggcatcaggcaggtgatcacaaaccataagcaggtgcagcaacagaagcttgaacagcaacagagaggcatgggaggtcagcaggcacctcctgggttgggcccaattctcgaggatcaggcgagacccagccagaacctgcttcagttgcgtccacctcagccccagcctcagggcaccgttggagcgtctggggcaacaggccagccacaaccgcagggcactgcacagccccctccgggagcccctcagggtccccctggagccgcatccggacctcccccaccaggcccaatcctgaggccacagaatcctggcgctaatccccagctgcgttcactcttactgaatccaccgcctccacagaccggcgttccacctccgcaggcctcactccatcatcaccttccctccccgggaccacataacttcccactcggcctgcactgccaggtgcggggaccaggaggtgggcaaagaagcggactgagtgtcccagccgctccaggtctggagcaccaggacagggtcctgctaggatccaaggatatcgggtccaaaaacgagggctctcccatccgggcatgttcaccagcatcttggagaacaacatcctcctggatctccagcgaatcccccaccccgaataaggtcccattttag

SEQ ID NO: 221041 - DNA, 1449 bp, Artificial Sequence
  derived and/or modified sequence
atggtcccgggtagcgaaggtcctgcaagggcaggctcagtggtggctgacgtggtttttgtcatcgaagggaccgccaatctgggtccttacttcgaagggttgcggaagcattacctgctgccagcaatcgaatacttcaatggagggcctcccgcaccattttctcaagctcccgcaccacaacttccccctggacctcctggagctccaaaaccgccaccagcctcacaaccaagcctggtgagtaccgtggcacccggatccggcttggcacctacagctcagcccggagccccttctatggccggtacagttgctccagggggtgtgagcgggccttcacctgcacaattaggagcacccgcactgggaggtcaacagtccgtctctaataagcttctggcctggtctggcgtgttggagtggcaagagaagccgaagcctgcatcagtggacgcgaatacaaagctaactcggagcctcccttgtcaagtctatgtaaaccatggcgaaaatctgaaaacggagcaatggccacagaaattaattatgcagctcatcccgcagcagcttctcacaacattaggacccctgtttagaaattctcggatggtgcagtttcatttcacgaacaaagatctggagtctctcaagggcctgtaccgaatcatgggcaatggctttgccggttgtgtgcactttccccacacggctccttgtgaggtgcgtgtccttatgttgttgtatagcagcaagaaaaaaatcttcatgggtctgattccttatgatcaatctgggttcgtaaatggtattcggcaggtcattactaatcacaagcaggtccagcagcagaagctcgagcagcagcagcgagggatggggggtcagcaggcacctccgggtctgggaccaatacttgaggatcaagccaggccttcccagaatcttctgcaacttaggcctccccagcctcagccccagggcacagtgggcgcatcaggagccacagggcagccccaacctcaggggactgctcagccacctcccggtgctcctcaggggccacctggagccgcaagcggcccaccccctccaggtcccatcctcaggccgcagaatccaggcgctaatccacagcttaggtctctattactcaaccccccaccacctcagacaggcgtccctccgcctcaggcgagcctacaccacctgcaaccacctggggcaccagctctgctgccacctcctcatcagggcctcggccagccacagctgggacctccgctcctgcacccaccccctgcacaaagttggcctgcccagctgccaccaagagcccctctgcccggtcagatgctgcttagtggcggaccccgaggcccagtccctcagcccggactccagcccagcgtaatggaagatgatatccttatggatctcatctag

SEQ ID NO: 221042 - DNA, 2385 bp, Artificial Sequence
  derived and/or modified sequence
atggtccccggttcagaagggccagccagggccggaagtgtggtggctgatgtagtgtttgtcatagaagggacagcaaaccttgggccatatttcgaaggcctgcgcaaacattatctgttgccggcaattgaatacttcaacggcggaccccctgccgaaacagattttggtggggactatggcggtacacagtacagtttagtggtgttcaatactgtggattgcgccccagagagttatgtacagtgtcacgctcccacctcatctgcatatgagttcgtgacctggctggatggcataaagtttatgggcggaggaggcgagagttgctcactgattgcagaaggactctctactgctctccagctgtttgacgacttcaaaaagatgcgagagcagatcggccagacacacagggtgtgtctgttgatttgtaattccccaccttaccttctccccgcagtggagtccacaacttacagcggctgtacaaccgagaatttggtacagcagatcggagagagggggatccatttttctatcgtgagcccacgaaaactgccggctctcaggctgctcttcgagaaagccgctcccccagccctcctagagccccttcagccacccacagatgtatcacaggatccacgccacatggttctcgtgagaggcctggtcctgccggtgggcggtgggtctgcacccggaccactgcagtccaagcagccagtccccctgcctccggctgccccttccggcgcaacgctgtcggctgctcctcagcaacccctgccacccgtccctccccagtaccaggtgcctggcaacttgagcgctgcacaagttgccgcacagaatgccgtcgaggcagcaaagaatcaaaaagccggactgggcccaaggtttagtcctattaccccgttacaacaggctgctcctggggtggggcctcctttctcccaagcaccggcaccccagctcccccctggaccgcctggggctccaaagcctcccccagcctcccagcctagcttagtctctacagtggcccctggatcaggacttgcgcctactgctcaacccggagctccttccatggccggtacagttgcgcctgggggagtgtcaggtccttcacctgcccagttgggggctcccgcacttggaggacagcagtcagtgtcaaataaacttctggcatggtccggagtgctcgagtggcaggagaagcccaagccagcttctgtcgacgctaacacaaaattgactagatcccttccttgccaggtctacgtgaatcatggtgaaaacctgaagaccgaacagtggccccaaaaattgataatgcaacttattcctcagcaacttctcacaactctgggtccccttttccgcaacagccgcatggtccagttccatttcaccaacaaggatctggagagcctgaaaggactgtaccgcatcatgggcaatggattcgccggatgcgtccacttcccccacaccgccccatgtgaggtgagagtgttgatgttactttattcttctaagaaaaagatattcatgggactcatcccatatgaccaatctgggtttgtgaacgggatacggcaggtgatcacaaatcacaagcaggtgcaacagcagaaactggagcagcaacagagggggatggggggacagcaagctccaccagggctgggcccaatactggaggatcaagcccgaccttctcagaatcttttgcagctgcggcctccccagccacaacctcagggaactgtgggcgcatccggcgctacgggccaaccccagccccagggcactgcccaacccccacctggggcacctcaagggccacctggagcagcgtccggacctccaccacccggtcccattctgagaccccagaaccctggcgctaatcctcagctccgcagcctgctcttaaatcccccacctccccagactggggtgccaccgcctcaggccagcctccatcatctacagccacctggtgctccagccctccttcctccgcctcaccagggactggggcagccccagctgggccctcccctgttacatccccctcccgacggagccaggcggagtgacgcggctgagagaggatcccctggccctggaaggagtccccagtcccctcccctgcccctcggatttccagtgaggcagagagtcacggccttccacgtgtccattactagcgggaaaactaaagagcgccgtcgtggaccttgcgtctctcggaagatgggtgcaagtcttttcctgtgcggaagtgaggagcatgcgtacgtcttcaatatgcagacaaatcgggtgtgcgtggagcgtatccaacctgaaacacccctctag

SEQ ID NO: 221043 - DNA, 2175 bp, Artificial Sequence
  derived and/or modified sequence
atggtgcccggatccgaggggcctgcacgcgcagggtcggttgtggcggacgtggtcttcgtgatcgaaggcaccgcgaatctcgggccttactttgaggggctgagaaagcactatctactgccggctattgagtatttcaatggtggccctcccgctgaaaccgatttcgggggtgactatgggggaacacagtactccctcgttgtctttaatactgtggactgtgcgcctgaatcctatgtgcaatgccatgccccaacatcttcagcctatgagtttgtaacttggctggacggaatcaaattcatggggggaggtggagaaagctgctccctgatcgccgagggactgtccacggctctgcagctgttcgatgacttcaaaaaaatgcgtgagcagatcggtcaaacacatagagtgtgtctacttatttgtaacagtcctccatacttattgcctgcggtggagagtacaacttattctggctgcaccacagagaatttggtgcagcagatcggggagagaggtatccatttctctattgtcagtccaaggaaattacccgctcttaggttgctgtttgagaaagcagctccgcctgccctcttggagcccctgcaaccccctacagacgtgagccaagaccccagacacatggtcctagtacggggactcgttctgcccgtgggtggcggatctgcaccaggccctctgcaatcaaagcagcccgtccccctgccccctgccgctccatcaggagccactctgtcggcagcccctcaacagccactgcctcctgtgcctccccagtaccaggtccccggtaacctgagtgccgcacaggttgcagcccagaatgccgtcgaggcggcaaagaaccagaaggccggtctcggacctcgcttcagtcctattactccactgcagcaggccgctcccggtgtgggccctcccttttcccaggctccagcaccacagttgccacctgggcctcctggtgcccctaaaccacctccagcctcacagccaagtctcgtgtcaacggtggctcctggctcgggcctggctccaacagctcagcccggagcaccaagcatggcgggaaccgtggccccaggaggcgtctctggccctagccctgctcagctgggagccccagccctggggggtcagcagtccgtgagtaacaagttgttagcatggagcggggtcctcgagtggcaggagaagcctaaacccgcatccgttgatgccaataccaaattgacccgcagtctgccttgccaggtgtacgtgaatcacggagagaacctcaagacggaacagtggcctcagaagttaataatgcagcttatcccccagcagttgctgaccacattgggcccactgtttaggaacagccgcatggtccagttccattttactaacaaggacttagaatccctgaaaggactgtataggatcatgggaaacggtttcgctggatgtgtgcactttccacatactgccccatgtgaggtgagggttctgatgctgctgtacagctccaagaaaaaaatcttcatggggcttattccatacgaccagagcggatttgtgaacggcataagacaggtgataaccaaccataagcaggtacagcagcagaagctcgagcagcagcagcggggaatgggagggcagcaagctccacccggactcggcccaatcctggaagaccaggcccgaccaagccagaatctgctccagctcagaccaccacagccccagcccccacccggagccccacaagggcctccgggagccgcatcaggccctcctcctcccggtcccattcttaggccacagaacccaggagcgaatcctcagcttaggtccctgctactaaacccccctcctcctcaaactggtgtgccgcctcctcaggcttctctgcatcacctgcaaccgcctggagcacccgctctgctccctccaccacaccagggcctgggtcagcctcaactgggtccaccgctgcttcacccacctcccgcacagagctggccagcccagctgccgccacgcgctcctctgcccggtaaaggcactcggggaagagcagaagtatggactgagtgtccatcctcaagttgggccagagccccaagacctagtgcgcctggcaagtag

SEQ ID NO: 221044 - DNA, 753 bp, Artificial Sequence
  derived and/or modified sequence
atgttactgtactcctctaagaagaagatatttatggggctcatcccatacgaccagtccggctttgtcaatggcatccgtcaagtcatcacgaatcacaaacaggtccagcagcagaagctggaacagcagcagaggggtatgggcggtcagcaggctccgccaggattaggcccaatccttgaggaccaggccagaccctcccagaacctgctgcagctcagaccgcctcaaccacagccccaggggacagtgggagcctcaggcgctacgggccagccacagccgcagggaaccgcccagcccccacccggagcacctcaaggcccacctggggcagccagtgggcctccaccaccagggccaatctttggacctcgtacgctcggacctacactgagttgtgaggcctcgagctcaacacaccatagacggcgtctaggatgcccacacccgcgaccccctagcactacttcttcacatcagggcctcctgcgatgctgccttcgcagacagggacttggccaaccacaattgggcccacactcttgtatacaccaccttcccagcccaggaccgcacaacttccccctagggctgcactgccaggtacgtggccctgggggaggacagagaagtggcctgtcagttcctgccgcacccggactggaacaccaagatcgcgtgctgctcggatccaaagacataggttcaaagaacgaaggctcacctatggcttttgccgagctgtag

SEQ ID NO: 221045 - DNA, 1605 bp, Artificial Sequence
  derived and/or modified sequence
atggttccaggatccgaaggccctgccagggctggttccgtcgtggccgatgtcgtgttcgtgatcgaaggtactgccaatttaggtccatatttcgagggcctccgcaagcattacctgctcccagccatcgaatattttaacggcggacctcctgccgagacggactttggcggagacgtgcctggcaatctgtccgccgctcaagttgccgctcaaaacgccgtggaggcagctaagaatcagaaggctggcctgggaccccgattctcacctatcaccccacttcaacaggccgctcctggcgttggcccaccctttagccaggcaccagcgcctcagctgccgccaggaccgccaggagcaccaaaaccccctcctgcgtctcaaccatcccttgtctcaaccgtggcccctggttctgggctggctcctacagcacagcctggggctccttccatggccggaactgtggccccaggcggagtcagtggaccatcccctgcccaattaggtgccccagcccttggcggacagcaatctgtatccaataagcttctggcctggtctggggttctggaatggcaggagaagcccaagcctgcgagcgtggacgccaataccaagctgactcgtagcttaccttgccaggtgtacgttaaccatggcgagaaccttaagactgaacagtggcctcagaagctaattatgcaactaattccacagcagctgcttacaacccttggccctttgtttcgtaatagtcgtatggtgcagttccacttcactaataaagacctcgagtccctgaaagggctgtacaggatcatggggaacggatttgcaggctgtgtgcactttccacataccgcaccgtgtgaagtgagggtgttaatgcttctttattctagcaaaaaaaagatctttatgggattaattccttacgatcagtctgggttcgtgaacggaatccggcaagtgatcacaaatcataagcaggtgcaacagcaaaagctcgaacaacagcaaagaggcatggggggacaacaggcccctccaggcctgggaccaatcctcgaggaccaggctagaccctcccaaaatttgcttcaactacggccaccccagccccaacctcaaggaaccgttggcgcatcgggcgcaaccggccaaccacagccccagggaacagcccagcctcctccaggcgctcctcaagggcctcccggagctgcttcgggccctcctcctcctggtccaatcctcagaccacaaaaccctggggctaaccctcaacttcggagcctcctgctgaaccctccaccccctcagacaggcgtcccccctccccaggcgagcctccatcacctccaaccgccaggagctcccgctctgctgccacctccacaccaaggactgggccagccacagctggggcctcctctcctccatccaccacccgctcagtcatggccagcacaacttcccccacgggcacctctgcccggtcagatgctcctcagcggtggacctaggggaccggtccctcaaccagggctccagccctcggtgatggaggatgacatccttatggaccttatttag

SEQ ID NO: 221046 - DNA, 1194 bp, Artificial Sequence
  derived and/or modified sequence
atggtccctggaagcgagggaccagcccgtgcaggctcagtagtagcagatgtagtgtttgttatcgaaggcacagcaaatttaggtccttatttcgaagggctacgtaaacactatcttttgccagctattgagtactttaacgggggaccaccagccgaaactgatttcggcggagactacggagggacacagtactccctcgtggttttcaacaccgtggattgcgcacccgagagctatgtccagtgtcatgcgccaacatctagcgcgtatgagtttgtgacctggcttgacggcatcaagtttatgggaggaggcggagagagctgttctcttatagccgagggcctttccacggccctgcagctgttcgatgacttcaagaagatgagagagcagattggacagactcaccgcgtgtgcttgctgatatgcaattcccctccttacctgctcccagcggtggagtccaccacctactctggctgcacaacagaaaatctggtgcagcaaatcggcgagagggggatccacttcagcattgtgagccctcgtaagcttcccgctctgaggctgctgtttgagaaagcagcaccaccagcgctcctcgaacccctgcagcctccaacggatgtcagccaggatcctaggcacatggtgctggtaagaggactggtgttgcccgtgggcggtggaagtgcacctggcccactgcaatccaagcagcccgtccctttaccacccgcagccccaagcggggcaactctgtccgccgcaccacagcagcctctccccccagtcccgccacagtatcaggtacctggcaatttgtcggccgcacaagttgccgctcagaacgctgtcgaggctgcaaaaaaccagaaggccggactcggacccaggttcagtcccatcactcccctacagcaagctgcgccaggagtgggccctccgtttagtcaggctccggcacccgcacttcttcctccccctcatcagggtctcggccaaccacaattgggtccccctctgttgcacccgcctcctgctcagtcctggcccgcacaactcccgccacgggctcctctgccaggccagatgcttttaagtggaggcccaaggggcccagtcccccagcctggcctacagccaagcgtgatggaggatgacattctgatggacctcatttag

SEQ ID NO: 221047 - DNA, 780 bp, Artificial Sequence
  derived and/or modified sequence
atggtcccgggatctgagggcccagccagagctgggtccgtcgtggccgacgtcgtgttcgtgattgagggaacagcgaacctcgggccatatttcgagggattgaggaaacactaccttctcccagctatcgagtactttaatggagggccaccagccgagaccgatttcggtggcgactacggaggtacgcagtactccctcgtggtctttaatacagtggactgcgccccagagtcctatgtacaatgccatgcgcctacctccagtgcttatgagttcgttacctggttagacggaatcaagtttatggggggaggtggcgagagctgttccctgatcgctgaaggcttgtccacagccctgcaactgtttgacgactttaagaagatgagagagcaaataggccagactcacagagtgtgtctgctgatctgcaattccccaccgtatttattgccggctgtcgaaagtacgacgtactccggatgtaccacagagaatctggtccaacagatcggcgaacgcggaatccatttttctattgtgagtcctcggaagctgcccgctctgcgcctactatttgagaaggcagcaccaggactcgctggcgctgccgctgcatctgatcgctgcgaacccggacccgaagcgcacggagcagggtctggcactcgggctgcctgctgggggtggttatctccaagacctcctcccgttaaagccgcaagtcctcctgcttcacggaggaccctgcgctgccaggttcgttgttgttag

SEQ ID NO: 221048 - DNA, 2244 bp, Artificial Sequence
  derived and/or modified sequence
atggtgcccggcagcgagggccccgccagagccggcagcgtggtggccgacgtggtgttcgtgatcgagggcaccgccaacctgggcccctacttcgagggcctgagaaagcactacctgctgcccgccatcgagtacttcaacggcggcccccccgccgagaccgacttcggcggcgactacggcggcacccagtacagcctggtggtgttcaacaccgtggactgcgcccccgagagctacgtgcagtgccacgcccccaccagcagcgcctacgagttcgtgacctggctggacggcatcaagttcatgggcggcggcggcgagagctgcagcctgatcgccgagggcctgagcaccgccctgcagctgttcgacgacttcaagaagatgagagagcagatcggccagacccacagagtgtgcctgctgatctgcaacagccccccctacctgctgcccgccgtggagagcaccacctacagcggctgcaccaccgagaacctggtgcagcagatcggcgagagaggcatccacttcagcatcgtgagccccagaaagctgcccgccctgagactgctgttcgagaaggccgccccccccgccctgctggagcccctgcagccccccaccgacgtgagccaggaccccagacacatggtgctggtgagaggcctggtgctgcccgtgggcggcggcagcgcccccggccccctgcagagcaagcagcccgtgcccctgccccccgccgcccccagcggcgccaccctgagcgccgccccccagcagcccctgccccccgtgcccccccagtaccaggtgcccggcaacctgagcgccgcccaggtggccgcccagaacgccgtggaggccgccaagaaccagaaggccggcctgggccccagattcagccccatcacccccctgcagcaggccgcccccggcgtgggcccccccttcagccaggcccccgccccccagctgccccccggcccccccggcgcccccaagcccccccccgccagccagcccagcctggtgagcaccgtggcccccggcagcggcctggcccccaccgcccagcccggcgcccccagcatggccggcaccgtggcccccggcggcgtgagcggccccagccccgcccagctgggcgcccccgccctgggcggccagcagagcgtgagcaacaagctgctggcctggagcggcgtgctggagtggcaggagaagcccaagcccgccagcgtggacgccaacaccaagctgaccagaagcctgccctgccaggtgtacgtgaaccacggcgagaacctgaagaccgagcagtggccccagaagctgatcatgcagctgatcccccagcagctgctgaccaccctgggccccctgttcagaaacagcagaatggtgcagttccacttcaccaacaaggacctggagagcctgaagggcctgtacagaatcatgggcaacggcttcgccggctgcgtgcacttcccccacaccgccccctgcgaggtgagagtgctgatgctgctgtacagcagcaagaagaagatcttcatgggcctgatcccctacgaccagagcggcttcgtgaacggcatcagacaggtgatcaccaaccacaagcaggtgcagcagcagaagctggagcagcagcagagaggcatgggcggccagcaggccccccccggcctgggccccatcctggaggaccaggccagacccagccagaacctgctgcagctgagacccccccagccccagccccagggcaccgtgggcgccagcggcgccaccggccagccccagccccagggcaccgcccagcccccccccggcgccccccagggcccccccggcgccgccagcggcccccccccccccggccccatcctgagaccccagaaccccggcgccaacccccagctgagaagcctgctgctgaaccccccccccccccagaccggcgtgccccccccccaggccagcctgcaccacctgcagccccccggcgcccccgccctgctgccccccccccaccagggcctgggccagccccagctgggcccccccctgctgcaccccccccccgcccagagctggcccgcccagctgccccccagagcccccctgcccggccagatgctgctgagcggcggccccagaggccccgtgccccagcccggcctgcagcccagcgtgatggaggacgacatcctgatggacctgatctag

SEQ ID NO: 221049 - DNA, 2268 bp, Artificial Sequence
  derived and/or modified sequence
atggtgcccggcagcgagggccccgccagagccggcagcgtggtggccgacgtggtgttcgtgatcgagggcaccgccaacctgggcccctacttcgagggcctgagaaagcactacctgctgcccgccatcgagtacttcaacggcggcccccccgccgagaccgacttcggcggcgactacggcggcacccagtacagcctggtggtgttcaacaccgtggactgcgcccccgagagctacgtgcagtgccacgcccccaccagcagcgcctacgagttcgtgacctggctggacggcatcaagttcatgggcggcggcggcgagagctgcagcctgatcgccgagggcctgagcaccgccctgcagctgttcgacgacttcaagaagatgagagagcagatcggccagacccacagagtgtgcctgctgatctgcaacagccccccctacctgctgcccgccgtggagagcaccacctacagcggctgcaccaccgagaacctggtgcagcagatcggcgagagaggcatccacttcagcatcgtgagccccagaaagctgcccgccctgagactgctgttcgagaaggccgccccccccgccctgctggagcccctgcagccccccaccgacgtgagccaggaccccagacacatggtgctggtgagaggcctggtgctgcccgtgggcggcggcagcgcccccggccccctgcagagcaagcagcccgtgcccctgccccccgccgcccccagcggcgccaccctgagcgccgccccccagcagcccctgccccccgtgcccccccagtaccaggtgcccggcaacctgagcgccgcccaggtggccgcccagaacgccgtggaggccgccaagaaccagaaggccggcctgggccccagattcagccccatcacccccctgcagcaggccgcccccggcgtgggcccccccttcagccaggcccccgccccccagctgccccccggcccccccggcgcccccaagcccccccccgccagccagcccagcctggtgagcaccgtggcccccggcagcggcctggcccccaccgcccagcccggcgcccccagcatggccggcaccgtggcccccggcggcgtgagcggccccagccccgcccagctgggcgcccccgccctgggcggccagcagagcgtgagcaacaagctgctggcctggagcggcgtgctggagtggcaggagaagcccaagcccgccagcgtggacgccaacaccaagctgaccagaagcctgccctgccaggtgtacgtgaaccacggcgagaacctgaagaccgagcagtggccccagaagctgatcatgcagctgatcccccagcagctgctgaccaccctgggccccctgttcagaaacagcagaatggtgcagttccacttcaccaacaaggacctggagagcctgaagggcctgtacagaatcatgggcaacggcttcgccggctgcgtgcacttcccccacaccgccccctgcgaggtgagagtgctgatgctgctgtacagcagcaagaagaagatcttcatgggcctgatcccctacgaccagagcggcttcgtgaacggcatcagacaggtgatcaccaaccacaagcaggtgcagcagcagaagctggagcagcagcagagaggcatgggcggccagcaggccccccccggcctgggccccatcctggaggaccaggccagacccagccagaacctgctgcagctgagacccccccagccccagccccagggcaccgtgggcgccagcggcgccaccggccagccccagccccagggcaccgcccagcccccccccggcgccccccagggcccccccggcgccgccagcggcccccccccccccggccccatcctgagaccccagaaccccggcgccaacccccagctgagaagcctgctgctgaaccccccccccccccagaccggcgtgccccccccccaggccagcctgcaccaccacctgcccagccccggcccccacaacttccccctgggcctgcactgccaggtgagaggccccggcggcggccagagaagcggcctgagcgtgcccgccgcccccggcctggagcaccaggacagagtgctgctgggcagcaaggacatcggcagcaagaacgagggcagccccatcagagcctgcagccccgccagctggagaaccaccagcagctggatcagcagcgagagccccacccccaacaaggtgcccttctag

SEQ ID NO: 221050 - DNA, 1449 bp, Artificial Sequence
  derived and/or modified sequence
atggtgcccggcagcgagggccccgccagagccggcagcgtggtggccgacgtggtgttcgtgatcgagggcaccgccaacctgggcccctacttcgagggcctgagaaagcactacctgctgcccgccatcgagtacttcaacggcggcccccccgcccccttcagccaggcccccgccccccagctgccccccggcccccccggcgcccccaagcccccccccgccagccagcccagcctggtgagcaccgtggcccccggcagcggcctggcccccaccgcccagcccggcgcccccagcatggccggcaccgtggcccccggcggcgtgagcggccccagccccgcccagctgggcgcccccgccctgggcggccagcagagcgtgagcaacaagctgctggcctggagcggcgtgctggagtggcaggagaagcccaagcccgccagcgtggacgccaacaccaagctgaccagaagcctgccctgccaggtgtacgtgaaccacggcgagaacctgaagaccgagcagtggccccagaagctgatcatgcagctgatcccccagcagctgctgaccaccctgggccccctgttcagaaacagcagaatggtgcagttccacttcaccaacaaggacctggagagcctgaagggcctgtacagaatcatgggcaacggcttcgccggctgcgtgcacttcccccacaccgccccctgcgaggtgagagtgctgatgctgctgtacagcagcaagaagaagatcttcatgggcctgatcccctacgaccagagcggcttcgtgaacggcatcagacaggtgatcaccaaccacaagcaggtgcagcagcagaagctggagcagcagcagagaggcatgggcggccagcaggccccccccggcctgggccccatcctggaggaccaggccagacccagccagaacctgctgcagctgagacccccccagccccagccccagggcaccgtgggcgccagcggcgccaccggccagccccagccccagggcaccgcccagcccccccccggcgccccccagggcccccccggcgccgccagcggcccccccccccccggccccatcctgagaccccagaaccccggcgccaacccccagctgagaagcctgctgctgaaccccccccccccccagaccggcgtgccccccccccaggccagcctgcaccacctgcagccccccggcgcccccgccctgctgccccccccccaccagggcctgggccagccccagctgggcccccccctgctgcaccccccccccgcccagagctggcccgcccagctgccccccagagcccccctgcccggccagatgctgctgagcggcggccccagaggccccgtgccccagcccggcctgcagcccagcgtgatggaggacgacatcctgatggacctgatctag

SEQ ID NO: 221051 - DNA, 2385 bp, Artificial Sequence
  derived and/or modified sequence
atggtgcccggcagcgagggccccgccagagccggcagcgtggtggccgacgtggtgttcgtgatcgagggcaccgccaacctgggcccctacttcgagggcctgagaaagcactacctgctgcccgccatcgagtacttcaacggcggcccccccgccgagaccgacttcggcggcgactacggcggcacccagtacagcctggtggtgttcaacaccgtggactgcgcccccgagagctacgtgcagtgccacgcccccaccagcagcgcctacgagttcgtgacctggctggacggcatcaagttcatgggcggcggcggcgagagctgcagcctgatcgccgagggcctgagcaccgccctgcagctgttcgacgacttcaagaagatgagagagcagatcggccagacccacagagtgtgcctgctgatctgcaacagccccccctacctgctgcccgccgtggagagcaccacctacagcggctgcaccaccgagaacctggtgcagcagatcggcgagagaggcatccacttcagcatcgtgagccccagaaagctgcccgccctgagactgctgttcgagaaggccgccccccccgccctgctggagcccctgcagccccccaccgacgtgagccaggaccccagacacatggtgctggtgagaggcctggtgctgcccgtgggcggcggcagcgcccccggccccctgcagagcaagcagcccgtgcccctgccccccgccgcccccagcggcgccaccctgagcgccgccccccagcagcccctgccccccgtgcccccccagtaccaggtgcccggcaacctgagcgccgcccaggtggccgcccagaacgccgtggaggccgccaagaaccagaaggccggcctgggccccagattcagccccatcacccccctgcagcaggccgcccccggcgtgggcccccccttcagccaggcccccgccccccagctgccccccggcccccccggcgcccccaagcccccccccgccagccagcccagcctggtgagcaccgtggcccccggcagcggcctggcccccaccgcccagcccggcgcccccagcatggccggcaccgtggcccccggcggcgtgagcggccccagccccgcccagctgggcgcccccgccctgggcggccagcagagcgtgagcaacaagctgctggcctggagcggcgtgctggagtggcaggagaagcccaagcccgccagcgtggacgccaacaccaagctgaccagaagcctgccctgccaggtgtacgtgaaccacggcgagaacctgaagaccgagcagtggccccagaagctgatcatgcagctgatcccccagcagctgctgaccaccctgggccccctgttcagaaacagcagaatggtgcagttccacttcaccaacaaggacctggagagcctgaagggcctgtacagaatcatgggcaacggcttcgccggctgcgtgcacttcccccacaccgccccctgcgaggtgagagtgctgatgctgctgtacagcagcaagaagaagatcttcatgggcctgatcccctacgaccagagcggcttcgtgaacggcatcagacaggtgatcaccaaccacaagcaggtgcagcagcagaagctggagcagcagcagagaggcatgggcggccagcaggccccccccggcctgggccccatcctggaggaccaggccagacccagccagaacctgctgcagctgagacccccccagccccagccccagggcaccgtgggcgccagcggcgccaccggccagccccagccccagggcaccgcccagcccccccccggcgccccccagggcccccccggcgccgccagcggcccccccccccccggccccatcctgagaccccagaaccccggcgccaacccccagctgagaagcctgctgctgaaccccccccccccccagaccggcgtgccccccccccaggccagcctgcaccacctgcagccccccggcgcccccgccctgctgccccccccccaccagggcctgggccagccccagctgggcccccccctgctgcaccccccccccgacggcgccagaagaagcgacgccgccgagagaggcagccccggccccggcagaagcccccagagcccccccctgcccctgggcttccccgtgagacagagagtgaccgccttccacgtgagcatcaccagcggcaagaccaaggagagaagaagaggcccctgcgtgagcagaaagatgggcgccagcctgttcctgtgcggcagcgaggagcacgcctacgtgttcaacatgcagaccaacagagtgtgcgtggagagaatccagcccgagacccccctgtag

SEQ ID NO: 221052 - DNA, 2175 bp, Artificial Sequence
  derived and/or modified sequence
atggtgcccggcagcgagggccccgccagagccggcagcgtggtggccgacgtggtgttcgtgatcgagggcaccgccaacctgggcccctacttcgagggcctgagaaagcactacctgctgcccgccatcgagtacttcaacggcggcccccccgccgagaccgacttcggcggcgactacggcggcacccagtacagcctggtggtgttcaacaccgtggactgcgcccccgagagctacgtgcagtgccacgcccccaccagcagcgcctacgagttcgtgacctggctggacggcatcaagttcatgggcggcggcggcgagagctgcagcctgatcgccgagggcctgagcaccgccctgcagctgttcgacgacttcaagaagatgagagagcagatcggccagacccacagagtgtgcctgctgatctgcaacagccccccctacctgctgcccgccgtggagagcaccacctacagcggctgcaccaccgagaacctggtgcagcagatcggcgagagaggcatccacttcagcatcgtgagccccagaaagctgcccgccctgagactgctgttcgagaaggccgccccccccgccctgctggagcccctgcagccccccaccgacgtgagccaggaccccagacacatggtgctggtgagaggcctggtgctgcccgtgggcggcggcagcgcccccggccccctgcagagcaagcagcccgtgcccctgccccccgccgcccccagcggcgccaccctgagcgccgccccccagcagcccctgccccccgtgcccccccagtaccaggtgcccggcaacctgagcgccgcccaggtggccgcccagaacgccgtggaggccgccaagaaccagaaggccggcctgggccccagattcagccccatcacccccctgcagcaggccgcccccggcgtgggcccccccttcagccaggcccccgccccccagctgccccccggcccccccggcgcccccaagcccccccccgccagccagcccagcctggtgagcaccgtggcccccggcagcggcctggcccccaccgcccagcccggcgcccccagcatggccggcaccgtggcccccggcggcgtgagcggccccagccccgcccagctgggcgcccccgccctgggcggccagcagagcgtgagcaacaagctgctggcctggagcggcgtgctggagtggcaggagaagcccaagcccgccagcgtggacgccaacaccaagctgaccagaagcctgccctgccaggtgtacgtgaaccacggcgagaacctgaagaccgagcagtggccccagaagctgatcatgcagctgatcccccagcagctgctgaccaccctgggccccctgttcagaaacagcagaatggtgcagttccacttcaccaacaaggacctggagagcctgaagggcctgtacagaatcatgggcaacggcttcgccggctgcgtgcacttcccccacaccgccccctgcgaggtgagagtgctgatgctgctgtacagcagcaagaagaagatcttcatgggcctgatcccctacgaccagagcggcttcgtgaacggcatcagacaggtgatcaccaaccacaagcaggtgcagcagcagaagctggagcagcagcagagaggcatgggcggccagcaggccccccccggcctgggccccatcctggaggaccaggccagacccagccagaacctgctgcagctgagacccccccagccccagcccccccccggcgccccccagggcccccccggcgccgccagcggcccccccccccccggccccatcctgagaccccagaaccccggcgccaacccccagctgagaagcctgctgctgaaccccccccccccccagaccggcgtgccccccccccaggccagcctgcaccacctgcagccccccggcgcccccgccctgctgccccccccccaccagggcctgggccagccccagctgggcccccccctgctgcaccccccccccgcccagagctggcccgcccagctgccccccagagcccccctgcccggcaagggcaccagaggcagagccgaggtgtggaccgagtgccccagcagcagctgggccagagcccccagacccagcgcccccggcaagtag

SEQ ID NO: 221053 - DNA, 753 bp, Artificial Sequence
  derived and/or modified sequence
atgctgctgtacagcagcaagaagaagatcttcatgggcctgatcccctacgaccagagcggcttcgtgaacggcatcagacaggtgatcaccaaccacaagcaggtgcagcagcagaagctggagcagcagcagagaggcatgggcggccagcaggccccccccggcctgggccccatcctggaggaccaggccagacccagccagaacctgctgcagctgagacccccccagccccagccccagggcaccgtgggcgccagcggcgccaccggccagccccagccccagggcaccgcccagcccccccccggcgccccccagggcccccccggcgccgccagcggcccccccccccccggccccatcttcggccccagaaccctgggccccaccctgagctgcgaggccagcagcagcacccaccacagaagaagactgggctgcccccaccccagaccccccagcaccaccagcagccaccagggcctgctgagatgctgcctgagaagacagggcctgggccagccccagctgggcccccacagctgcatccaccacctgcccagccccggcccccacaacttccccctgggcctgcactgccaggtgagaggccccggcggcggccagagaagcggcctgagcgtgcccgccgcccccggcctggagcaccaggacagagtgctgctgggcagcaaggacatcggcagcaagaacgagggcagccccatggccttcgccgagctgtag

SEQ ID NO: 221054 - DNA, 1605 bp, Artificial Sequence
  derived and/or modified sequence
atggtgcccggcagcgagggccccgccagagccggcagcgtggtggccgacgtggtgttcgtgatcgagggcaccgccaacctgggcccctacttcgagggcctgagaaagcactacctgctgcccgccatcgagtacttcaacggcggcccccccgccgagaccgacttcggcggcgacgtgcccggcaacctgagcgccgcccaggtggccgcccagaacgccgtggaggccgccaagaaccagaaggccggcctgggccccagattcagccccatcacccccctgcagcaggccgcccccggcgtgggcccccccttcagccaggcccccgccccccagctgccccccggcccccccggcgcccccaagcccccccccgccagccagcccagcctggtgagcaccgtggcccccggcagcggcctggcccccaccgcccagcccggcgcccccagcatggccggcaccgtggcccccggcggcgtgagcggccccagccccgcccagctgggcgcccccgccctgggcggccagcagagcgtgagcaacaagctgctggcctggagcggcgtgctggagtggcaggagaagcccaagcccgccagcgtggacgccaacaccaagctgaccagaagcctgccctgccaggtgtacgtgaaccacggcgagaacctgaagaccgagcagtggccccagaagctgatcatgcagctgatcccccagcagctgctgaccaccctgggccccctgttcagaaacagcagaatggtgcagttccacttcaccaacaaggacctggagagcctgaagggcctgtacagaatcatgggcaacggcttcgccggctgcgtgcacttcccccacaccgccccctgcgaggtgagagtgctgatgctgctgtacagcagcaagaagaagatcttcatgggcctgatcccctacgaccagagcggcttcgtgaacggcatcagacaggtgatcaccaaccacaagcaggtgcagcagcagaagctggagcagcagcagagaggcatgggcggccagcaggccccccccggcctgggccccatcctggaggaccaggccagacccagccagaacctgctgcagctgagacccccccagccccagccccagggcaccgtgggcgccagcggcgccaccggccagccccagccccagggcaccgcccagcccccccccggcgccccccagggcccccccggcgccgccagcggcccccccccccccggccccatcctgagaccccagaaccccggcgccaacccccagctgagaagcctgctgctgaaccccccccccccccagaccggcgtgccccccccccaggccagcctgcaccacctgcagccccccggcgcccccgccctgctgccccccccccaccagggcctgggccagccccagctgggcccccccctgctgcaccccccccccgcccagagctggcccgcccagctgccccccagagcccccctgcccggccagatgctgctgagcggcggccccagaggccccgtgccccagcccggcctgcagcccagcgtgatggaggacgacatcctgatggacctgatctag

SEQ ID NO: 221055 - DNA, 1194 bp, Artificial Sequence
  derived and/or modified sequence
atggtgcccggcagcgagggccccgccagagccggcagcgtggtggccgacgtggtgttcgtgatcgagggcaccgccaacctgggcccctacttcgagggcctgagaaagcactacctgctgcccgccatcgagtacttcaacggcggcccccccgccgagaccgacttcggcggcgactacggcggcacccagtacagcctggtggtgttcaacaccgtggactgcgcccccgagagctacgtgcagtgccacgcccccaccagcagcgcctacgagttcgtgacctggctggacggcatcaagttcatgggcggcggcggcgagagctgcagcctgatcgccgagggcctgagcaccgccctgcagctgttcgacgacttcaagaagatgagagagcagatcggccagacccacagagtgtgcctgctgatctgcaacagccccccctacctgctgcccgccgtggagagcaccacctacagcggctgcaccaccgagaacctggtgcagcagatcggcgagagaggcatccacttcagcatcgtgagccccagaaagctgcccgccctgagactgctgttcgagaaggccgccccccccgccctgctggagcccctgcagccccccaccgacgtgagccaggaccccagacacatggtgctggtgagaggcctggtgctgcccgtgggcggcggcagcgcccccggccccctgcagagcaagcagcccgtgcccctgccccccgccgcccccagcggcgccaccctgagcgccgccccccagcagcccctgccccccgtgcccccccagtaccaggtgcccggcaacctgagcgccgcccaggtggccgcccagaacgccgtggaggccgccaagaaccagaaggccggcctgggccccagattcagccccatcacccccctgcagcaggccgcccccggcgtgggcccccccttcagccaggcccccgcccccgccctgctgccccccccccaccagggcctgggccagccccagctgggcccccccctgctgcaccccccccccgcccagagctggcccgcccagctgccccccagagcccccctgcccggccagatgctgctgagcggcggccccagaggccccgtgccccagcccggcctgcagcccagcgtgatggaggacgacatcctgatggacctgatctag

SEQ ID NO: 221056 - DNA, 780 bp, Artificial Sequence
  derived and/or modified sequence
atggtgcccggcagcgagggccccgccagagccggcagcgtggtggccgacgtggtgttcgtgatcgagggcaccgccaacctgggcccctacttcgagggcctgagaaagcactacctgctgcccgccatcgagtacttcaacggcggcccccccgccgagaccgacttcggcggcgactacggcggcacccagtacagcctggtggtgttcaacaccgtggactgcgcccccgagagctacgtgcagtgccacgcccccaccagcagcgcctacgagttcgtgacctggctggacggcatcaagttcatgggcggcggcggcgagagctgcagcctgatcgccgagggcctgagcaccgccctgcagctgttcgacgacttcaagaagatgagagagcagatcggccagacccacagagtgtgcctgctgatctgcaacagccccccctacctgctgcccgccgtggagagcaccacctacagcggctgcaccaccgagaacctggtgcagcagatcggcgagagaggcatccacttcagcatcgtgagccccagaaagctgcccgccctgagactgctgttcgagaaggccgcccccggcctggccggcgccgccgccgccagcgacagatgcgagcccggccccgaggcccacggcgccggcagcggcaccagagccgcctgctggggctggctgagccccagacccccccccgtgaaggccgccagcccccccgccagcagaagaaccctgagatgccaggtgagatgctgctag

SEQ ID NO: 221057 - protein, 326 aa, Artificial Sequence
  derived and/or modified sequence
MAPPAGGAAAAASDLGSAAVLLAVHAAVRPLGAGPDAEAQLRRLQLSADPERPGRFRLELLGAGPGAVNLEWPLESVSYTIRGPTQHELQPPPGGPGTLSLHFLNPQEAQRWAVLVRGATVEGQNGSKSNSPPALGPEACPVSLPSPPEASTLKGPPPEADLPRSPGNLTEREELAGSLARAIAGGDEKGAAQVAAVLAQHRVALSVQLQEACFPPGPIRLQVTLEDAASAASAASSAHVALQVHPHCTVAALQEQVFSELGFPPAVQRWVIGRCLCVPERSLASYGVRQDGDPAFLYLLSAPREAPAQLVLSFLHLHQCPRPPWL

SEQ ID NO: 221058 - protein, 387 aa, Artificial Sequence
  derived and/or modified sequence
MAPPAGGAAAAASDLGSAAVLLAVHAAVRPLGAGPDAEAQLRRLQLSADPERPGRFRLELLGAGPGAVNLEWPLESVSYTIRGPTQHELQPPPGGPGTLSLHFLNPQEAQRWAVLVRGATVEGQNGSKSNSPPALGPEACPVSLPSPPEASTLKGPPPEADLPRSPGNLTEREELAGSLARAIAGGDEKGAAQVAAVLAQHRVALSVQLQEACFPPGPIRLQVTLEDAASAASAASSAHVALQVHPHCTVAALQEQVFSELGFPPAVQRWVIGRCLCVPERSLASYGVRQDGDPAFLYLLSAPREAPATGPSPQHPQKMDGELGRLFPPSLGLPPGPQPAASSLPSPLQPSWSCPSCTFINAPDRPGCEMCSTQRPCTWDPLAAAST

SEQ ID NO: 221059 - DNA, 717 bp, Artificial Sequence
  derived and/or modified sequence
atgcccggtcggaccggactggctggcgaaatgcccgtcggctggggccctggtcgggctggtgcttctgagcctaatgagtcaacctgcgcacccgaggctttggacggccatctaggtgtcgcccgacgcgagggccctatactagggacacttcttgggcgaggtaagggtcactgtcaggccctgtcacagctcggccactgtccatcaccggcttggaataactactctgggatgatggacatcggcgtggctccatcccgggtcgggcctagcggtcactgcggggtgctgagatcgcattcacgcccaggagagctggctgttgttatgaaccataaagttccccgacaccgccctgtctcaagcgtgggaactgagctcctctgggtgcgctgtgctccaaaaatggtgcagttgcctatctgctgcttgcttctgaccccagcacctggaatcggacccagagctcacggacacctccatacaaaccttgagactcgaggcctcccaagggggactcgggagagccagcaagcagagggcgagggcgaggcaattcaagaaggtagaggagcatgcaagcgagctcaacgcaaagagggcgagggtccccgaggaccgtgcgtagtgagggctggtggcgtaggctggggcactagacaggtcgcaggggaacctccattggtcgactgctccacagccggaacttag

SEQ ID NO: 221060 - DNA, 981 bp, Artificial Sequence
  derived and/or modified sequence
atggcaccacctgcgggtggagctgcagcggccgctagcgatctgggctcagccgcggtgctgctagctgtgcacgccgcggtgaggccgctaggcgccggccctgatgccgaggcacagctgaggcgtctccagctctccgccgatcccgaacgcccagggaggttccgactggagctgcttggcgcaggccctggtgccgtgaatttggagtggcctttagaaagcgtcagctacacaataagggggcccacccaacatgaattgcagcctcctcctggaggaccggggacactatctctgcacttcttgaatccccaggaggctcaacggtgggccgtgcttgtccgcggagctaccgtagaaggtcagaacggctccaaatccaactcccctcccgccttaggacccgaagcttgtcccgtgtcactgccaagcccccccgaggcttccactctgaagggcccaccccctgaagccgacctgccgcggagcccaggtaacctgacggagagagaagagttggccggtagccttgccagggccatcgccggcggtgacgagaagggggccgcgcaagtagctgctgtgctcgcacagcacagagtggcactgtccgtgcagctacaggaagcttgtttccccccaggaccaatccgcctgcaggtgacgcttgaggacgccgccagcgctgccagtgcggcgtcctccgcccatgtggctctccaggtgcatccccactgcaccgtggctgccttgcaggaacaggtatttagcgagctcggattccccccggccgtacagcgctgggtcatcggtaggtgtttgtgtgtgccagaaagatcactggccagctatggggttaggcaggatggagatccagcttttctgtaccttctctccgccccaagggaggccccggcccaacttgtgctcagcttcctgcacctgcaccaatgtcccagaccgccttggctgtag

SEQ ID NO: 221061 - DNA, 1164 bp, Artificial Sequence
  derived and/or modified sequence
atggccccgcccgcaggaggtgctgctgcggctgccagtgatctaggtagcgccgcagtgcttctggctgtccacgcagccgttcgccctctgggggccggccccgacgcggaagcccaactgaggcggctgcagttgtccgcggaccccgagcggccgggcaggttccgtcttgagctgctgggagccggacccggggccgtgaacctggagtggccgctggagagcgtttcttacacaattcgaggcccaacccaacacgaactccaacctccaccagggggcccgggaacccttagcttgcattttctgaacccccaggaggcccaacggtgggcagttctggttcggggtgccactgtggaggggcagaacggttctaagtctaacagcccacccgccctgggccctgaggcttgccccgtgtccctccccagtccccccgaggcctctaccctaaagggccccccccccgaggccgaccttccaaggagcccagggaacttgaccgagagggaagaactcgcaggctcactggctagggcaatagctggtggcgacgaaaagggcgccgcgcaagtagctgcagtgctggcccaacatcgcgttgcactctccgttcagctgcaggaggcctgttttcccccggggcctataaggctacaagtgaccctcgaggacgcggcctctgcggctagcgctgcatccagcgctcatgtcgccctccaggtgcacccacattgcaccgttgctgcactgcaggagcaagtcttcagtgaattgggttttccgccggccgtgcagcggtgggtgatcggtcggtgtctttgcgtacctgaacgctccctggccagctatggagttcggcaggatggcgaccccgcatttctgtacctgctcagtgcccctagagaagcccctgcaacaggcccctcccctcagcacccccaaaagatggatggcgaactcggaagacttttcccaccctcattggggctgccccctggtccacagcccgcggccagcagcctgcccagccccttacagccctcttggtcctgtccctcgtgcactttcatcaatgcccccgaccgaccgggttgcgagatgtgcagcacgcagcgcccttgtacatgggatccccttgccgctgccagcacctag

SEQ ID NO: 221062 - DNA, 981 bp, Artificial Sequence
  derived and/or modified sequence
atggcccctcctgctggaggagctgctgctgctgccagtgacctgggcagcgctgctgtgctgctggccgtgcacgccgctgtgcggcccctgggcgccggcccagatgctgaggcccagctgcggcggctgcagctgtctgctgaccctgagaggcctggccgcttccggctggagctgctgggcgccggccctggagctgtgaacctggagtggcccctggagagcgtgtcctacaccatccggggccccacccagcacgagctgcagcccccacctgggggccctggcaccctgagcctgcacttcctgaacccccaggaggcccagcgctgggccgtgctggtgcggggggccaccgtggagggccagaatggcagcaagagcaacagccccccagccctgggccctgaggcctgccctgtgtccctgcccagccccccagaggccagcaccctgaagggccccccacctgaggccgacctgcccaggagccctggcaacctgacagagcgggaggagctggccggcagcctggcccgggccatcgctggaggagatgagaagggagctgcccaggtggccgctgtgctggcccagcaccgggtggccctgtctgtgcagctgcaggaggcctgcttccccccaggccccatccggctgcaggtgaccctggaggatgctgccagcgctgccagcgctgccagcagcgcccacgtggccctgcaggtgcacccccactgcaccgtggccgccctgcaggagcaggtgttttctgagctgggcttccccccagctgtgcagcgctgggtgattggccgctgcctgtgtgtgcctgagaggagcctggccagctatggagtgcggcaggatggagaccctgccttcctgtacctgctgagcgccccccgggaggccccagcccagctggtgctgtccttcctgcacctgcaccagtgccccaggcctccctggctgtag

SEQ ID NO: 221063 - DNA, 1164 bp, Artificial Sequence
  derived and/or modified sequence
atggcccctcctgctggaggagctgctgctgctgccagtgacctgggcagcgctgctgtgctgctggccgtgcacgccgctgtgcggcccctgggcgccggcccagatgctgaggcccagctgcggcggctgcagctgtctgctgaccctgagaggcctggccgcttccggctggagctgctgggcgccggccctggagctgtgaacctggagtggcccctggagagcgtgtcctacaccatccggggccccacccagcacgagctgcagcccccacctgggggccctggcaccctgagcctgcacttcctgaacccccaggaggcccagcgctgggccgtgctggtgcggggggccaccgtggagggccagaatggcagcaagagcaacagccccccagccctgggccctgaggcctgccctgtgtccctgcccagccccccagaggccagcaccctgaagggccccccacctgaggccgacctgcccaggagccctggcaacctgacagagcgggaggagctggccggcagcctggcccgggccatcgctggaggagatgagaagggagctgcccaggtggccgctgtgctggcccagcaccgggtggccctgtctgtgcagctgcaggaggcctgcttccccccaggccccatccggctgcaggtgaccctggaggatgctgccagcgctgccagcgctgccagcagcgcccacgtggccctgcaggtgcacccccactgcaccgtggccgccctgcaggagcaggtgttttctgagctgggcttccccccagctgtgcagcgctgggtgattggccgctgcctgtgtgtgcctgagaggagcctggccagctatggagtgcggcaggatggagaccctgccttcctgtacctgctgagcgccccccgggaggccccagccaccggccccagcccccagcacccccagaagatggatggagagctgggccgcctcttcccccccagcctgggcctgcccccaggcccccagcctgctgccagcagcctgcccagccccctgcagcccagctggagctgccccagctgcaccttcatcaatgccccagaccggcccggctgtgagatgtgcagcacccagaggccctgcacctgggaccccctggccgccgccagcacctag

SEQ ID NO: 221064 - DNA, 981 bp, Artificial Sequence
  derived and/or modified sequence
atggccccccccgccggcggcgccgccgccgccgccagcgacctggggagcgcagctgttctcctggcggtacacgccgccgttcggcctttaggcgcagggccagacgccgaagctcagcttcgtaggttacagctcagcgcagaccccgagagacccgggagattcagactcgaactgctgggggccggacccggggctgtaaacttggaatggcctctcgaatccgtctcctatacaattcgcggtccaacgcagcatgaactgcaaccgccacctggcgggcccggaaccctttcgcttcactttttgaacccacaggaggctcaaagatgggccgttcttgtacgcggggccaccgtggaggggcagaacggatctaagtccaatagcccccccgcgttagggcctgaagcatgtcccgtgtcgctccctagcccacccgaagcttctactttgaagggaccaccccctgaagcagacttgcctcgctctcctggtaatcttacagaacgcgaagagcttgcagggagtctggcacgggccatagccggcggagacgagaagggggctgcacaggtcgctgcagtgctggctcagcatagagtcgcactatcagtgcagctgcaggaggcttgctttcccccaggacctataaggcttcaggtgactctcgaggacgcagcaagcgcggcttcagccgcctcatctgcacatgttgccttgcaggtgcacccacactgcacagttgctgcccttcaagagcaagttttttcagagctgggatttccccccgcggtgcaaaggtgggtgattggccgatgcttgtgcgtacccgagaggtccttagctagctacggggtgagacaggatggggacccggcattcctgtacctcttatctgctcccagggaggctcctgctcaactggtcctgagtttcctacacctgcaccagtgccctaggcccccttggctctag

SEQ ID NO: 221065 - DNA, 1164 bp, Artificial Sequence
  derived and/or modified sequence
atggccccccccgccggcggcgccgccgccgccgccagcgacctgggttctgcagccgttttgttggcagtgcatgccgccgttcggcctttaggtgcaggccctgacgctgaagctcagttgcgccgcctgcagctgtcagccgatcctgagaggcccggccgattcaggctggaactgctgggggcaggtccgggcgctgtgaacctggagtggcccttagaatcagtttcctacaccatccgcggccccacacagcacgagctgcagcccccgcctggaggcccaggaaccttaagtctccactttctaaaccctcaagaggctcaaaggtgggcggtgctggtccggggcgccaccgtcgagggacagaacgggagcaagagcaatagccctcctgcgcttggacctgaggcttgtccagtttcattaccctcccctcccgaggcttcaacgctgaaggggccacctcccgaggccgatttaccgaggagtcccggcaatttgaccgaaagagaagagctggccgggagcctcgcccgcgccattgcaggcggtgatgaaaagggggccgcacaggtggccgctgtgcttgcacaacacagggtggctctgtccgttcagttgcaggaagcgtgcttccctccgggccctatcaggctgcaagtcaccttggaagatgccgcttctgctgctagcgctgcttcaagcgctcacgtggcccttcaggttcacccccattgcaccgtggcagcccttcaggagcaggtttttagcgaactgggattcccccctgcagtccaaaggtgggttatcgggcgatgtctgtgtgtccccgagagatctctggctagttacggtgtacgtcaggacggcgatcctgcattcctgtacttgttaagcgccccccgggaggctccggcgacaggccccagcccgcagcacccacagaagatggatggagagcttgggcgactgtttccccctagtctcggattgcctcccgggccacagcccgctgccagcagtctgcccagccccttgcagccctcctggtcgtgtccatcctgtacttttataaatgctcctgaccgcccaggctgtgagatgtgctccacacagagaccgtgcacatgggacccactggccgcggctagcacttag

SEQ ID NO: 221066 - DNA, 981 bp, Artificial Sequence
  derived and/or modified sequence
atggccccacccgctggaggggctgccgctgccgcttccgaccttggtagcgccgctgtacttttagccgtgcacgccgctgtaagaccgttaggtgcgggaccggacgccgaggcacagctgaggagattgcaattatctgctgaccctgagcggcctggtaggtttaggctggaattattgggggcaggccctggagcagtcaatctggaatggcctttggaatctgtatcatatacgattagaggcccaacccaacacgagcttcagcccccacctggaggcccaggaacactgagcctccactttctgaatccacaggaggcacagaggtgggccgtgctggtcaggggggcaaccgtggaaggccaaaatggctccaaaagtaactcgccaccagcccttggcccagaggcctgccccgtgagtctaccaagcccgccagaagcttctactctcaagggtccccctccggaagccgacttaccgaggagcccaggcaatctgacagagcgtgaggagctggccggaagtctagcgcgagcaatcgcaggcggtgacgagaagggggcagcccaggtcgccgctgtgctggcccagcacagggtcgctctctcagtgcagcttcaggaagcttgcttccccccaggccctatcaggctgcaggtgactctggaggatgctgcgtccgccgctagtgccgcaagttctgctcacgtggctctgcaggtccatcctcactgtactgtggctgccctccaggagcaggtgttctcagagctaggcttcccgcctgccgtgcagcggtgggtcatcggacgatgcctgtgtgtgcccgagagatctctggccagttacggagtgcggcaggacggcgaccctgcttttctttatctgctttcagccccaagggaggcccctgctcaactggtgctctctttcctccatttacatcaatgtccgcgacccccatggctctag

SEQ ID NO: 221067 - DNA, 1164 bp, Artificial Sequence
  derived and/or modified sequence
atggcacctccagctggtggggcagctgccgcagctagcgaccttggctccgccgctgtgctgctcgctgtgcacgccgcagtgcggcctctcggcgcaggtcctgacgccgaggctcagctgagaaggcttcagcttagtgctgaccccgagcggccaggtcggtttcggctggagttactgggggctggccctggagcagtgaacctagaatggccattagagagcgtcagctacacgatcagagggccaactcagcacgagctccaaccacctccgggagggccaggaaccctttctcttcatttcctgaatcctcaggaagcacagcgctgggctgtactcgtgcggggtgcgacagtggaaggccagaatggttcaaaaagcaatagcccaccggctttgggacctgaagcatgccctgtgagtctgcctagtccacccgaggcatccaccttgaagggtccccctcccgaagcggacctgcccagatcacccggtaaccttacggaaagagaagagctggctggcagtctggccagggccatagcgggaggagacgagaagggggcagcacaggtggcagccgtactcgctcagcacagggttgccctgagcgtacaacttcaggaggcatgcttccctccgggtcccatccggctgcaggttactctagaggatgctgcctccgctgcatccgctgcttcatctgctcatgtggcactgcaggttcacccccattgcacggtcgccgctctgcaggaacaggttttctccgagctcggttttcctcccgctgttcagcgctgggtgatagggcgatgcctctgtgtacctgagcgttctctcgcgtcatacggggtgcgtcaggatggggacccagcgtttctttatctgctcagcgccccaagggaggctcctgctaccgggccttctccacagcaccctcaaaagatggacggcgagttgggcagactttttccgccttctcttgggcttccgccagggcctcagccagccgcttcttcgctacccagcccattgcaacctagctggtcctgtccttcatgtaccttcattaacgcacctgatcggcctggctgcgagatgtgcagcacacaacgaccgtgtacctgggatcctctggccgcagccagcacatag

SEQ ID NO: 221068 - DNA, 1687 bp, Artificial Sequence
  derived and/or modified sequence
gtgtgggcgtggcgggggctggggtctgcgggcgaaggtggcagcccattggaggtcccgggagcgaagtccagctgccgttaggcgctgggatagtcgcacgctggatgcatctacgtccgccgagcccctggggcgaagaggccgcgtccgccttcagttgtggccggtgcttcgccccctgacccttcgcccccaaagaccagctctaacgtgagcgcctcggccgccctgccccagcctcgtacacgccgccagcctcgcccagccggtgtccggagaccctcgggccgtgtccatttgtgggcaaagccagcggggcaggcttggccagagtgcaccactcggcgccgtcccaggcccgacgctctgggcgcgcccggaaccccaggttcgcggcccgtgtttccgaccggcggagggggctcagcggcccgatcccacggaagcgcgctcggaggggtgggacccggccggaccggagatggcgccgccagcgggcggggcggcggcggcggcctcggacttgggctccgccgcagtgctcttggctgtgcacgccgcggtgaggccgctgggcgccgggccagacgccgaggcacagctgcggaggctgcagctgagcgcggaccctgagcggcctgggcgcttccggctggagctgctgggcgcgggacctggggcggttaatttggagtggcccctggagtcagtttcctacaccatccgaggccccacccagcacgagctacagcctccaccaggagggcctggaaccctcagcctgcacttcctcaaccctcaggaagctcagcggtgggcagtcctagtccgaggtgccaccgtggaaggacagaatggcagcaagagcaactcaccaccagccttgggcccagaagcatgccctgtctccctgcccagtcccccggaagcctccacactcaagggccctccacctgaggcagatcttcctaggagccctggaaacttgacggagagagaagagctggcagggagcctggcccgggctattgcaggtggagacgagaagggggcagcccaagtggcagccgtcctggcccagcatcgtgtggccctgagtgttcagcttcaggaggcctgcttcccacctggccccatcaggctgcaggtcacacttgaagacgctgcctctgccgcatccgccgcgtcctctgcacacgttgccctgcaggtccacccccactgcactgttgcagctctccaggagcaggtgttctcagagctcggtttcccgccagccgtgcaacgctgggtcatcggacggtgcctgtgtgtgcctgagcgcagccttgcctcttacggggttcggcaggatggggaccctgctttcctctacttgctgtcagctcctcgagaagccccagcccagctggtcctgtccttcctgcaccttcatcaatgccccagaccgccctggctgtgagatgtgtagcacccagaggccctgcacttgggacccccttgctgcagcttccacctagcagccaccagaggttacaaggggagagtggcccttccctcacaagtccgacatctccaggcccccactgaactccggggacctctactgactgcttgctgggacagtcaccagggttggggggaagggccacaaaatgaaaccattaaagacccttaagagcca

SEQ ID NO: 221069 - DNA, 1765 bp, Artificial Sequence
  derived and/or modified sequence
attggaggtcccgggagcgaagtccagctgccgttaggcgctgggatagtcgcacgctggatgcatctacgtccgccgagcccctggggcgaagaggccgcgtccgccttcagttgtggccggtgcttcgccccctgacccttcgcccccaaagaccagctctaacgtgagcgcctcggccgccctgccccagcctcgtacacgccgccagcctcgcccagccggtgtccggagaccctcgggccgtgtccatttgtgggcaaagccagcggggcaggcttggccagagtgcaccactcggcgccgtcccaggcccgacgctctgggcgcgcccggaaccccaggttcgcggcccgtgtttccgaccggcggagggggctcagcggcccgatcccacggaagcgcgctcggaggggtgggacccggccggaccggagatggcgccgccagcgggcggggcggcggcggcggcctcggacttgggctccgccgcagtgctcttggctgtgcacgccgcggtgaggccgctgggcgccgggccagacgccgaggcacagctgcggaggctgcagctgagcgcggaccctgagcggcctgggcgcttccggctggagctgctgggcgcgggacctggggcggttaatttggagtggcccctggagtcagtttcctacaccatccgaggccccacccagcacgagctacagcctccaccaggagggcctggaaccctcagcctgcacttcctcaaccctcaggaagctcagcggtgggcagtcctagtccgaggtgccaccgtggaaggacagaatggcagcaagagcaactcaccaccagccttgggcccagaagcatgccctgtctccctgcccagtcccccggaagcctccacactcaagggccctccacctgaggcagatcttcctaggagccctggaaacttgacggagagagaagagctggcagggagcctggcccgggctattgcaggtggagacgagaagggggcagcccaagtggcagccgtcctggcccagcatcgtgtggccctgagtgttcagcttcaggaggcctgcttcccacctggccccatcaggctgcaggtcacacttgaagacgctgcctctgccgcatccgccgcgtcctctgcacacgttgccctgcaggtccacccccactgcactgttgcagctctccaggagcaggtgttctcagagctcggtttcccgccagccgtgcaacgctgggtcatcggacggtgcctgtgtgtgcctgagcgcagccttgcctcttacggggttcggcaggatggggaccctgctttcctctacttgctgtcagctcctcgagaagccccagccacaggacctagccctcagcacccccagaagatggacggggaacttggacgcttgtttcccccatcattggggctacccccaggcccccagccagctgcctccagcctgcccagtccactccagcccagctggtcctgtccttcctgcaccttcatcaatgccccagaccgccctggctgtgagatgtgtagcacccagaggccctgcacttgggacccccttgctgcagcttccacctagcagccaccagaggttacaaggggagagtggcccttccctcacaagtccgacatctccaggcccccactgaactccggggacctctactgactgcttgctgggacagtcaccagggttggggggaagggccacaaaatgaaaccattaaagacccttaagagcca

SEQ ID NO: 221070 - DNA, 981 bp, Artificial Sequence
  derived and/or modified sequence
atggccccccccgccggcggcgccgccgccgccgccagcgacctgggcagcgccgccgtgctgctggccgtgcacgccgccgtgagacccctgggcgccggccccgacgccgaggcccagctgagaagactgcagctgagcgccgaccccgagagacccggcagattcagactggagctgctgggcgccggccccggcgccgtgaacctggagtggcccctggagagcgtgagctacaccatcagaggccccacccagcacgagctgcagcccccccccggcggccccggcaccctgagcctgcacttcctgaacccccaggaggcccagagatgggccgtgctggtgagaggcgccaccgtggagggccagaacggcagcaagagcaacagcccccccgccctgggccccgaggcctgccccgtgagcctgcccagcccccccgaggccagcaccctgaagggccccccccccgaggccgacctgcccagaagccccggcaacctgaccgagagagaggagctggccggcagcctggccagagccatcgccggcggcgacgagaagggcgccgcccaggtggccgccgtgctggcccagcacagagtggccctgagcgtgcagctgcaggaggcctgcttcccccccggccccatcagactgcaggtgaccctggaggacgccgccagcgccgccagcgccgccagcagcgcccacgtggccctgcaggtgcacccccactgcaccgtggccgccctgcaggagcaggtgttcagcgagctgggcttcccccccgccgtgcagagatgggtgatcggcagatgcctgtgcgtgcccgagagaagcctggccagctacggcgtgagacaggacggcgaccccgccttcctgtacctgctgagcgcccccagagaggcccccgcccagctggtgctgagcttcctgcacctgcaccagtgccccagacccccctggctgtag

SEQ ID NO: 221071 - DNA, 1164 bp, Artificial Sequence
  derived and/or modified sequence
atggccccccccgccggcggcgccgccgccgccgccagcgacctgggcagcgccgccgtgctgctggccgtgcacgccgccgtgagacccctgggcgccggccccgacgccgaggcccagctgagaagactgcagctgagcgccgaccccgagagacccggcagattcagactggagctgctgggcgccggccccggcgccgtgaacctggagtggcccctggagagcgtgagctacaccatcagaggccccacccagcacgagctgcagcccccccccggcggccccggcaccctgagcctgcacttcctgaacccccaggaggcccagagatgggccgtgctggtgagaggcgccaccgtggagggccagaacggcagcaagagcaacagcccccccgccctgggccccgaggcctgccccgtgagcctgcccagcccccccgaggccagcaccctgaagggccccccccccgaggccgacctgcccagaagccccggcaacctgaccgagagagaggagctggccggcagcctggccagagccatcgccggcggcgacgagaagggcgccgcccaggtggccgccgtgctggcccagcacagagtggccctgagcgtgcagctgcaggaggcctgcttcccccccggccccatcagactgcaggtgaccctggaggacgccgccagcgccgccagcgccgccagcagcgcccacgtggccctgcaggtgcacccccactgcaccgtggccgccctgcaggagcaggtgttcagcgagctgggcttcccccccgccgtgcagagatgggtgatcggcagatgcctgtgcgtgcccgagagaagcctggccagctacggcgtgagacaggacggcgaccccgccttcctgtacctgctgagcgcccccagagaggcccccgccaccggccccagcccccagcacccccagaagatggacggcgagctgggcagactgttcccccccagcctgggcctgccccccggcccccagcccgccgccagcagcctgcccagccccctgcagcccagctggagctgccccagctgcaccttcatcaacgcccccgacagacccggctgcgagatgtgcagcacccagagaccctgcacctgggaccccctggccgccgccagcacctag

SEQ ID NO: 221072 - protein, 631 aa, Artificial Sequence
  derived and/or modified sequence
MNPSTPSYPTASLYVGDLHPDVTEAMLYEKFSPAGPILSIRICRDLITSGSSNYAYVNFQHTKDAEHALDTMNFDVIKGKPVRIMWSQRDPSLRKSGVGNIFVKNLDKSINNKALYDTVSAFGNILSCNVVCDENGSKGYGFVHFETHEAAERAIKKMNGMLLNGRKVFVGQFKSRKEREAELGARAKEFPNVYIKNFGEDMDDERLKDLFGKFGPALSVKVMTDESGKSKGFGFVSFERHEDAQKAVDEMNGKELNGKQIYVGRAQKKVERQTELKRTFEQMKQDRITRYQVVNLYVKNLDDGIDDERLRKAFSPFGTITSAKVMMEGGRSKGFGFVCFSSPEEATKAVTEMNGRIVATKPLYVALAQRKEERQAYLTNEYMQRMASVRAVPNQRAPPSGYFMTAVPQTQNHAAYYPPSQIARLRPSPRWTAQGARPHPFQNKPSAIRPGAPRVPFSTMRPASSQVPRVMSTQRVANTSTQTVGPRPAAAAAAAATPAVRTVPRYKYAAGVRNPQQHRNAQPQVTMQQLAVHVQGQETLTASRLASAPPQKQKQMLGERLFPLIQAMHPTLAGKITGMLLEIDNSELLYMLESPESLRSKVDEAVAVLQAHQAKEATQKAVNSATGVPTV

SEQ ID NO: 221073 - DNA, 608 bp, Artificial Sequence
  derived and/or modified sequence
atatgctcgagtctccagagtcactccgttctaaggttgatgaagctgtagctgtactacaagcccaccaagctaaagaggctgcccagaaagcagttaacagtgccaccggtgttccaactgtttaaaaaacaaggacattctcctccataaccatgacaccgccatgaaaacgatcagcaccgtcgaatcctcacgccccactcaagttccttgattgcttcaataatgtcctccgtagcaaaaggatctagttcaaaatcgggagttacatttcattgtcatgcctaaaacgtaagaattgctcattcactttggagcagttcttcagtctatccttgattttcatgaccttgacacttttgaacattatagaccagttattcaatagaatatctttcaatctgggtttgtccgatacctctttattattagattgaaatgatacattttggtggaactatcacagaattgacattgcattcttctcattacatcctgtctggtggcctgtgattctgttttatctcattaccaatggcgtttgttttgagcatttgattaagttgttatctgccactataaagttgctatttttctctttataa

SEQ ID NO: 221074 - DNA, 1896 bp, Artificial Sequence
  derived and/or modified sequence
atgaatccgtcaacgccgtcctatcctaccgccagcctgtacgtaggagatctgcaccctgacgttacggaggcaatgctgtatgaaaagtttagtcccgcaggaccgatacttagcataagaatttgcagggatttgataacctcagggtccagtaattatgcttacgtaaacttccagcataccaaggacgctgagcatgcacttgatacaatgaactttgacgtcattaagggaaaaccagtgaggattatgtggagtcagcgcgacccaagcttaaggaaatcaggcgtgggcaacatctttgtaaagaatcttgacaaaagcattaataataaggctctctacgacactgtatcagcctttggtaatattctatcttgcaatgtcgtatgcgacgagaatgggagcaagggctacggatttgtacacttcgagactcacgaagcagccgagcgagctataaagaagatgaatggcatgctactgaacggccggaaggtgtttgtggggcagtttaagtctcgcaaggagcgggaggcagaactaggcgccagggcgaaggaattcccaaatgtctacattaaaaattttggcgaagatatggacgacgagaggctcaaggatttgttcggtaaatttggacccgccctgtctgtaaaggtaatgacagatgagagtggcaagtcaaaaggctttgggttcgtgtcttttgaaaggcatgaggacgcccagaaagcagtggacgagatgaatggtaaggagttaaatgggaaacaaatctacgtgggtcgggcccagaagaaggttgagaggcagacagagctaaagaggaccttcgaacagatgaagcaggacaggataacaagataccaggttgtgaacctgtatgtgaaaaacctcgacgatgggattgacgacgaacggctccggaaagccttcagcccgtttgggacgattaccagtgcaaaggtcatgatggaggggggtagatccaagggctttggctttgtctgcttttcttcccctgaggaagccactaaggccgtgacagagatgaacggacgtatagttgcgacaaaacccctttacgtcgccttggcgcagcgtaaggaggaaagacaggcgtaccttactaacgagtacatgcagcgtatggccagcgtgcgcgccgtgcccaaccagagggcgcccccaagcggctactttatgacagctgtccctcaaacccagaatcatgctgcttattatccgcccagccaaatagctcggctgagacctagcccccggtggacagctcagggcgcccgcccccatccttttcagaacaagccatccgccatcaggccaggggcccctcgagtaccgttttccaccatgcggcccgctagcagccaggtccctcgcgtgatgagtactcagagagttgcaaatacctctacgcagacagtgggtccaaggccagccgcggccgctgctgccgctgccaccccagccgtcagaactgttccacgctacaagtacgccgctggagtgcgcaatccacagcaacaccgtaatgcccagcctcaggtaacaatgcagcagcttgccgttcatgtacagggtcaggaaaccctgaccgcatcaaggctggcttcagcgcccccacagaaacagaagcagatgttgggcgagcgtttgtttcctctcatccaagccatgcaccctactctggcaggaaagattacggggatgcttctggaaatcgataactccgagttgctctacatgttagagtcacctgagtcactcagaagtaaggtggatgaggctgttgctgtgttgcaagcccatcaggcgaaggaggctacacaaaaggccgtgaacagcgctacaggcgtcccaacagtctag

SEQ ID NO: 221075 - DNA, 1896 bp, Artificial Sequence
  derived and/or modified sequence
atgaaccccagcacccccagctaccccacagccagcctgtatgtgggggacctgcacccagatgtgacagaggccatgctgtatgagaagttctccccagctggccccatcctgagcatccgcatctgccgggacctgatcaccagcggcagcagcaactatgcctacgtgaacttccagcacaccaaggatgctgagcacgccctggacaccatgaactttgatgtgatcaagggcaagcctgtgcgcatcatgtggagccagagggaccccagcctgaggaagagcggcgtgggcaacatctttgtgaagaacctggacaagagcatcaacaacaaggccctgtatgacacagtgtctgccttcggcaacatcctgagctgcaatgtggtgtgtgatgaaaatggcagcaagggctacggctttgtgcactttgagacccatgaggccgctgagcgggccatcaagaagatgaatggcatgctgctgaatggaaggaaggtgtttgtgggccagttcaagagcaggaaggagcgggaggccgagctgggcgcccgggccaaggagttccccaacgtgtacatcaagaactttggagaggacatggatgatgagcggctgaaggacctgtttgggaagtttggacctgccctgtctgtgaaggtgatgacagatgaaagtggcaagagcaaaggatttggatttgtgtcctttgaaagacatgaagatgcccagaaggctgtggatgagatgaatggcaaggagctgaatggcaagcagatctacgtgggccgggcccagaagaaggtggagcggcagacagagctgaagaggacctttgagcagatgaagcaggaccgcatcacccgctaccaggtggtgaacctgtatgtgaagaacctggatgatggcattgatgatgagcggctgaggaaggccttcagccccttcggcaccatcaccagcgccaaggtgatgatggagggcggccgcagcaaaggatttggatttgtgtgcttcagcagccctgaggaggccaccaaggctgtgacagagatgaatggaagaattgtggccaccaagcccctgtatgtggccctggcccagaggaaggaggagcggcaggcctacctgaccaatgagtacatgcagaggatggcctctgtgcgggctgtgcccaaccagagggccccacccagcggctacttcatgacagctgtgccccagacccagaaccacgccgcctactacccacccagccagatcgcccggctgcggcccagcccccgctggacagcccagggcgcccggccccaccccttccagaacaagcccagcgccatccggcctggggccccccgggtgcccttcagcaccatgaggcctgccagcagccaggtgccccgggtgatgagcacccagagggtggccaacaccagcacccagacagtgggccccaggcctgctgctgctgctgctgctgctgccaccccagctgtgaggacagtgccccgctacaagtatgctgctggggtgaggaacccccagcagcacagaaatgcccagccccaggtgaccatgcagcagctggccgtgcacgtgcagggccaggagaccctgacagccagccggctggccagcgccccaccccagaagcagaagcagatgctgggggagcggctcttccccctcatccaggccatgcaccccaccctggccggcaagatcaccggcatgctgctggagattgacaacagcgagctgctgtacatgctggagagccctgagagcctgcggagcaaggtggatgaagctgtggccgtgctgcaggcccaccaggccaaggaggccacccagaaggctgtgaacagcgccaccggggtgcccaccgtgtag

SEQ ID NO: 221076 - DNA, 1896 bp, Artificial Sequence
  derived and/or modified sequence
atgaaccccagcacccccagctaccccaccgccagcctgtacgtgggagatctgcaccctgacgtgaccgaggccatgctatatgagaaattcagcccagctggcccaattctttctattcgcatctgtagggaccttattacaagcggctcatcgaattatgcgtatgttaacttccagcacactaaggatgccgaacatgccttggatactatgaattttgacgtcataaaggggaaacccgttaggattatgtggagccagcgggacccaagtcttcggaaaagcggcgtgggcaatatcttcgtgaagaacctcgataagtctatcaacaacaaggcgctctacgacacagtgagtgccttcggaaacatcctgtcatgtaacgtcgtctgcgatgagaacggttccaaagggtacggattcgtacactttgagacacatgaagcagccgaacgagcaatcaaaaagatgaatggtatgttattaaatggtagaaaagtgtttgtgggtcagtttaaatctaggaaagaaagagaggctgaattgggagccagagccaaggagttccccaacgtgtatataaagaatttcggagaggacatggacgatgaaagacttaaggacctgttcgggaaatttggcccggccctttctgttaaagtgatgactgatgaatctgggaagagcaagggcttcggctttgtatctttcgagagacacgaagatgcccagaaggccgtcgacgagatgaatgggaaggagctgaatggaaagcagatatacgtgggccgggctcagaaaaaggtcgaaagacaaaccgaattgaagagaacctttgagcagatgaagcaggacaggatcacaaggtaccaggttgtgaatctctacgtgaagaatctcgacgatggaatcgacgatgagcgacttcgcaaagccttttcaccttttgggacaattacttccgcaaaggttatgatggaggggggcaggtctaaagggttcggctttgtatgcttctcatctcctgaggaggccacaaaggcagtgacagaaatgaatgggcgtatcgttgctaccaagcctctgtatgtggcgcttgctcagcgaaaggaagaaagacaagcttacttgaccaacgagtacatgcagcggatggcgagtgtgcgggccgtgcctaatcagcgcgcccccccatctggttactttatgactgccgtgccacaaacacaaaaccatgctgcttattaccccccatcacagattgctaggcttaggcccagcccacggtggacagctcagggcgcaaggcctcatccatttcagaacaaaccaagcgctattcgccccggggcgcctcgagtcccattttcaaccatgcggcccgcctcctcacaggtgcctagagtaatgtccacccagcgggtggccaacacgtctacccagacagtcgggccccgcccagcagcagccgctgccgccgccgccacgccagcagtacgcactgtccctcgctataagtatgccgcgggcgtgaggaacccccagcagcaccgtaacgctcagccacaagtgacaatgcaacagctcgctgtgcacgtgcagggacaggaaacgctgactgcgtccaggttggcctcggcgccaccacagaagcaaaagcagatgctcggggagagactctttcccctgatccaggcaatgcatcccaccctggccgggaagatcaccggaatgctactcgagattgacaactcagaactcctgtacatgctggagtcacctgaatcactgcgatccaaggtcgacgaggcggtggctgtgctccaagctcaccaggcaaaagaggccactcagaaagccgtcaattcagccaccggggtgcctactgtgtag

SEQ ID NO: 221077 - DNA, 3090 bp, Artificial Sequence
  derived and/or modified sequence
gtcgcggcttgtgtgcctgcgggcagccgtgccgagaatgaaccccagcacccccagctacccaacggcctcgctctacgtgggggacctccaccccgacgtgactgaggcgatgctctacgagaagttcagcccggcagggcccatcctctccatccggatctgcagggacttgatcaccagcggctcctccaactacgcgtatgtgaacttccagcatacgaaggacgcggagcatgctctggacaccatgaattttgatgttataaagggcaagccagtacgcatcatgtggtctcagcgtgatccatcacttcgaaaaagtggagtgggcaacatattcgttaaaaatctggataagtccattaataataaagcactgtatgatacagtttctgcttttggtaacatcctttcgtgtaacgtggtttgtgatgaaaatggttccaagggttatggatttgtacactttgagacacacgaagcagctgaaagagctattaaaaaaatgaacggaatgctcctaaatggtcgcaaagtatttgttggacaatttaagtctcgtaaagaacgagaagctgaacttggagctagggcaaaagagttccccaatgtttacatcaagaattttggagaagacatggatgatgagcgccttaaggatctctttggcaagttcgggcccgccttaagtgtgaaagtaatgaccgatgaaagtggaaaatccaaaggatttggatttgtaagctttgaaaggcatgaagatgcacagaaagctgtagatgagatgaatggaaaggagctcaatggaaaacaaatttacgttggtcgagctcagaaaaaagtggaacggcagacggaacttaagcgcacatttgaacagatgaagcaagataggatcaccagataccaggttgttaatctttatgtgaaaaatcttgatgatggtattgatgatgaacgtctccggaaagcgttttctccatttggtacaatcactagtgcaaaggttatgatggaaggtggtcgcagcaaagggtttggttttgtatgtttctcctccccagaagaagccactaaagcagttacagaaatgaacggtagaattgtggccacaaagccattgtatgtagctttagctcagcgcaaagaagagcgccaggcttacctcactaacgagtatatgcagagaatggcaagtgtacgagctgtgcccaaccagcgagcacctccttcaggttacttcatgacagctgtcccacagactcagaaccatgctgcatactatcctcctagccaaattgctcgactaagaccaagtcctcgctggactgctcagggtgccagacctcatccattccaaaataagcccagtgctatccgcccaggtgctcctagagtaccatttagtactatgagaccagcttcttcacaggttccacgagtcatgtcaacgcagcgtgttgctaacacatcaacacagacagtgggtccacgtcctgcagctgctgctgctgctgcagctacccctgctgtgcgcacggttccacggtataaatatgctgcgggagttcgcaatcctcagcaacatcgtaatgcacagccacaagttacaatgcaacagcttgctgttcatgtacaaggtcaggaaactttgactgcctccaggttggcatctgcccctcctcaaaagcaaaagcaaatgttaggtgaacggctctttcctcttattcaagccatgcaccctactcttgctgggaaaatcactggcatgttgttggagattgataattcagaacttctttatatgctcgagtctccagagtcactccgttctaaggttgatgaagctgtagctgtactacaagcccaccaagctaaagaggctacccagaaagcagttaacagtgctaccggtgttccaactgtttaaaattgatcagagaccacgaaaagaaatttgtgcttcaccgaagaaaaatatctaaacatcgagaaactatgggaaaaaaaattgcaaaatctaaaataaaaaatgcaaaatctaaaataaaaaatggaaaggaaactttgaaccttatgtaccgagcaaatgcaaggtctagcaaatataatgctagtcctagattacttattgatttaaaaacaaaaaaaagattacttaattttgatttaaaaacaaaaaatcgtaaaatacaaaaaccagttaatgttttgtagaccctgggaaaagaattttcagcaaagtacaaaaatttaaagcattcctttaattttttaattctttactgtggaatagctcaaaatgtccattctgttttaagtaacagaattgataactgagcaaggaaacatggtttggattataaaattcttgctttaataaaaatttcttaaacagtgaaaaaaagaaaaatcatcaattttactaatagtctttctttacattttctattattctatctcccactatatttcaaatatgaaaatcactttttcaccaaaattttaggtctttacataatagtgtttatttttaatattcataaatgaaaatatgcaatgacaaaatagtaattataaattcagtaacatttgttcaaaattgtaagacaattattaatttatactgcattatttttaaataaaaaataaatacatagttttaaaaatctaattgaacaggaggctaaacatggttctgatcacagagataatcacttttaatcatttggttttagtgtttctggtagttgattttcttcaataataattgtacatagttatttcttggtttatcaattttgtaatttaactattgacttcctgctgtaacaaataaggatatgtttcatctacctcttcccaccatccctcctcctcctcccaatataatttatcactacttgtagctcctttattggtaatattaattaatataaatatttataattaatgttacacctagtgaattgtataaaaggacagcccatttgagcattctcctttaagatgagtagaggctgtgacattgcactacatagaaatataattataccatattactttgcaataaactatgtattatag

SEQ ID NO: 221078 - DNA, 1896 bp, Artificial Sequence
  derived and/or modified sequence
atgaaccccagcaccccttcctatcccacagcaagtctctatgtcggtgatctgcaccccgatgtgaccgaggcgatgctttatgagaagttttctcctgccggacccattctgtctatccggatctgtagagatcttatcactagcggttcttctaattacgcctacgttaatttccagcacacaaaggatgcggaacatgctttggatacaatgaatttcgatgtgatcaaaggaaagccggttcgaatcatgtggagccagcgcgatcctagcctgaggaaaagcggagtgggcaacatttttgtgaaaaacttggataaatctattaataacaaggctctctacgacactgtgtcagcattcggtaatatattaagctgtaacgttgtgtgcgacgagaacggctccaaggggtacggatttgttcattttgaaacccatgaagccgctgaacgagctatcaaaaaaatgaatggaatgttgcttaacggtcggaaggtgttcgttggtcaatttaaatctagaaaggaacgagaggccgagctcggggctcgggcaaaggagtttccgaatgtttacattaaaaactttggcgaggacatggacgacgaaagactaaaggacctctttggcaagttcggccctgctctctctgtgaaagtcatgaccgacgaatccgggaaatcaaagggctttggattcgtgtcctttgaacgccatgaggacgcccagaaagcggtagacgaaatgaatggtaaagaacttaacgggaagcagatctatgtcgggagggcacagaaaaaggttgaacgacagaccgagctgaaacggaccttcgagcagatgaaacaagatcgcataacgaggtaccaggtggtgaatctctatgtaaaaaacttggacgacggcatagatgatgagagactaagaaaagcattttcaccctttggtacgattacatccgcgaaagtcatgatggaaggaggaagaagcaagggttttggattcgtctgttttagcagcccagaagaagctacaaaggccgttacagaaatgaacgggcgaatcgtggcaactaagccactctacgtggccctggcccagaggaaggaggagaggcaggcatatttgacgaatgaatacatgcagagaatggcatctgttcgagccgtccctaatcaacgggctccaccatctggatatttcatgacagcggtgcctcagacgcagaatcatgccgcttattaccctccaagtcagatcgccagacttagaccaagcccccgttggactgcacagggggcacggcctcacccattccagaataaacctagcgccattcggccaggagcccctagagtgcccttctccacaatgaggcccgcatcttcacaggttccccgagtaatgagtacccagagggtggccaatactagcactcaaaccgtagggccaaggccagccgctgcagctgccgctgctgccaccccggctgtacggacggtgccaaggtacaagtatgcggctggcgttcgtaacccccagcagcaccggaacgcacaacctcaagtcacaatgcagcagctagctgttcatgtccagggacaggagaccctcaccgccagtaggctagctagtgctccaccacaaaagcagaaacaaatgctgggtgagcggttattccctctgattcaggcgatgcaccctaccctggcgggtaagatcaccggcatgttactggaaattgacaacagcgagttgctgtacatgttagaatctcccgagagcttacgttccaaagtcgatgaggcagtggcagtcctccaggcccaccaggcgaaggaggcaacgcagaaggctgtgaactcggcgaccggggttcctaccgtgtag

SEQ ID NO: 221079 - DNA, 1896 bp, Artificial Sequence
  derived and/or modified sequence
atgaaccccagcacccccagctaccccaccgccagcctgtacgtgggcgacctgcaccccgacgtgaccgaggccatgctgtacgagaagttcagccccgccggccccatcctgagcatcagaatctgcagagacctgatcaccagcggcagcagcaactacgcctacgtgaacttccagcacaccaaggacgccgagcacgccctggacaccatgaacttcgacgtgatcaagggcaagcccgtgagaatcatgtggagccagagagaccccagcctgagaaagagcggcgtgggcaacatcttcgtgaagaacctggacaagagcatcaacaacaaggccctgtacgacaccgtgagcgccttcggcaacatcctgagctgcaacgtggtgtgcgacgagaacggcagcaagggctacggcttcgtgcacttcgagacccacgaggccgccgagagagccatcaagaagatgaacggcatgctgctgaacggcagaaaggtgttcgtgggccagttcaagagcagaaaggagagagaggccgagctgggcgccagagccaaggagttccccaacgtgtacatcaagaacttcggcgaggacatggacgacgagagactgaaggacctgttcggcaagttcggccccgccctgagcgtgaaggtgatgaccgacgagagcggcaagagcaagggcttcggcttcgtgagcttcgagagacacgaggacgcccagaaggccgtggacgagatgaacggcaaggagctgaacggcaagcagatctacgtgggcagagcccagaagaaggtggagagacagaccgagctgaagagaaccttcgagcagatgaagcaggacagaatcaccagataccaggtggtgaacctgtacgtgaagaacctggacgacggcatcgacgacgagagactgagaaaggccttcagccccttcggcaccatcaccagcgccaaggtgatgatggagggcggcagaagcaagggcttcggcttcgtgtgcttcagcagccccgaggaggccaccaaggccgtgaccgagatgaacggcagaatcgtggccaccaagcccctgtacgtggccctggcccagagaaaggaggagagacaggcctacctgaccaacgagtacatgcagagaatggccagcgtgagagccgtgcccaaccagagagccccccccagcggctacttcatgaccgccgtgccccagacccagaaccacgccgcctactacccccccagccagatcgccagactgagacccagccccagatggaccgcccagggcgccagaccccaccccttccagaacaagcccagcgccatcagacccggcgcccccagagtgcccttcagcaccatgagacccgccagcagccaggtgcccagagtgatgagcacccagagagtggccaacaccagcacccagaccgtgggccccagacccgccgccgccgccgccgccgccgccacccccgccgtgagaaccgtgcccagatacaagtacgccgccggcgtgagaaacccccagcagcacagaaacgcccagccccaggtgaccatgcagcagctggccgtgcacgtgcagggccaggagaccctgaccgccagcagactggccagcgcccccccccagaagcagaagcagatgctgggcgagagactgttccccctgatccaggccatgcaccccaccctggccggcaagatcaccggcatgctgctggagatcgacaacagcgagctgctgtacatgctggagagccccgagagcctgagaagcaaggtggacgaggccgtggccgtgctgcaggcccaccaggccaaggaggccacccagaaggccgtgaacagcgccaccggcgtgcccaccgtgtag

SEQ ID NO: 221080 - protein, 201 aa, Artificial Sequence
  derived and/or modified sequence
MNPEYDYLFKLLLIGDSGVGKSCLLLRFADDTYTESYISTIGVDFKIRTIELDGKTIKLQIWDTAGQERFRTITSSYYRGAHGIIVVYDVTDQESYANVKQWLQEIDRYASENVNKLLVGNKSDLTTKKVVDNTTAKEFADSLGIPFLETSAKNATNVEQAFMTMAAEIKKRMGPGAASGGERPNLKIDSTPVKPAGGGCC

SEQ ID NO: 221081 - protein, 162 aa, Artificial Sequence
  derived and/or modified sequence
MNPEYDYLFKLLLIGDSGVGKSCLLLRFADDTYTESYISTIGVDFKIRTIELDGKTIKLQIWDTAGQERFRTITSSYYRGAHGIIVVYDVTDQESYANVKQGCRRLTAMPARTSISSWWATRATSPPRRWWTTPQPRSLQTLWASPSWRRAPRMPPMSSRRS

SEQ ID NO: 221082 - protein, 119 aa, Artificial Sequence
  derived and/or modified sequence
MNPEYDYLFKLLLIGDSGVGKSCLLLRFADDTYTESYISTIGVDFKIRTIELDGKTIKLQIWDTAGQERFRTITSSYYRGAHGIIVVYDVTDQESYANVKQWLQEIDRYASENVNKLLV

SEQ ID NO: 221083 - DNA, 606 bp, Artificial Sequence
  derived and/or modified sequence
atgaaccccgagtatgactacttgtttaagctcctgctcattggcgacagcggtgtggggaagtcttgcctgcttttacgctttgcagacgacacctacactgaatcctatattagcaccataggagttgatttcaagatccggaccattgagctggatggaaagacaataaaactgcagatctgggatacggccggacaggagaggttcaggaccattacaagctcatattacagaggggcccacggaatcatcgttgtgtacgacgtcacagatcaggaatcatacgcgaacgtaaaacagtggctccaggagatagataggtatgcctccgaaaatgtcaataaattattggtgggcaataagtcagatctgactactaagaaggtcgtcgataacactactgctaaagaattcgctgatagtttgggtatacctttccttgaaacctccgccaagaatgccaccaacgtggagcaggccttcatgactatggcggccgagatcaaaaagcgaatggggcccggcgccgcctcaggcggcgaaaggccaaacttaaaaatcgacagtacacccgtgaaaccggcgggcggaggctgctgctag

SEQ ID NO: 221084 - DNA, 489 bp, Artificial Sequence
  derived and/or modified sequence
atgaatccagaatacgattatctgttcaagcttctgctcatcggagacagcggagtcggaaaaagttgtctgctgttgcggtttgctgacgacacgtatacagaatcttacattagtacaatcggagttgacttcaaaattcgcacaatagagctggacgggaagacaattaaacttcaaatctgggataccgcaggtcaagagcgcttccggaccattaccagctcctattaccggggggcacatgggattatcgtcgtgtatgacgtgaccgaccaggaaagctacgccaatgtcaagcagggctgccgccggctaacggccatgcccgctcggacgtctatttcttcatggtgggcaacgcgtgccaccagcccgcctaggcggtggtggacaactccacaaccacgctcattacagacgctgtgggcctcaccctcatggaggcgggctcccagaatgccacccatgtcttcgcgtagaagttag

SEQ ID NO: 221085 - DNA, 360 bp, Artificial Sequence
  derived and/or modified sequence
atgaacccagagtacgactacctctttaagctacttctgataggagactcgggtgttggtaagagttgcctgctcctgagatttgccgatgacacttacactgaatcatacatatccacgattggggtggatttcaaaataaggaccatcgaactcgatgggaagacgatcaaactgcagatctgggacaccgctggacaagagagatttcgaacaatcacctcatcttattaccggggagcccatggaattatcgttgtctacgacgtgaccgatcaggagagctacgccaatgtcaaacagtggttacaggagatcgaccgatacgctagcgagaacgtaaataagctcctggtgtag

SEQ ID NO: 221086 - DNA, 606 bp, Artificial Sequence
  derived and/or modified sequence
atgaacccagaatatgactacctgttcaagctgctgctgattggagacagcggcgtgggcaagagctgcctgctgctgcgctttgctgatgacacctacacagagagctacatcagcaccatcggcgtggacttcaagatccgcaccatcgagctggatggcaagaccatcaagctgcagatctgggacacagctggccaggagcgcttccgcaccatcaccagcagctactacagaggagcccacggcatcatcgtggtgtatgatgtgacagaccaggagagctatgccaacgtgaagcagtggctgcaggagattgacagatatgcctctgaaaatgtgaacaagctgctggtgggcaacaagagtgacctgaccaccaagaaggtggtggacaacaccacagccaaggagtttgctgacagcctgggcatccccttcctggagaccagcgccaagaatgccaccaacgtggagcaggccttcatgaccatggctgctgagatcaagaagaggatgggccctggagctgccagcggcggggagcggcccaacctgaagattgacagcacccctgtgaagccagctgggggcggctgctgctag

SEQ ID NO: 221087 - DNA, 489 bp, Artificial Sequence
  derived and/or modified sequence
atgaacccagaatatgactacctgttcaagctgctgctgattggagacagcggcgtgggcaagagctgcctgctgctgcgctttgctgatgacacctacacagagagctacatcagcaccatcggcgtggacttcaagatccgcaccatcgagctggatggcaagaccatcaagctgcagatctgggacacagctggccaggagcgcttccgcaccatcaccagcagctactacagaggagcccacggcatcatcgtggtgtatgatgtgacagaccaggagagctatgccaacgtgaagcagggctgccggcggctgacagccatgcctgcccggaccagcatcagctcctggtgggccacccgggccaccagccccccccggcgctggtggaccaccccccagcccaggagcctgcagaccctgtgggccagccccagctggaggcgggcccccaggatgccacccatgagcagccgccgctcctag

SEQ ID NO: 221088 - DNA, 360 bp, Artificial Sequence
  derived and/or modified sequence
atgaacccagaatatgactacctgttcaagctgctgctgattggagacagcggcgtgggcaagagctgcctgctgctgcgctttgctgatgacacctacacagagagctacatcagcaccatcggcgtggacttcaagatccgcaccatcgagctggatggcaagaccatcaagctgcagatctgggacacagctggccaggagcgcttccgcaccatcaccagcagctactacagaggagcccacggcatcatcgtggtgtatgatgtgacagaccaggagagctatgccaacgtgaagcagtggctgcaggagattgacagatatgcctctgaaaatgtgaacaagctgctggtgtag

SEQ ID NO: 221089 - DNA, 606 bp, Artificial Sequence
  derived and/or modified sequence
atgaaccccgagtacgactacctgttcaagctgctgctgatcggcgatagcggcgttggaaagtcatgccttctcttacgcttcgccgatgacacgtatactgagtcatatattagtaccataggcgtggactttaagatcagaaccatcgagctggatggcaaaactatcaaacttcagatttgggacacagccgggcaggagcgattcagaactataacaagctcctattaccgcggggcgcacggaatcatcgtggtatacgacgtgactgatcaagagtcctatgcaaacgtgaagcagtggctccaagaaatcgataggtacgctagcgagaatgtcaataagcttctagtggggaataagtcagatcttactactaaaaaggtcgttgataatacaacagcaaaagaatttgctgatagcctcgggatcccgttcttggaaaccagtgccaagaacgccaccaacgtcgaacaagctttcatgacaatggccgccgagatcaagaaacgcatgggccctggggctgccagcggcggcgaaagacccaacctcaaaatcgattccacccctgttaagccagctgggggcggttgctgttag

SEQ ID NO: 221090 - DNA, 489 bp, Artificial Sequence
  derived and/or modified sequence
atgaaccccgagtacgactacctgttcaagctgctgctgatcggcgacagtggagtgggtaagagctgcctgctcctccgcttcgcagacgatacttacacagagagctatattagcaccatcggtgtcgatttcaagatccgcacaatcgagctggacgggaagacaatcaagctccagatatgggacactgcaggccaagagaggttccgaactatcaccagctcctactacaggggcgcccacggcattatagtggtgtacgatgtcacagatcaggagtcttatgcaaacgtgaagcaggggtgccggcggcttactgcgatgcctgcacgcacatccatcagctcttggtgggccacaagggccaccagccccccccgcagatggtggaccactccacagccgaggagtctccaaacactttgggcatctccatcctggaggcgagcccctcgaatgcctcctatgtcgagtcggcgaagctag

SEQ ID NO: 221091 - DNA, 360 bp, Artificial Sequence
  derived and/or modified sequence
atgaaccccgagtacgactacctgttcaagctgctgctgatcggcgactcaggtgttggcaagtcgtgcctgctgctaagatttgcggatgatacttacaccgagagctacatttcaacaattggagtggatttcaagatcagaactatcgaactggacgggaagaccattaagctgcagatctgggatactgcgggccaggagaggttccggactataacctcatcttactaccggggggcccacggaattattgtggtgtacgacgtgacagaccaggaaagttacgctaatgtaaagcagtggctccaagagatcgacaggtacgctagtgaaaatgttaacaaattgttagtgtag

SEQ ID NO: 221092 - DNA, 606 bp, Artificial Sequence
  derived and/or modified sequence
atgaaccccgagtatgattacctctttaaactattactcattggggattccggagtgggcaagagttgcctcttgctgagattcgcagacgatacttataccgaaagctatatctcaacaatcggcgtggatttcaagattagaacaatcgaactggatgggaagactatcaaattgcagatctgggataccgcagggcaagaacgcttccggaccatcacttcctcttactaccgcggagcccacggcattatcgtagtgtacgatgtgaccgatcaggagtcgtacgcaaatgtgaagcagtggctacaggagatcgatcgatacgcgagcgagaatgttaataagctacttgtgggcaacaagtcagacctgactaccaaaaaggtggttgacaacaccactgcgaaagagtttgccgactcgctcggaatcccatttctggagacttccgcaaagaatgcaactaacgtggagcaagcatttatgactatggcagctgaaatcaagaaacggatggggcctggagcggcttcaggtggggagcgccctaaccttaaaatcgactctacaccagttaagccagccggaggtgggtgttgttag

SEQ ID NO: 221093 - DNA, 489 bp, Artificial Sequence
  derived and/or modified sequence
atgaatcccgagtacgattaccttttcaagctcctgctcataggagatagcggtgtagggaagagctgcctattgctgcgatttgccgatgacacttatacggagtcctacattagcaccataggggtggactttaagatccgcaccattgaactcgacggtaagacaattaagctacagatctgggacaccgccggtcaggagaggtttcggactatcacttcctcatactatcggggtgctcacggcataattgtcgtgtacgacgtcaccgaccaggaaagctatgcaaacgtcaagcagggctgcagaaggcttacagcaatgcctgcccgaacatcgatttcctcctggtgggctacacgcgctacttcacccccacgtcgttggtggaccacacctcagcccaggtcgcttcagactctgtgggccagcccaagctggcgcagagcaccaaggatgccacctatgtctagtcgaagatcttag

SEQ ID NO: 221094 - DNA, 360 bp, Artificial Sequence
  derived and/or modified sequence
atgaacccagagtacgactacctgttcaagctgttactcatcggtgactccggtgtcggtaagagctgcttgttgcttcggttcgccgacgatacctatactgagagttacatcagcaccatcggtgtagacttcaaaataaggacgattgaattggatggcaagacaattaaactgcagatttgggatacagccggtcaggagagattccggaccatcacaagctcttattacagaggtgctcatggcatcattgtggtctatgacgtgacagatcaggaatcatacgccaatgtgaagcaatggctccaagaaattgatcgttacgcgtctgagaatgtcaacaaacttttggtctag

SEQ ID NO: 221095 - DNA, 2007 bp, Artificial Sequence
  derived and/or modified sequence
ccgggaatcagcgcggcgaggcctgagaagaagacgtttgcgcctgcgcgtcgcgggcggggcctctggggcggagcggccaccatcttggaacgggaggcggagcagagtcgactgggagcgaccgagcgggccgccgccgccgccatgaaccccgaatatgactacctgtttaagctgcttttgattggcgactcaggcgtgggcaagtcatgcctgctcctgcggtttgctgatgacacgtacacagagagctacatcagcaccatcggggtggacttcaagatccgaaccatcgagctggatggcaaaactatcaaacttcagatctgggacacagcgggccaggaacggttccggaccatcacttccagctactaccggggggctcatggcatcatcgtggtgtatgacgtcactgaccaggaatcctacgccaacgtgaagcagtggctgcaggagattgaccgctatgccagcgagaacgtcaataagctcctggtgggcaacaagagcgacctcaccaccaagaaggtggtggacaacaccacagccaaggagtttgcagactctctgggcatccccttcttggagacgagcgccaagaatgccaccaatgtcgagcaggcgttcatgaccatggctgctgaaatcaaaaagcggatggggcctggagcagcctctgggggcgagcggcccaatctcaagatcgacagcacccctgtaaagccggctggcggtggctgttgctaggaggggcacatggagtgggacaggagggggcaccttctccagatgatgtccctggagggggcaggaggtacctccctctccctctcctggggcatttgagtctgtggctttggggtgtcctgggctccccatctccttctggcccatctgcctgctgccctgagccccggttctgtcagggtccctaagggaggacactcagggcctgtggccaggcagggcggaggcctgctgtgctgttgcctctaggtgactttccaagatgcccccctacacacctttctttggaacgagggctcttctgtcggtgtccctcccacccccatgtatgctgcactgggttctctccttcttcttcctgctgtcctgcccaagaactgagggtctccccggcctctactgccctggctgcagtcagtgcccagggcgaggaatgtggccaggggatccaggacctgggatccagggccctgggctggacctcaggacaggcatggaggccacaggggcccagcagcccaccctttcctctccccactgcctcctctcccttcctacactcccagctcgagccgtccagctgcggtgggatctgagtatatctagggcgggtgggcgggtagcagtgctgggcctgtgtcttgagcctggagggagtctgctcctgccgccctctgccctgccagagacagacccatgcgctgcctgcccaccgtgcccctttgtccccatgtcaggcggaggcggaaggcccaccgtgccagaggctgggcaccagccttaaccctcactctgctagcacctcctccctttccccaaggtagcacatctggctcactccccactccgtctctggagcccaccagggaaggccctcatcccctgccgctacttctctggggaatgtgggttccatccaggattgggggcctctctgctcacccactctgcacccaggatcctagtcccctgccctctggcacagctgcttcctgcaagaaagcaagtctttggtctccctgagaagccatgtccctcgtgctgtctcttgcctgtcccacctgtgccctgccctccagcttgtatttaagtccctgggctgcccccttggggtgccccccgctcccaggttcccctctggtgtcatgtcaggcattttgcaaggaaaagccacttggggaaagatggaaaaggacaaaaaaaattaataaatttccattggccctcgggtgagctgagggtttttgcaaggaa

SEQ ID NO: 221096 - DNA, 1903 bp, Artificial Sequence
  derived and/or modified sequence
ggagcagagtcgactgggagcgaccgagcgggccgccgccgccgccatgaaccccgaatatgactacctgtttaagctgcttttgattggcgactcaggcgtgggcaagtcatgcctgctcctgcggtttgctgatgacacgtacacagagagctacatcagcaccatcggggtggacttcaagatccgaaccatcgagctggatggcaaaactatcaaacttcagatctgggacacagcgggccaggaacggttccggaccatcacttccagctactaccggggggctcatggcatcatcgtggtgtatgacgtcactgaccaggaatcctacgccaacgtgaagcagggctgcaggagattgaccgctatgccagcgagaacgtcaataagctcctggtgggcaacaagagcgacctcaccaccaagaaggtggtggacaacaccacagccaaggagtttgcagactctctgggcatccccttcttggagacgagcgccaagaatgccaccaatgtcgagcaggcgttcatgaccatggctgctgaaatcaaaaagcggatggggcctggagcagcctctgggggcgagcggcccaatctcaagatcgacagcacccctgtaaagccggctggcggtggctgttgctaggaggggcacatggagtgggacaggagggggcaccttctccagatgatgtccctggagggggcaggaggtacctccctctccctctcctggggcatttgagtctgtggctttggggtgtcctgggctccccatctccttctggcccatctgcctgctgccctgagccccggttctgtcagggtccctaagggaggacactcagggcctgtggccaggcagggcggaggcctgctgtgctgttgcctctaggtgactttccaagatgcccccctacacacctttctttggaacgagggctcttctgtcggtgtccctcccacccccatgtatgctgcactgggttctctccttcttcttcctgctgtcctgcccaagaactgagggtctccccggcctctactgccctggctgcagtcagtgcccagggcgaggaatgtggccaggggatccaggacctgggatccagggccctgggctggacctcaggacaggcatggaggccacaggggcccagcagcccaccctttcctctccccactgcctcctctcccttcctacactcccagctcgagccgtccagctgcggtgggatctgagtatatctagggcgggtgggcgggtagcagtgctgggcctgtgtcttgagcctggagggagtctgctcctgccgccctctgccctgccagagacagacccatgcgctgcctgcccaccgtgcccctttgtccccatgtcaggcggaggcggaaggcccaccgtgccagaggctgggcaccagccttaaccctcactctgctagcacctcctccctttccccaaggtagcacatctggctcactccccactccgtctctggagcccaccagggaaggccctcatcccctgccgctacttctctggggaatgtgggttccatccaggattgggggcctctctgctcacccactctgcacccaggatcctagtcccctgccctctggcacagctgcttcctgcaagaaagcaagtctttggtctccctgagaagccatgtccctcgtgctgtctcttgcctgtcccacctgtgccctgccctccagcttgtatttaagtccctgggctgcccccttggggtgccccccgctcccaggttcccctctggtgtcatgtcaggcattttgcaaggaaaagccacttggggaaagatggaaaaggacaaaaaaaattaataaatttccattggccctcgggtgagctgagggtttttgcaagg

SEQ ID NO: 221097 - DNA, 1038 bp, Artificial Sequence
  derived and/or modified sequence
cgccgccgccgccatgaaccccgaatatgactacctgtttaagctgcttttgattggcgactcaggcgtgggcaagtcatgcctgctcctgcggtttgctgatgacacgtacacagagagctacatcagcaccatcggggtggacttcaagatccgaaccatcgagctggatggcaaaactatcaaacttcagatctgggacacagcgggccaggaacggttccggaccatcacttccagctactaccggggggctcatggcatcatcgtggtgtatgacgtcactgaccaggaatcctacgccaacgtgaagcagtggctgcaggagattgaccgctatgccagcgagaacgtcaataagctcctggtgggcaacaagagcgacctcaccaccaagaaggtggtggacaacaccacagccaaggagtttgcagactctctgggcatccccttcttggagacgagcgccaagaatgccaccaatgtcgagcaggcgttcatgaccatggctgctgaaatcaaaaagcggatggggcctggagcagcctctgggggcgagcggcccaatctcaagatcgacagcacccctgtaaagccggctggcggtggctgttgctaggaggggcacatggagtgggacaggagggggcaccttctccagatgatgtccctggagggggcaggaggtacctccctctccctctcctggggcatttgagtctgtggctttggggtgtcctgggctccccatctccttctggcccatctgcctgcttcctgcaagaaagcaagtctttggtctccctgagaagccatgtccctcgtgctgtctcttgcctgtcccacctgtgccctgccctccagcttgtatttaagtccctgggctgcccccttggggtgccccccgctcccaggttcccctctggtgtcatgtcaggcattttgcaaggaaaagccacttggggaaagatggaaaaggacaaaaaaaattaataaatttccattggccctcgggtgagctgagggtttttgcaagga

SEQ ID NO: 221098 - DNA, 606 bp, Artificial Sequence
  derived and/or modified sequence
atgaaccccgagtacgactacctgttcaagctgctgctgatcggcgacagcggcgtgggcaagagctgcctgctgctgagattcgccgacgacacctacaccgagagctacatcagcaccatcggcgtggacttcaagatcagaaccatcgagctggacggcaagaccatcaagctgcagatctgggacaccgccggccaggagagattcagaaccatcaccagcagctactacagaggcgcccacggcatcatcgtggtgtacgacgtgaccgaccaggagagctacgccaacgtgaagcagtggctgcaggagatcgacagatacgccagcgagaacgtgaacaagctgctggtgggcaacaagagcgacctgaccaccaagaaggtggtggacaacaccaccgccaaggagttcgccgacagcctgggcatccccttcctggagaccagcgccaagaacgccaccaacgtggagcaggccttcatgaccatggccgccgagatcaagaagagaatgggccccggcgccgccagcggcggcgagagacccaacctgaagatcgacagcacccccgtgaagcccgccggcggcggctgctgctag

SEQ ID NO: 221099 - DNA, 489 bp, Artificial Sequence
  derived and/or modified sequence
atgaaccccgagtacgactacctgttcaagctgctgctgatcggcgacagcggcgtgggcaagagctgcctgctgctgagattcgccgacgacacctacaccgagagctacatcagcaccatcggcgtggacttcaagatcagaaccatcgagctggacggcaagaccatcaagctgcagatctgggacaccgccggccaggagagattcagaaccatcaccagcagctactacagaggcgcccacggcatcatcgtggtgtacgacgtgaccgaccaggagagctacgccaacgtgaagcagggctgcagaagactgaccgccatgcccgccagaaccagcatcagcagctggtgggccaccagagccaccagcccccccagaagatggtggaccaccccccagcccagaagcctgcagaccctgtgggccagccccagctggagaagagcccccagaatgccccccatgagcagcagaagaagctag

SEQ ID NO: 221100 - DNA, 360 bp, Artificial Sequence
  derived and/or modified sequence
atgaaccccgagtacgactacctgttcaagctgctgctgatcggcgacagcggcgtgggcaagagctgcctgctgctgagattcgccgacgacacctacaccgagagctacatcagcaccatcggcgtggacttcaagatcagaaccatcgagctggacggcaagaccatcaagctgcagatctgggacaccgccggccaggagagattcagaaccatcaccagcagctactacagaggcgcccacggcatcatcgtggtgtacgacgtgaccgaccaggagagctacgccaacgtgaagcagtggctgcaggagatcgacagatacgccagcgagaacgtgaacaagctgctggtgtag

SEQ ID NO: 221101 - protein, 459 aa, Artificial Sequence
  derived and/or modified sequence
MEALGFLKLEVNGPMVTVALSVALLALLKWYSTSAFSRLEKLGLRHPKPSPFIGNLTFFRQGFWESQMELRKLYGPLCGYYLGRRMFIVISEPDMIKQVLVENFSNFTNRMASGLEFKSVADSVLFLRDKRWEEVRGALMSAFSPEKLNEMVPLISQACELLLAHLKRYAESGDAFDIQRCYCNYTTDVVASVAFGTPVDSWQAPEDPFVKHCKRFFEFCIPRPILVLLLSFPSIMVPLARILPNKNRDELNGFFNKLIRNVIALRDQQAAEERRRDFLQMVLDARHSASPMGVQDFDIVRDVFSSTGCKPNPSRQHQPSPMARPLTVDEIVGQAFIFLIAGYEIITNTLSFATYLLATNPDCQEKLLREVDVFKEKHMAPEFCSLEEGLPYLDMVIAETLRMYPPAFRFTREAAQDCEVLGQRIPAGAVLEMAVGALHHDPEHWPSPETFNPERYRCS

SEQ ID NO: 221102 - protein, 460 aa, Artificial Sequence
  derived and/or modified sequence
MMEALGFLKLEVNGPMVTVALSVALLALLKWYSTSAFSRLEKLGLRHPKPSPFIGNLTFFRQGFWESQMELRKLYGPLCGYYLGRRMFIVISEPDMIKQVLVENFSNFTNRMASGLEFKSVADSVLFLRDKRWEEVRGALMSAFSPEKLNEMVPLISQACELLLAHLKRYAESGDAFDIQRCYCNYTTDVVASVAFGTPVDSWQAPEDPFVKHCKRFFEFCIPRPILVLLLSFPSIMVPLARILPNKNRDELNGFFNKLIRNVIALRDQQAAEERRRDFLQMVLDARHSASPMGVQDFDIVRDVFSSTGCKPNPSRQHQPSPMARPLTVDEIVGQAFIFLIAGYEIITNTLSFATYLLATNPDCQEKLLREVDVFKEKHMAPEFCSLEEGLPYLDMVIAETLRMYPPAFRFTREAAQDCEVLGQRIPAGAVLEMAVGALHHDPEHWPSPETFNPERYRCS

SEQ ID NO: 221103 - protein, 152 aa, Artificial Sequence
  derived and/or modified sequence
MMEALGFLKLEVNGPMVTVALSVALLALLKWYSTSAFSRLEKLGLRHPKPSPFIGNLTFFRQGFWESQMELRKLYGPLCGYYLGRRMFIVISEPDMIKQVLVENFSNFTNRMPQSIMPNSRHHVASRGMWPGGRRLACYLHPFRMAEGIAEV

SEQ ID NO: 221104 - DNA, 1380 bp, Artificial Sequence
  derived and/or modified sequence
atggaggccctgggcttcctgaagctggaggtgaacggccccatggtgaccgtggccctgagcgtggccctgctggccctgctgaagtggtacagcaccagcgccttcagcagactggagaagctgggcctgagacaccccaagcccagccccttcatcggcaacctgaccttcttcagacagggcttctgggagagccagatggagctgagaaagctgtacggccccctgtgcggctactacctgggcagaagaatgttcatcgtgatcagcgagcccgacatgatcaagcaggtgctggtggagaacttcagcaacttcaccaacagaatggccagcggcctggagttcaagagcgtggccgacagcgtgctgttcctgagagacaagagatgggaggaggtgagaggcgccctgatgagcgccttcagccccgagaagctgaacgagatggtgcccctgatcagccaggcctgcgagctgctgctggcccacctgaagagatacgccgagagcggcgacgccttcgacatccagagatgctactgcaactacaccaccgacgtggtggccagcgtggccttcggcacccccgtggacagctggcaggcccccgaggaccccttcgtgaagcactgcaagagattcttcgagttctgcatccccagacccatcctggtgctgctgctgagcttccccagcatcatggtgcccctggccagaatcctgcccaacaagaacagagacgagctgaacggcttcttcaacaagctgatcagaaacgtgatcgccctgagagaccagcaggccgccgaggagagaagaagagacttcctgcagatggtgctggacgccagacacagcgccagccccatgggcgtgcaggacttcgacatcgtgagagacgtgttcagcagcaccggctgcaagcccaaccccagcagacagcaccagcccagccccatggccagacccctgaccgtggacgagatcgtgggccaggccttcatcttcctgatcgccggctacgagatcatcaccaacaccctgagcttcgccacctacctgctggccaccaaccccgactgccaggagaagctgctgagagaggtggacgtgttcaaggagaagcacatggcccccgagttctgcagcctggaggagggcctgccctacctggacatggtgatcgccgagaccctgagaatgtacccccccgccttcagattcaccagagaggccgcccaggactgcgaggtgctgggccagagaatccccgccggcgccgtgctggagatggccgtgggcgccctgcaccacgaccccgagcactggcccagccccgagaccttcaaccccgagagatacagatgcagctag

SEQ ID NO: 221105 - DNA, 1383 bp, Artificial Sequence
  derived and/or modified sequence
atgatggaggccctgggcttcctgaagctggaggtgaacggccccatggtgaccgtggccctgagcgtggccctgctggccctgctgaagtggtacagcaccagcgccttcagcagactggagaagctgggcctgagacaccccaagcccagccccttcatcggcaacctgaccttcttcagacagggcttctgggagagccagatggagctgagaaagctgtacggccccctgtgcggctactacctgggcagaagaatgttcatcgtgatcagcgagcccgacatgatcaagcaggtgctggtggagaacttcagcaacttcaccaacagaatggccagcggcctggagttcaagagcgtggccgacagcgtgctgttcctgagagacaagagatgggaggaggtgagaggcgccctgatgagcgccttcagccccgagaagctgaacgagatggtgcccctgatcagccaggcctgcgagctgctgctggcccacctgaagagatacgccgagagcggcgacgccttcgacatccagagatgctactgcaactacaccaccgacgtggtggccagcgtggccttcggcacccccgtggacagctggcaggcccccgaggaccccttcgtgaagcactgcaagagattcttcgagttctgcatccccagacccatcctggtgctgctgctgagcttccccagcatcatggtgcccctggccagaatcctgcccaacaagaacagagacgagctgaacggcttcttcaacaagctgatcagaaacgtgatcgccctgagagaccagcaggccgccgaggagagaagaagagacttcctgcagatggtgctggacgccagacacagcgccagccccatgggcgtgcaggacttcgacatcgtgagagacgtgttcagcagcaccggctgcaagcccaaccccagcagacagcaccagcccagccccatggccagacccctgaccgtggacgagatcgtgggccaggccttcatcttcctgatcgccggctacgagatcatcaccaacaccctgagcttcgccacctacctgctggccaccaaccccgactgccaggagaagctgctgagagaggtggacgtgttcaaggagaagcacatggcccccgagttctgcagcctggaggagggcctgccctacctggacatggtgatcgccgagaccctgagaatgtacccccccgccttcagattcaccagagaggccgcccaggactgcgaggtgctgggccagagaatccccgccggcgccgtgctggagatggccgtgggcgccctgcaccacgaccccgagcactggcccagccccgagaccttcaaccccgagagatacagatgcagctag

SEQ ID NO: 221106 - DNA, 453 bp, Artificial Sequence
  derived and/or modified sequence
atggaggccctgggcttcctgaagctggaggtgaacggccccatggtgaccgtggccctgagcgtggccctgctggccctgctgaagtggtacagcaccagcgccttcagcagactggagaagctgggcctgagacaccccaagcccagccccttcatcggcaacctgaccttcttcagacagggcttctgggagagccagatggagctgagaaagctgtacggccccctgtgcggctactacctgggcagaagaatgttcatcgtgatcagcgagcccgacatgatcaagcaggtgctggtggagaacttcagcaacttcaccaacagaatggccagcggcctggagttcaagagcgtggccgacagcgtgctgttcctgagagacaagagatgggaggaggtgagaggcgccctgatgagcgccttcagccccgagaagctgaacgagtag

SEQ ID NO: 221107 - DNA, 459 bp, Artificial Sequence
  derived and/or modified sequence
atgatggaggccctgggcttcctgaagctggaggtgaacggccccatggtgaccgtggccctgagcgtggccctgctggccctgctgaagtggtacagcaccagcgccttcagcagactggagaagctgggcctgagacaccccaagcccagccccttcatcggcaacctgaccttcttcagacagggcttctgggagagccagatggagctgagaaagctgtacggccccctgtgcggctactacctgggcagaagaatgttcatcgtgatcagcgagcccgacatgatcaagcaggtgctggtggagaacttcagcaacttcaccaacagaatgccccagagcatcatgcccaacagcagacaccacgtggccagcagaggcatgtggcccggcggcagaagactggcctgctacctgcaccccttcagaatggccgagggcatcgccgaggtgtag

SEQ ID NO: 221108 - DNA, 1380 bp, Artificial Sequence
  derived and/or modified sequence
atggaagccctgggcttcctcaagttagaagtcaatggaccgatggtaactgtggcactttcggtagctctgcttgcgctcctgaagtggtattccaccagcgctttctccagactagagaaacttggactccggcatccgaagccatccccttttatcggaaacctcacattttttaggcagggattctgggagtctcagatggaactaaggaagctgtatgggccgctgtgcggttactacctcgggagacggatgttcatcgttatatccgaacctgacatgattaaacaagtgctggttgagaattttagtaattttactaacaggatggcaagtggacttgagttcaaaagcgtcgctgatagtgttttatttctgcgcgataagaggtgggaggaggtgcggggggccttgatgagcgcgttttctcccgaaaagctgaatgagatggtgcccctgatcagccaggcctgcgagctgctgctagcacacttgaaacgctacgccgaatccggagacgcgttcgatatacagcggtgctattgtaactatacaacagacgtagtggcctccgtggcttttggaactcccgtcgattcctggcaggccccagaagatcccttcgtgaaacattgcaagcgcttctttgagttttgtatccctagacctatcttagtgctccttttgtcatttccttctatcatggttccactcgcgcggattctaccgaataagaatagagacgagttaaacggcttcttcaacaaactgatcagaaacgtcattgccctgcgtgaccaacaggccgccgaggagaggaggcgggatttcctccaaatggtgctcgacgctagacacagcgcatctccaatgggcgttcaggacttcgacatcgtcagggatgtgttttcttctactggatgcaaaccgaatccaagcagacagcaccagccctcaccgatggccaggcccctcacagtcgacgaaatcgttggacaggcctttatttttctcattgcagggtacgaaataatcacaaacaccttgtcgtttgctacttatctgctcgctaccaacccggattgccaggagaaactgctgcgagaggtcgacgtattcaaggagaagcacatggctcctgagttctgttccttagaggaaggactaccatacctcgacatggtgatcgccgagactctcaggatgtacccaccagcctttcggttcacaagggaggccgctcaggattgcgaagtcctggggcagaggattcctgccggagcggtgctggagatggccgtgggtgcactccaccacgaccccgagcattggccatcccctgaaacatttaatccagagaggtaccggtgcagctag

SEQ ID NO: 221109 - DNA, 1383 bp, Artificial Sequence
  derived and/or modified sequence
atgatggaagccctgggctttctgaagctggaagtaaacggccctatggtgaccgtagcgttgagcgtcgctctgttggcactcctgaagtggtattctacttccgcttttagtaggcttgaaaagctaggcctgaggcatcctaagccctcccctttcatcggcaatctcaccttttttcgccaaggcttctgggaatcacagatggagctgcgtaagttatatggaccactctgtggttattatctcggtcgccggatgtttatcgtgatctccgagcccgacatgattaagcaggtgcttgtcgaaaatttctccaatttcacaaatcgcatggcctcgggcttagagtttaaatccgtggctgattcggtgctattcctacgggataaacgttgggaggaagtcaggggtgctctgatgagcgcgtttagtcctgaaaagctaaacgaaatggttcctctaattagtcaggcttgtgagctgctactggcccaccttaagcggtacgccgagtcaggtgatgcctttgacatccagcggtgttattgcaactataccactgatgtagtggcatcagtggcctttggcacccctgttgacagctggcaggctccagaagatccctttgttaagcactgcaagaggtttttcgaattttgtattcccaggcctattctggtgctactcctctcttttccctctattatggtccccctcgcgagaatactgccaaataagaacagagacgagctcaatggtttttttaataagctgattcgaaacgttattgctttgcgcgaccaacaggcagccgaggagagacgtagggattttctccaaatggtgctggatgccaggcacagtgcatcaccaatgggtgtacaggactttgacatcgttcgcgatgtattcagcagcaccgggtgtaagcccaacccaagcaggcagcaccagccatcccccatggcaaggcctctaacagtggacgagatcgtcggacaagccttcatctttcttatcgccggatatgaaattatcacgaatacactgtccttcgcaacttacctgctggccactaaccccgattgtcaagagaaactactcagagaggtggacgtgtttaaagagaagcatatggctccagagttctgttctttagaggagggcctgccgtatctggacatggtgatcgccgaaactctccgtatgtatccacctgcatttcgttttaccagggaagccgcgcaggactgcgaggtgctcggacagcggattcctgcgggcgccgtgctggaaatggccgtgggcgccctgcatcatgaccctgaacattggccatcgcccgagacattcaatccagaacgataccgatgtagctag

SEQ ID NO: 221110 - DNA, 453 bp, Artificial Sequence
  derived and/or modified sequence
atggaggcactcggcttcctgaaactggaggtcaacggcccgatggttactgtagcgctgtccgtggccctgctggcccttctcaaatggtattccacgtcggcgttttcccgtttggagaagttagggctaaggcaccctaaaccctccccatttatcgggaacctgacttttttccggcagggcttctgggagtctcagatggaactccgaaagctttacgggcccttgtgtggatactaccttggccgcaggatgtttattgtgattagtgaaccagacatgattaaacaggtgctcgtggaaaacttctccaacttcacaaacaggatggcgagtggcctggaatttaaatctgtagctgacagcgtgttattcctgagagataagcgctgggaagaggtccgaggggcattaatgtccgccttcagccccgaaaagctcaatgagtag

SEQ ID NO: 221111 - DNA, 459 bp, Artificial Sequence
  derived and/or modified sequence
atgatggaggctttggggttcctcaaactcgaagtgaatggaccaatggtgaccgtggccctgtctgtggcccttctggcattgttgaaatggtattctacttctgctttctctcggctggagaagctcggtctgcggcaccccaaacccagccccttcatcggcaatctgacttttttcaggcagggattctgggagtcacaaatggagttgaggaagctgtacggaccactgtgtgggtactatcttggacggcgcatgtttattgtcatctcagaacctgatatgatcaagcaggtcctggtggaaaatttttccaatttcactaatcgaatgcctcagtcaatcatgcccaactcgcggcatcacgtagcctcacgggggatgtggcctggtggcaggagactagcctgttacttgcatccattcaggatggctgaggggattgccgaggtctag

SEQ ID NO: 221112 - DNA, 1380 bp, Artificial Sequence
  derived and/or modified sequence
atggaggccctgggcttcctgaagctggaggtgaatggccccatggtgacagtggccctgtctgtggccctgctggccctgctgaagtggtacagcaccagcgccttcagccggctggagaagctgggcctgcggcaccccaagcccagccccttcatcggcaacctgaccttcttccggcagggcttctgggagagccagatggagctgaggaagctgtatggccccctgtgtggctactacctgggccgcaggatgttcatcgtcatcagcgagccagacatgatcaagcaggtgctggtggagaacttcagcaacttcaccaacaggatggccagcggcctggagttcaagtctgtggccgacagcgtgctcttcctgcgggacaagcgctgggaggaggtgcggggggccctgatgtctgccttcagccctgagaagctgaatgagatggtgcccctcatcagccaggcctgtgagctgctgctggcccacctgaagagatatgcagagagcggagatgcctttgacatccagcgctgctactgcaactacaccacagatgtggtggcctctgtggccttcggcacccctgtggacagctggcaggcccctgaggacccctttgtgaagcactgcaagcgcttctttgagttctgcatcccccggcccatcctggtgctgctgctgtccttccccagcatcatggtgcccctggcccgcatcctgcccaacaagaacagagatgagctgaatggcttcttcaacaagctgatcagaaatgtgattgccctgcgggaccagcaggccgctgaggagaggagaagagacttcctgcagatggtgctggatgcccggcacagcgccagccccatgggcgtgcaggactttgatattgtgagagatgtgttcagcagcacaggctgcaagcccaaccccagccggcagcaccagcccagccccatggcccggcccctgactgtggatgaaattgtgggccaggccttcatcttcctgattgctggctatgagatcatcaccaacaccctgagctttgccacctacctgctggccaccaacccagactgccaggagaagctgctgcgggaggtggatgtgttcaaggagaagcacatggcccctgagttctgcagcctggaggagggcctgccctacctggacatggtgattgctgagaccctgaggatgtaccccccagccttccgcttcacccgggaggccgcccaggactgtgaggtgctgggccagaggatcccagctggagctgtgctggagatggctgtgggcgccctgcaccacgaccctgagcactggcccagccctgagaccttcaaccctgagcgctaccgctgcagctag

SEQ ID NO: 221113 - DNA, 1383 bp, Artificial Sequence
  derived and/or modified sequence
atgatggaggccctgggcttcctgaagctggaggtgaatggccccatggtgacagtggccctgtctgtggccctgctggccctgctgaagtggtacagcaccagcgccttcagccggctggagaagctgggcctgcggcaccccaagcccagccccttcatcggcaacctgaccttcttccggcagggcttctgggagagccagatggagctgaggaagctgtatggccccctgtgtggctactacctgggccgcaggatgtttattgtcatcagcgagccagacatgatcaagcaggtgctggtggagaacttcagcaacttcaccaacaggatggccagcggcctggagttcaagtctgtggccgacagcgtgctcttcctgcgggacaagcgctgggaggaggtgcggggggccctgatgtctgccttcagccctgagaagctgaatgagatggtgcccctcatcagccaggcctgtgagctgctgctggcccacctgaagagatatgcagagagcggagatgcctttgacatccagcgctgctactgcaactacaccacagatgtggtggcctctgtggccttcggcacccctgtggacagctggcaggcccctgaggacccctttgtgaagcactgcaagcgcttctttgagttctgcatcccccggcccatcctggtgctgctgctgtccttccccagcatcatggtgcccctggcccgcatcctgcccaacaagaacagagatgagctgaatggcttcttcaacaagctgatcagaaatgtcatcgccctgcgggaccagcaggccgctgaggagcggcggcgggacttcctgcagatggtgctggatgcccggcacagcgccagccccatgggcgtgcaggactttgacatcgtgagagatgtgttcagcagcacaggctgcaagcccaaccccagccggcagcaccagcccagccccatggcccggcccctgactgtggatgagatcgtgggccaggccttcatcttcctgattgctggctatgagatcatcaccaacaccctgagctttgccacctacctgctggccaccaacccagactgccaggagaagctgctgcgggaggtggatgtgttcaaggagaagcacatggcccctgagttctgcagcctggaggagggcctgccctacctggacatggtgattgctgagaccctgaggatgtaccccccagccttccgcttcacccgggaggccgcccaggactgtgaggtgctgggccagaggatcccagctggagctgtgctggagatggctgtgggcgccctgcaccacgaccctgagcactggcccagccctgagaccttcaaccctgagcgctaccgctgcagctag

SEQ ID NO: 221114 - DNA, 453 bp, Artificial Sequence
  derived and/or modified sequence
atggaggccctgggcttcctgaagctggaggtgaatggccccatggtgacagtggccctgtctgtggccctgctggccctgctgaagtggtacagcaccagcgccttcagccggctggagaagctgggcctgcggcaccccaagcccagccccttcatcggcaacctgaccttcttccggcagggcttctgggagagccagatggagctgaggaagctgtatggccccctgtgtggctactacctgggccgcaggatgttcatcgtcatcagcgagccagacatgatcaagcaggtgctggtggagaacttcagcaacttcaccaacaggatggccagcggcctggagttcaagtctgtggccgacagcgtgctcttcctgcgggacaagcgctgggaggaggtgcggggggccctgatgtctgccttcagccctgagaagctgaatgaatag

SEQ ID NO: 221115 - DNA, 459 bp, Artificial Sequence
  derived and/or modified sequence
atgatggaggccctgggcttcctgaagctggaggtgaatggccccatggtgacagtggccctgtctgtggccctgctggccctgctgaagtggtacagcaccagcgccttcagccggctggagaagctgggcctgcggcaccccaagcccagccccttcatcggcaacctgaccttcttccggcagggcttctgggagagccagatggagctgaggaagctgtatggccccctgtgtggctactacctgggccgcaggatgtttattgtcatcagcgagccagacatgatcaagcaggtgctggtggagaacttcagcaacttcaccaacaggatgccccagagcatcatgcccaacagccgccaccacgtggccagccggggcatgtggccaggcggccggcggctggcctgctacctgcaccccttcaggatggccgagggcattgctgaggtgtag

SEQ ID NO: 221116 - DNA, 1380 bp, Artificial Sequence
  derived and/or modified sequence
atggaggccctgggcttcctgaagctggaggtgaacggccccatggttacagtggcactctccgtcgccctgctcgcgctgctaaaatggtacagcacatccgcgttttcccgactagaaaagctaggtcttagacacccaaaaccatccccattcattggaaatctaacattctttcggcaggggttttgggagtcccaaatggagttgcggaaactgtacggccccctgtgcggttactatttggggcgccgcatgttcatcgtgatcagtgagccagacatgataaagcaggtcctcgtggaaaacttctcaaatttcacgaatagaatggcctctgggctggagtttaaaagcgttgcagactccgtattgtttttgcgggataaaagatgggaggaagtcagaggtgctctgatgtccgctttcagcccggagaagttaaacgagatggtgcccctaatctctcaagcttgcgagctcctgctggcccatctgaagagatacgccgagtcaggggacgcctttgatattcagaggtgctactgtaattacactacggacgtagtggcctctgtggcctttgggaccccagtagactcttggcaggccccagaggacccattcgtgaaacactgcaagcgattcttcgaattttgcataccaagaccgatcctggtgctgctgctgtccttcccctcgataatggtgcccctagcccgtattctgcctaacaagaacagagatgagttaaatggctttttcaataagctgatcaggaacgtcatcgcgttaagggatcagcaggccgcggaggagcgccgaagagacttcctacagatggtgctggatgccagacactccgcctccccgatgggcgtgcaggattttgatatcgtgagggacgtgttctcttccacaggatgtaagccaaacccttcaaggcaacaccagcctagtcccatggcccgacccctgactgtggacgaaattgtcggacaagcttttatattcttgattgctgggtatgagataataactaataccctgtctttcgcgacctatttgcttgctactaacccagattgtcaggaaaagctgcttcgcgaagtggacgtgttcaaagagaaacacatggcaccagagttctgcagtctcgaagagggcttgccctaccttgacatggtcatcgccgaaacgttacggatgtatccacccgctttccgatttacaagagaggccgcgcaggattgtgaagtactgggccagagaataccagccggggccgtcctagagatggcggtgggcgccctccaccacgacccggaacattggccttcccctgaaaccttcaatccggagcgataccgctgttcttag

SEQ ID NO: 221117 - DNA, 1383 bp, Artificial Sequence
  derived and/or modified sequence
atgatggaggccctgggcttcctgaagctggaggtgaacggccccatggtcaccgtggctctgagcgtggctcttctggccctgctaaagtggtattccacatccgcctttagcagactggagaagctgggcttgcgtcatcctaagccatccccatttatcggcaatttgactttctttaggcagggtttctgggagtcccagatggagcttcgcaagctgtatgggcctctgtgtgggtactacctcggccgccggatgtttatagtaatcagcgagcccgatatgattaagcaggtcctggtggagaactttagcaacttcacaaatcgaatggccagcggactagagttcaagagtgtggcggacagcgtgcttttcctgcgcgacaaacgatgggaggaagttagaggcgcgctgatgtctgcgttctcacccgaaaaattaaatgagatggtacccctgatatcacaggcatgtgaactgctgttagctcatcttaaaaggtacgctgagagtggcgacgcgtttgatattcagagatgctattgcaattatactacagatgttgtagcgtccgtagcttttggcacccctgtcgatagttggcaggcacccgaggaccccttcgttaagcattgtaaaagattttttgagttttgtattccaagacctattctggtgttgcttttgtcattcccttctattatggtgccactggcaaggatcttacccaataaaaaccgagatgagctcaacggtttttttaataaactgatccgaaatgtgattgccctcagggatcaacaggcggcagaggaacgaaggagggactttctccagatggtacttgacgcccgccatagtgctagtcccatgggagtccaagacttcgacatagttcgagatgtgttcagctccacagggtgtaagcctaatcccagccggcagcatcagccaagcccgatggctagacctttaaccgttgatgaaatcgtgggccaggcgttcatcttcctaattgcaggctatgagattattacgaatacgctctcctttgccacctacctgctcgcaactaacccagattgccaggaaaagctcttaagggaggtagatgtttttaaagagaagcacatggcccccgaattctgttcgctggaggaaggtctgccctatcttgatatggtgatcgctgagaccttgaggatgtaccctcccgctttcaggttcaccagagaggctgcccaggattgcgaggttttaggacagagaatccccgcgggggctgttctagaaatggctgtcggcgccttgcatcatgacccagaacattggcccagccctgagacgttcaatcctgaacgatatcggtgttcatag

SEQ ID NO: 221118 - DNA, 453 bp, Artificial Sequence
  derived and/or modified sequence
atggaggccctgggcttcctgaagctggaggtgaacggccccatggtaacggtggctctgagcgttgcactgctggcactactgaaatggtacagcacttccgctttctcgagactggagaaactcggactgcgacaccccaagccttccccctttatcggaaacctgacattctttaggcaagggttctgggaatcacagatggagctcaggaagctctatggccctctgtgcggctactacctcggcagacgtatgttcatcgtaatctctgagccagatatgattaaacaggtgcttgtcgagaacttctccaactttacgaataggatggcatccggcctggagttcaaatcggtggctgattccgtgctattcctgcgcgataaacggtgggaagaagttcgtggagccttaatgtcggctttttcaccagagaaactcaatgagtag

SEQ ID NO: 221119 - DNA, 459 bp, Artificial Sequence
  derived and/or modified sequence
atgatggaggccctgggcttcctgaagctggaggtgaacggccccatggttacagtggcactgtccgtggccctgctagcccttctgaagtggtattcaacaagtgcgttttccaggctcgaaaagctaggcctacggcaccccaagccttcgccttttatagggaatctcacctttttccgtcaaggcttctgggaatcccagatggagctgcggaaactctatgggcccctgtgtggctattacctgggccggagaatgtttatcgttattagtgagccagacatgatcaaacaggtcttggtggaaaacttcagtaactttacaaaccgcatgccccagtcaattatgcctaattcacgccaccacgttgcaagtcggggaatgtggcctggaggtaggaggttggcatgctacctgcatcctttccggatggctgagggcattgcagaggtgtag

SEQ ID NO: 221120 - DNA, 1380 bp, Artificial Sequence
  derived and/or modified sequence
atggaagcgctaggttttcttaaacttgaagtgaacgggcctatggtgacagtcgctctttccgtcgcgctccttgcgttactgaaatggtattctacgtctgccttcagccgactggaaaaactcgggctgcgccatcccaaaccctcgcccttcatcggtaacctgactttcttccgacaggggttctgggaaagccagatggagctgagaaagctttacggacccctgtgcggttactacctgggacgcaggatgttcatcgtaatttctgaacccgacatgattaaacaggtgctggtcgagaacttttctaacttcactaatcggatggcatcaggacttgagttcaagagtgtagccgatagcgtgctattcctgagggacaaacgatgggaagaggtacgcggtgccctcatgagtgccttctctcccgagaagttgaatgaaatggttccattaatatcgcaggcctgtgagttgctcctcgctcaccttaagcgctatgccgaatccggcgatgcgttcgatattcagagatgttattgtaattacactacggacgttgtcgcttctgtcgccttcggaacaccagtagactcttggcaggcaccagaagatcctttcgtaaagcattgtaaaaggttttttgaattctgcattccccgacctattttagtcttgctcttgtctttcccctccatcatggtgccactcgctaggattctgcctaataagaacagggacgaactgaatggctttttcaataagcttatacgcaatgttatcgccctgagagaccagcaggctgccgaggagagacgccgagatttcctgcagatggtgctggacgctcgacattccgccagtcctatgggcgtacaggactttgatatcgtccgggatgtcttcagcagcacaggctgtaagccgaacccatcgcgccaacatcagccttcaccgatggcccgtcctctcaccgtagatgagattgtgggacaagcctttattttcctcattgccggatacgagatcatcactaatactctgtcattcgccacctacctactcgccactaacccagactgtcaagaaaagttgctgcgcgaagtggacgttttcaaagagaaacacatggcccctgagttctgttcactagaggagggtctgccgtacctggacatggtaatagccgagacacttagaatgtatccccctgctttcagattcacacgcgaggccgctcaggattgcgaggtgttggggcagcggatccccgctggcgctgtcctcgaaatggcagtaggtgcacttcaccatgaccctgagcattggccaagtccagagacgttcaacccggaacgctacagatgcagctag

SEQ ID NO: 221121 - DNA, 1383 bp, Artificial Sequence
  derived and/or modified sequence
atgatggaagccctgggcttcctgaagctggaagtcaacggtcctatggtgaccgtggctttatccgtggcactgcttgccttgcttaaatggtacagtacaagtgctttctcacgcttagagaagctcggccttcgtcatcccaagccttccccgttcatcggaaacttgaccttttttcgtcagggattttgggagtcccagatggagctgcgcaagctctatggtcccctgtgtggatactacttgggccgtagaatgtttattgtaatttcagagcccgatatgatcaagcaggtcctagtggagaatttttccaatttcaccaaccgaatggctagcggcctcgaatttaagagtgtagccgactccgttctcttcttgagagacaaaaggtgggaagaggtgcggggagccctcatgtcggcgttttctccagaaaagctcaatgaaatggtaccactaattagtcaagcctgtgagttgctgctggcacatctgaaaaggtatgccgaaagcggcgatgccttcgacatccagcgctgttattgtaattataccacggacgtcgtggcgtcggtcgcttttgggacccctgtggacagttggcaagctccagaggatccatttgttaaacattgcaagaggtttttcgaattttgcatcccaagacccattctcgtgctgctgctgtcatttcccagcatcatggtcccgttggcccgaattttgcctaacaagaacagggacgagttgaatgggttcttcaataagctgatacgcaatgtgatcgccttacgcgaccaacaggctgcggaggaacgccgaagggatttcctgcaaatggtcttggatgccaggcactccgcctcgcctatgggcgttcaagattttgacatcgtccgggatgtgttctcctccaccggttgtaaacccaaccctagccgtcagcaccagccatcccccatggctaggccattgaccgtcgatgagatcgtggggcaggcgtttatctttcttatagccggatatgagatcatcacaaacactctttcattcgccacgtacctcttggcaacaaaccccgattgccaagagaaactgttaagggaggtagacgtgttcaaggagaagcatatggccccagagttttgtagcctggaagaaggcctgccatatctagacatggtcattgctgaaacgctgaggatgtatcctcccgcattcagatttaccagagaggcggctcaggactgcgaggtgctcggacagcgcatacccgctggtgctgtcctcgagatggccgtgggcgctctccatcacgatcccgaacattggcccagcccagagacctttaacccggagaggtaccggtgttcttag

SEQ ID NO: 221122 - DNA, 453 bp, Artificial Sequence
  derived and/or modified sequence
atggaagctctaggatttctcaagctggaggtaaatggccctatggttaccgtggccctctccgttgctttgttagccctgctgaaatggtactctacatccgccttcagtcggctggaaaagctgggtctcaggcaccctaagccctcaccattcattggcaacttaacctttttccgccaaggcttctgggaatcccagatggagctgcggaagctttatgggcctctttgcggatattatcttggtagacgcatgtttattgtgatctcagaaccagatatgatcaagcaggtgctggttgagaattttagcaactttacgaatagaatggcaagtgggctggaattcaagtccgtggctgacagcgttctgtttttgcgagacaaacgttgggaagaggttcgtggcgcattgatgtcagcttttagccccgagaagcttaacgaatag

SEQ ID NO: 221123 - DNA, 459 bp, Artificial Sequence
  derived and/or modified sequence
atgatggaggctttggggtttttgaaactggaagtgaacgggcctatggtaaccgtggcactgtccgttgctctactggcactgctcaagtggtacagcacaagcgccttcagtagacttgagaaactcggtttgaggcaccctaaaccaagcccgtttatcggtaacctgaccttcttccgacaggggttttgggagtctcagatggagctgaggaagttgtatggaccactgtgcgggtattacttgggcaggagaatgttcattgtcatatccgaacctgacatgattaagcaggttctggtggagaacttttcaaactttacaaataggatgccacaaagcataatgccaaatagtcggcaccacgtggcctctcgcggtatgtggccgggtggacggcgtttagcatgctacttgcacccttttcgaatggccgaaggcattgctgaggtttag

SEQ ID NO: 221124 - DNA, 1792 bp, Artificial Sequence
  derived and/or modified sequence
actccatgtgatgtttgcttggttgcctgttcccttttctacctgcagagcacggttcccataagggcggcgagatcagcctcctgtctcatctggaagaccaccactctggggtctcagaggaatgatggaagccttggggtttctaaaattggaagtgaatggccccatggtgacggtggccctgtcagtggctctcttggccctcctgaaatggtactccacatcagcattctcaagactggagaagttaggcctcagacatcccaagccttctcctttcattggaaacttgacatttttccgccagggtttttgggaaagccaaatggagctcagaaagctgtatggacctctgtgtgggtactatcttggtcgtcggatgtttattgttatttctgagccagacatgatcaagcaggtgttggttgagaacttcagtaactttaccaacagaatggcgtcgggtttggagttcaagtcggtagccgacagcgttctgtttttacgtgacaaaagatgggaagaggtcagaggtgccctgatgtctgctttcagtcctgaaaagctgaacgagatggttcccctcatcagccaagcctgcgaacttctcctggctcatttaaaacgctatgcggaatctggggacgcatttgacatccagaggtgctactgcaattacaccacagatgtggttgccagcgtcgcctttggcaccccggtggactcctggcaggcccctgaggatccctttgtgaaacactgcaagcgtttcttcgaattctgcatccccagacctatcctggttttactcttatcatttccatccataatggtcccactggcccggattttgcccaataagaaccgagacgaactgaatggcttttttaacaaactcattaggaatgtgattgccttgcgggaccagcaagctgccgaagagaggcggagagacttcctccaaatggtcctggatgcccgacattctgcaagtcccatgggcgtgcaagactttgacatcgtcagagacgttttctcctctactgggtgcaagccgaacccttcccggcaacaccagcccagccctatggccaggcctttgactgtggatgagattgtgggccaggccttcatcttcctcatcgctggctatgaaatcatcaccaacacactttcttttgccacctacctactggccaccaaccctgactgccaagagaagcttctgagagaggtagacgtttttaaggagaaacacatggcccctgagttctgcagcctcgaggaaggcctgccctatctggacatggtgattgcagagacgctgaggatgtacccgccagctttcagattcacacgggaggcagctcaggactgcgaggtgctggggcagcgcatccccgcaggcgctgtgctagagatggccgtgggtgccctgcaccatgaccctgagcactggccaagcccggagaccttcaaccctgaaaggtaccgctgcagctagaatccaaatctgccctaggtccaaaaaatggtgtctatatcaagatcgtatcccgctgacacagaaggctgccgggtggggggagggcacccccaaattcaaagaaaaccctaagtgtggatgttcagaattttggaaaaatgtcactgaagtgattgaaagagtgcctggcatgcaaggataagaggttctttacataacatttcctaaatgcttaataaacgtttgttgcacttggttttgacattgccaatggggtttgaaccagtgctctctctaaatgaa

SEQ ID NO: 221125 - DNA, 1901 bp, Artificial Sequence
  derived and/or modified sequence
aaggaataaagttgctgattcattcctttacactgaaaccctttgttgtgccctcctcttccttcctctttatagggagacactctgagaaagagcacattgtgggggcccactccatgtgatgtttgcttggttgcctgttcccttttctacctgcagagcacggttcccataagggcggcgagatcagcctcctgtctcatctggaagaccaccactctggggtctcagaggaatgatggaagccttggggtttctaaaattggaagtgaatggccccatggtgacggtggccctgtcagtggctctcttggccctcctgaaatggtactccacatcagcattctcaagactggagaagttaggcctcagacatcccaagccttctcctttcattggaaacttgacatttttccgccagggtttttgggaaagccaaatggagctcagaaagctgtatggacctctgtgtgggtactatcttggtcgtcggatgtttattgttatttctgagccagacatgatcaagcaggtgttggttgagaacttcagtaactttaccaacagaatggcgtcgggtttggagttcaagtcggtagccgacagcgttctgtttttacgtgacaaaagatgggaagaggtcagaggtgccctgatgtctgctttcagtcctgaaaagctgaacgagatggttcccctcatcagccaagcctgcgaacttctcctggctcatttaaaacgctatgcggaatctggggacgcatttgacatccagaggtgctactgcaattacaccacagatgtggttgccagcgtcgcctttggcaccccggtggactcctggcaggcccctgaggatccctttgtgaaacactgcaagcgtttcttcgaattctgcatccccagacctatcctggttttactcttatcatttccatccataatggtcccactggcccggattttgcccaataagaaccgagacgaactgaatggcttttttaacaaactcattaggaatgtgattgccttgcgggaccagcaagctgccgaagagaggcggagagacttcctccaaatggtcctggatgcccgacattctgcaagtcccatgggcgtgcaagactttgacatcgtcagagacgttttctcctctactgggtgcaagccgaacccttcccggcaacaccagcccagccctatggccaggcctttgactgtggatgagattgtgggccaggccttcatcttcctcatcgctggctatgaaatcatcaccaacacactttcttttgccacctacctactggccaccaaccctgactgccaagagaagcttctgagagaggtagacgtttttaaggagaaacacatggcccctgagttctgcagcctcgaggaaggcctgccctatctggacatggtgattgcagagacgctgaggatgtacccgccagctttcagattcacacgggaggcagctcaggactgcgaggtgctggggcagcgcatccccgcaggcgctgtgctagagatggccgtgggtgccctgcaccatgaccctgagcactggccaagcccggagaccttcaaccctgaaaggtaccgctgcagctagaatccaaatctgccctaggtccaaaaaatggtgtctatatcaagatcgtatcccgctgacacagaaggctgccgggtggggggagggcacccccaaattcaaagaaaaccctaagtgtggatgttcagaattttggaaaaatgtcactgaagtgattgaaagagtgcctggcatgcaaggataagaggttctttacataacatttcctaaatgcttaataaacgtttgttgcacttggttttgacattgccaatggggtttgaaccagtgctctctctaaatg

SEQ ID NO: 221126 - DNA, 752 bp, Artificial Sequence
  derived and/or modified sequence
gtgtgcacgcgcgcgcgtgtgtgcccaggtgcgagggttcgcgcgtgtgctggcggggagggaaccgacccgaaagagagccccacgctggcaaagtggctcgcccatctcacagccggttggcgctcgcggaggagacatatactgcctggactgcctggctgatgtgagctagtttgtctggttgagttggatgtttaaatagaaggcagaacaacaacagagcacggttcccataagggcggcgagatcagcctcctgtctcatctggaagaccaccactctggggtctcagaggaatgatggaagccttggggtttctaaaattggaagtgaatggccccatggtgacggtggccctgtcagtggctctcttggccctcctgaaatggtactccacatcagcattctcaagactggagaagttaggcctcagacatcccaagccttctcctttcattggaaacttgacatttttccgccagggtttttgggaaagccaaatggagctcagaaagctgtatggacctctgtgtgggtactatcttggtcgtcggatgtttattgttatttctgagccagacatgatcaagcaggtgttggttgagaacttcagtaactttaccaacagaatggcgtcgggtttggagttcaagtcggtagccgacagcgttctgtttttacgtgacaaaagatgggaagaggtcagaggtgccctgatgtctgctttcagtcctgaaaagctgaacgag

SEQ ID NO: 221127 - DNA, 1378 bp, Artificial Sequence
  derived and/or modified sequence
gagcacggttcccataagggcggcgagatcagcctcctgtctcatctggaagaccaccactctggggtctcagaggaatgatggaagccttggggtttctaaaattggaagtgaatggccccatggtgacggtggccctgtcagtggctctcttggccctcctgaaatggtactccacatcagcattctcaagactggagaagttaggcctcagacatcccaagccttctcctttcattggaaacttgacatttttccgccagggtttttgggaaagccaaatggagctcagaaagctgtatggacctctgtgtgggtactatcttggtcgtcggatgtttattgttatttctgagccagacatgatcaagcaggtgttggttgagaacttcagtaactttaccaacagaatgccccagagcatcatgcccaactccagacatcacgtggcctctagagggatgtggcctggagggaggcggctggcctgctacctccatcccttcaggatggccgaaggaattgcagaagtttaactgcttctctgctgcctctagattctctttcccaaacactgcattgctatctcctcgctcaaagtcccctggaagccgtctgtcaagaaactgattctgattattaaatgcagctgtagcttgttgctccatcagcctcagcaaggagtgctgattaaagaagttggagaagccaataagtcaaagtgcacggaccaccaagccacatcctggcaagcagtaaaggtactcccaggagcctgtcatagcacttgagactgtctgagcccctaagccatgagacggcacttgccaactggtgtctccatatttcctcccatgataccaggacatgtgaccctgagagctgacctagaagaggtcaatgatttggcctgctaggggcagacatactcaatgcacatgtccaagcaaggaggacacaataatattgccctcagctttgatcaatttatcctccaagccatttgtctgccgtttctaatttctttcaccatcccctcacccacccctccacgcagactaggtccagtgccccaaactccagagtagagttccaattttcgtcctcttccactcagcacaggattaagccttcaggactaagttcaagttccctagacgatatttaagggcccttgtgtcttagatccattgtgtgtgctccaccctgtctctcactgctccccaatacaaatcgtcactccagcctctccctgctcaccctcacctgctctggagagacctgacctctgccttgctcacgctgacactgcctcagaattgaaggcagtgtaacagtggggctcatattgattatgacgtgagcttgagcacatatc

SEQ ID NO: 221128 - protein, 691 aa, Artificial Sequence
  derived and/or modified sequence
MAAGVEAAAEVAATEIKMEEESGAPGVPSGNGAPGPKGEGERPAQNEKRKEKNIKRGGNRFEPYANPTKRYRAFITNIPFDVKWQSLKDLVKEKVGEVTYVELLMDAEGKSRGCAVVEFKMEESMKKAAEVLNKHSLSGRPLKVKEDPDGEHARRAMQKAGRLGSTVFVANLDYKVGWKKLKEVFSMAGVVVRADILEDKDGKSRGIGTVTFEQSIEAVQAISMFNGQLLFDRPMHVKMDERALPKGDFFPPERPQQLPHGLGGIGMGLGPGGQPIDANHLNKGIGMGNIGPAGMGMEGIGFGINKMGGMEGPFGGGMENMGRFGSGMNMGRINEILSNALKRGEIIAKQGGGGGGGSVPGIERMGPGIDRLGGAGMERMGAGLGHGMDRVGSEIERMGLVMDRMGSVERMGSGIERMGPLGLDHMASSIERMGQTMERIGSGVERMGAGMGFGLERMAAPIDRVGQTIERMGSGVERMGPAIERMGLSMERMVPAGMGAGLERMGPVMDRMATGLERMGANNLERMGLERMGANSLERMGLERMGANSLERMGPAMGPALGAGIERMGLAMGGGGGASFDRAIEMERGNFGGSFAGSFGGAGGHAPGVARKACQIFVRNLPFDFTWKMLKDKFNECGHVLYADIKMENGKSKGCGVVKFESPEVAERACRMMNGMKLSGREIDVRIDRNA

SEQ ID NO: 221129 - DNA, 2076 bp, Artificial Sequence
  derived and/or modified sequence
atggccgccggcgtggaggccgccgccgaggtggccgccaccgagatcaagatggaggaggagagcggcgcccccggcgtgcccagcggcaacggcgcccccggccccaagggcgagggcgagagacccgcccagaacgagaagagaaaggagaagaacatcaagagaggcggcaacagattcgagccctacgccaaccccaccaagagatacagagccttcatcaccaacatccccttcgacgtgaagtggcagagcctgaaggacctggtgaaggagaaggtgggcgaggtgacctacgtggagctgctgatggacgccgagggcaagagcagaggctgcgccgtggtggagttcaagatggaggagagcatgaagaaggccgccgaggtgctgaacaagcacagcctgagcggcagacccctgaaggtgaaggaggaccccgacggcgagcacgccagaagagccatgcagaaggccggcagactgggcagcaccgtgttcgtggccaacctggactacaaggtgggctggaagaagctgaaggaggtgttcagcatggccggcgtggtggtgagagccgacatcctggaggacaaggacggcaagagcagaggcatcggcaccgtgaccttcgagcagagcatcgaggccgtgcaggccatcagcatgttcaacggccagctgctgttcgacagacccatgcacgtgaagatggacgagagagccctgcccaagggcgacttcttcccccccgagagaccccagcagctgccccacggcctgggcggcatcggcatgggcctgggccccggcggccagcccatcgacgccaaccacctgaacaagggcatcggcatgggcaacatcggccccgccggcatgggcatggagggcatcggcttcggcatcaacaagatgggcggcatggagggccccttcggcggcggcatggagaacatgggcagattcggcagcggcatgaacatgggcagaatcaacgagatcctgagcaacgccctgaagagaggcgagatcatcgccaagcagggcggcggcggcggcggcggcagcgtgcccggcatcgagagaatgggccccggcatcgacagactgggcggcgccggcatggagagaatgggcgccggcctgggccacggcatggacagagtgggcagcgagatcgagagaatgggcctggtgatggacagaatgggcagcgtggagagaatgggcagcggcatcgagagaatgggccccctgggcctggaccacatggccagcagcatcgagagaatgggccagaccatggagagaatcggcagcggcgtggagagaatgggcgccggcatgggcttcggcctggagagaatggccgcccccatcgacagagtgggccagaccatcgagagaatgggcagcggcgtggagagaatgggccccgccatcgagagaatgggcctgagcatggagagaatggtgcccgccggcatgggcgccggcctggagagaatgggccccgtgatggacagaatggccaccggcctggagagaatgggcgccaacaacctggagagaatgggcctggagagaatgggcgccaacagcctggagagaatgggcctggagagaatgggcgccaacagcctggagagaatgggccccgccatgggccccgccctgggcgccggcatcgagagaatgggcctggccatgggcggcggcggcggcgccagcttcgacagagccatcgagatggagagaggcaacttcggcggcagcttcgccggcagcttcggcggcgccggcggccacgcccccggcgtggccagaaaggcctgccagatcttcgtgagaaacctgcccttcgacttcacctggaagatgctgaaggacaagttcaacgagtgcggccacgtgctgtacgccgacatcaagatggagaacggcaagagcaagggctgcggcgtggtgaagttcgagagccccgaggtggccgagagagcctgcagaatgatgaacggcatgaagctgagcggcagagagatcgacgtgagaatcgacagaaacgcctag

SEQ ID NO: 221130 - DNA, 2076 bp, Artificial Sequence
  derived and/or modified sequence
atggccgctggcgttgaagcagctgctgaggtcgccgccactgagatcaaaatggaggaggagtctggcgcaccaggggtcccaagcggcaacggagcacccggccccaagggtgaaggggaacggcctgcccagaacgagaagagaaaagagaaaaatataaagcgcggggggaatcgcttcgagccgtacgcaaatcccacgaaaagataccgtgcttttataaccaacattcccttcgatgttaaatggcagagtttaaaggatctcgttaaggaaaaggtcggggaggtaacctatgtggagcttctgatggatgcagaaggcaaaagccgaggctgcgccgtcgtggaattcaaaatggaggaatctatgaagaaggctgctgaagtgctgaataagcactcactcagtggtagaccactcaaagtgaaagaggatccagatggcgagcatgcaaggcgggccatgcagaaggcaggacgtttgggctcgacagtgttcgtcgccaaccttgattacaaggtgggctggaagaagcttaaagaggtgttttccatggccggggtggttgtgagggctgatattctggaggacaaggatgggaaaagccgagggatcgggacggtcacattcgagcagtccatcgaagccgtgcaggctatttccatgtttaatggtcagctgctgtttgacaggcccatgcacgtgaagatggacgagcgtgctttaccaaagggcgacttttttcctcctgaacggcctcagcagctcccccatggtttaggtggcatcggaatgggtctgggacccggaggccagcctatcgatgcaaaccacctgaacaagggcatagggatgggcaacataggacccgcaggtatgggcatggagggtatcggctttggaattaacaaaatgggcggtatggaaggcccgttcgggggcggcatggagaatatggggcgttttggcagcggaatgaacatggggagaattaatgagattctgagcaacgccctcaaacgcggagaaatcatcgccaaacaaggcggaggtggaggcgggggctccgtgcccggtatcgaaagaatggggccaggaattgacaggttgggcggggccggtatggaaagaatgggagcgggccttggtcatggcatggatagagtcggaagtgagatcgagcgaatgggactggttatggatcggatgggaagcgtggaaaggatgggctccggtattgaaaggatgggacctctcgggctggaccatatggcttcgtcgattgaaaggatggggcagacaatggagcgaatcggaagtggcgtggagaggatgggagctggcatgggcttcggacttgagcgaatggctgccccaattgatcgcgtggggcagaccatcgaaagaatgggatccggtgttgagaggatgggaccagctattgagcgaatgggactgtcgatggagcggatggtgccagccggcatgggagctggactggagaggatgggacctgttatggatagaatggctaccggccttgaacgcatgggggctaataacctagaaagaatgggtttagaaagaatgggggcaaatagtctggagagaatgggcttagaacgcatgggagcaaacagcctggagagaatggggccggccatggggccagccctgggggcagggatagaaagaatgggactggcaatgggaggcggaggcggtgcatcttttgaccgggctattgagatggagcgaggcaacttcggcggctctttcgccgggtccttcggcggcgcaggagggcatgctccgggagtggctaggaaggcttgtcaaatttttgtgagaaatcttccgttcgatttcacgtggaagatgttaaaagataaatttaatgagtgcggccacgtattatatgcggacatcaaaatggagaatggtaagagtaaaggatgcggagtggtcaagttcgaatcccccgaagtcgccgagcgagcatgtagaatgatgaacggtatgaagctcagcggtcgggagattgacgtgcggattgacaggaacgcctag

SEQ ID NO: 221131 - DNA, 2455 bp, Artificial Sequence
  derived and/or modified sequence
cgcgccgggaacagccagtcggtgcctaacgcgagtgtatctcgagagagaagcgatcaacagctgccggtctgcgcctgcgcgcggcgggggcgtggcccggggcgagtggggccaaggaggcagccgggagcggcgggcgcaggtgttactggttgcgtcgggtcacgtgggcgcgcaggcgcagcgcggtgcagcccgttcgctcacacaaagcccagacgcggagaaaatggcggcaggggtcgaagcggcggcggaggtggcggcgacggagatcaaaatggaggaagagagcggcgcgcccggcgtgccgagcggcaacggggctccgggccctaagggtgaaggagaacgacctgctcagaatgagaagaggaaggagaaaaacataaaaagaggaggcaatcgctttgagccatatgccaatccaactaaaagatacagagccttcattacaaacataccttttgatgtgaaatggcagtcacttaaagacctggttaaagaaaaagttggtgaggtaacatacgtggagctcttaatggacgctgaaggaaagtcaaggggatgtgctgttgttgaattcaagatggaagagagcatgaaaaaagctgcggaagtcctaaacaagcatagtctgagcggaagaccactgaaagtcaaagaagatcctgatggtgaacatgccaggagagcaatgcaaaaggctggaagacttggaagcacagtatttgtagcaaatctggattataaagttggctggaagaaactgaaggaagtatttagtatggctggtgtggtggtccgagcagacattcttgaagataaagatggaaaaagtcgtggaataggcactgttacttttgaacagtccattgaagctgtgcaagctatatctatgttcaatggccagctgctatttgatagaccaatgcacgtcaagatggatgagagggccttaccaaaaggagatttcttccctcctgagcgtccacaacaacttccccatggccttggtggtattggcatggggttaggaccaggagggcaacccattgatgccaatcacctgaataaaggcatcggaatgggaaacataggtcccgcaggaatgggaatggaaggcataggatttggaataaataaaatgggaggaatggaggggccctttggtggtggtatggaaaacatgggtcgatttggatctgggatgaacatgggcaggataaatgaaatcctaagtaatgcactgaagagaggagagatcattgcaaagcagggaggaggtggaggtggaggaagcgtccctgggatcgagaggatgggtcctggcattgaccgcctcgggggtgccggcatggagcgcatgggcgcgggcctgggccacggcatggatcgcgtgggctccgagatcgagcgcatgggcctggtcatggaccgcatgggctccgtggagcgcatgggctccggcattgagcgcatgggcccgctgggcctcgaccacatggcctccagcattgagcgcatgggccagaccatggagcgcattggctctggcgtggagcgcatgggtgccggcatgggcttcggccttgagcgcatggccgctcccatcgaccgtgtgggccagaccattgagcgcatgggctctggcgtggagcgcatgggccctgccatcgagcgcatgggcctgagcatggagcgcatggtgcccgcaggtatgggagctggcctggagcgcatgggccccgtgatggatcgcatggccaccggcctggagcgcatgggcgccaacaatctggagcggatgggcctggagcgcatgggcgccaacagcctcgagcgcatgggcctggagcgcatgggtgccaacagcctcgagcgcatgggccctgccatgggcccggccctgggcgctggcattgagcgcatgggcctggccatgggtggcggtggcggtgccagctttgaccgtgccatcgagatggagcgtggcaacttcggaggaagcttcgcaggttcctttggtggagctggaggccatgctcctggggtggccaggaaggcctgccagatatttgtgagaaatctgccattcgatttcacatggaagatgctaaaggacaaattcaacgagtgcggccacgtgctgtacgccgacatcaagatggagaatgggaagtccaaggggtgtggcgtggttaagttcgagtcgccagaggtggccgagagagcctgccggatgatgaatggcatgaagctgagtggccgagagattgacgttcgaattgatagaaacgcttaagcagttgccttttttaaacatcgatacgagacctctgaatttgtattttttcttgttaaccattttaatttgttggctggatgtataaagatgtttaaaaaattcagttgctttttggggtaatttgaattacttttttaatgactg

SEQ ID NO: 221132 - DNA, 2455 bp, Artificial Sequence
  derived and/or modified sequence
cgcgccgggaacagccagtcggtgcctaacgcgagtgtatctcgagagagaagcgatcaacagctgccggtctgcgcctgcgcgcggcgggggcgtggcccggggcgagtggggccaaggaggcagccgggagcggcgggcgcaggtgttactggttgcgtcgggtcacgtgggcgcgcaggcgcagcgcggtgcagcccgttcgctcacacaaagcccagacgcggagaaaatggcggcaggggtcgaagcggcggcggaggtggcggcgacggagatcaaaatggaggaagagagcggcgcgcccggcgtgccgagcggcaacggggctccgggccctaagggtgaaggagaacgacctgctcagaatgagaagaggaaggagaaaaacataaaaagaggaggcaatcgctttgagccatatgccaatccaactaaaagatacagagccttcattacaaacataccttttgatgtgaaatggcagtcacttaaagacctggttaaagaaaaagttggtgaggtaacatacgtggagctcttaatggacgctgaaggaaagtcaagggtaagtgttgttgttgaattcaagatggaagagagcatgaaaaaagctgcggaagtcctaaacaagcatagtctgagcggaagaccactgaaagtcaaagaagatcctgatggtgaacatgccaggagagcaatgcaaaaggctggaagacttggaagcacagtatttgtagcaaatctggattataaagttggctggaagaaactgaaggaagtatttagtatggctggtgtggtggtccgagcagacattcttgaagataaagatggaaaaagtcgtggaataggcactgttacttttgaacagtccattgaagctgtgcaagctatatctatgttcaatggccagctgctatttgatagaccaatgcacgtcaagatggatgagagggccttaccaaaaggagatttcttccctcctgagcgtccacaacaacttccccatggccttggtggtattggcatggggttaggaccaggagggcaacccattgatgccaatcacctgaataaaggcatcggaatgggaaacataggtcccgcaggaatgggaatggaaggcataggatttggaataaataaaatgggaggaatggaggggccctttggtggtggtatggaaaacatgggtcgatttggatctgggatgaacatgggcaggataaatgaaatcctaagtaatgcactgaagagaggagagatcattgcaaagcagggaggaggtggaggtggaggaagcgtccctgggatcgagaggatgggtcctggcattgaccgcctcgggggtgccggcatggagcgcatgggcgcgggcctgggccacggcatggatcgcgtgggctccgagatcgagcgcatgggcctggtcatggaccgcatgggctccgtggagcgcatgggctccggcattgagcgcatgggcccgctgggcctcgaccacatggcctccagcattgagcgcatgggccagaccatggagcgcattggctctggcgtggagcgcatgggtgccggcatgggcttcggccttgagcgcatggccgctcccatcgaccgtgtgggccagaccattgagcgcatgggctctggcgtggagcgcatgggccctgccatcgagcgcatgggcctgagcatggagcgcatggtgcccgcaggtatgggagctggcctggagcgcatgggccccgtgatggatcgcatggccaccggcctggagcgcatgggcgccaacaatctggagcggatgggcctggagcgcatgggcgccaacagcctcgagcgcatgggcctggagcgcatgggtgccaacagcctcgagcgcatgggccctgccatgggcccggccctgggcgctggcattgagcgcatgggcctggccatgggtggcggtggcggtgccagctttgaccgtgccatcgagatggagcgtggcaacttcggaggaagcttcgcaggttcctttggtggagctggaggccatgctcctggggtggccaggaaggcctgccagatatttgtgagaaatctgccattcgatttcacatggaagatgctaaaggacaaattcaacgagtgcggccacgtgctgtacgccgacatcaagatggagaatgggaagtccaaggggtgtggcgtggttaagttcgagtcgccagaggtggccgagagagcctgccggatgatgaatggcatgaagctgagtggccgagagattgacgttcgaattgatagaaacgcttaagcagttgccttttttaaacatcgatacgagacctctgaatttgtattttttcttgttaaccattttaatttgttggctggatgtataaagatgtttaaaaaattcagttgctttttggggtaatttgaattacttttttaatgactg

SEQ ID NO: 221133 - DNA, 2076 bp, Artificial Sequence
  derived and/or modified sequence
atggctgctggggtggaggccgctgctgaggtggccgccacagagatcaagatggaggaggagagcggggcccctggggtgcccagcggaaatggagcccctggccccaagggggagggggagaggcctgcccagaatgagaagaggaaggagaagaacatcaagagaggaggcaacagatttgagccctatgccaaccccaccaagcgctaccgggccttcatcaccaacatcccctttgatgtgaagtggcagagcctgaaggacctggtgaaggagaaggtgggggaggtgacctacgtggagctgctgatggatgctgagggcaagagccggggctgtgctgtggtggagttcaagatggaggagagcatgaagaaggctgctgaggtgctgaacaagcacagcctgagcggccggcccctgaaggtgaaggaggaccctgatggagagcacgcccggcgggccatgcagaaggccggccgcctgggcagcacagtgtttgtggccaacctggactacaaggtgggctggaagaagctgaaggaggtgttctccatggccggcgtggtggtgcgggctgacatcctggaggacaaggatggcaagagccggggcattggaacagtgacctttgagcagagcattgaggccgtgcaggccatctccatgttcaacggccagctgctgtttgaccggcccatgcacgtgaagatggatgagcgggccctgcccaagggggacttcttccccccagagcggccccagcagctgccccacggcctgggcggcatcggcatgggcctgggccctgggggccagcccattgatgccaaccacctgaacaagggcatcggcatgggcaacatcggccctgctggcatgggcatggagggcatcggcttcggcatcaacaagatgggcggcatggagggcccctttggaggcggcatggagaacatgggccgcttcggcagcggcatgaacatgggccgcatcaatgagatcctgagcaatgccctgaagagaggagagatcatcgccaagcagggcggcggcggcggcggcggctctgtgcccggcatcgagaggatgggccctggcatcgaccggctgggcggggccggcatggagaggatgggcgccggcctgggccacggcatggacagagtgggcagcgagattgaaagaatgggcctggtgatggacaggatgggctctgtggagaggatgggcagcggcattgaaagaatgggccccctgggcctggaccacatggccagcagcattgaaagaatgggccagaccatggagcgcatcggcagcggcgtggagaggatgggcgccggcatgggcttcggcctggagaggatggccgcccccatcgacagagtgggccagaccattgaaagaatgggcagcggcgtggagaggatgggccctgccattgaaagaatgggcctgtccatggagaggatggtgcctgctggcatgggcgccggcctggagaggatgggccctgtgatggacaggatggccaccggcctggagaggatgggcgccaacaacctggagaggatgggcctggagaggatgggcgccaacagcctggagaggatgggcctggagaggatgggcgccaacagcctggagaggatgggccctgccatgggccctgccctgggcgccggcattgaaagaatgggcctggccatgggcggcggcggcggggccagctttgaccgggccatcgagatggagcggggcaactttggaggcagctttgctggcagctttggaggagctgggggccacgcccctggggtggccaggaaggcctgccagatctttgtgaggaacctgccctttgacttcacctggaagatgctgaaggacaagttcaatgaatgtggccacgtgctgtatgctgacatcaagatggagaatggcaagagcaagggctgcggcgtggtgaagtttgagagccctgaggtggccgagcgggcctgcaggatgatgaatggcatgaagctgagcggccgggagattgatgtgagaattgacagaaatgcctag

SEQ ID NO: 221134 - DNA, 2076 bp, Artificial Sequence
  derived and/or modified sequence
atggccgccggcgtggaggccgccgccgaggtggccgccaccgagatcaagatggaagaggaaagtggagcccctggagttccctccggaaacggcgcaccaggaccaaaaggagaaggtgagcgccccgcccagaacgagaaaaggaaagaaaaaaatattaaaaggggaggaaaccggtttgaaccatacgccaatcccacaaagcgatacagggctttcataacaaacattcctttcgacgtcaagtggcagtcactcaaagatctagtgaaggaaaaggtgggagaggtcacatatgtggagctcttaatggacgccgaggggaagtccagaggatgtgccgtggtcgagtttaagatggaggagtccatgaaaaaggcagccgaagtcttgaacaagcatagcctgagtggaaggcctcttaaggttaaggaagatcctgacggtgaacacgcccggagggccatgcaaaaggccggccgtctaggttcaaccgtgttcgtcgccaacctggactataaagtcggatggaaaaaactcaaagaggtgttttccatggccggcgttgtcgtgcgtgccgacatattggaggacaaagatggaaagtcccgcgggataggaactgtcaccttcgaacagtccatagaagcagtccaggctatttcaatgtttaacggacagctgctttttgaccgacctatgcacgttaagatggatgaacgtgcgcttcccaagggggacttcttcccgcctgagaggcctcaacagctacctcacggtctcggtggcatcggaatgggcttgggcccaggtggccagcccatcgacgcaaaccatctgaataagggtatcggcatgggtaatataggccccgccggcatgggcatggaaggcatcggcttcggcataaataagatgggtgggatggagggccctttcggcggcgggatggagaatatgggcaggttcggaagcggcatgaacatgggacgaataaatgagattctttctaatgcactgaagcgcggagagatcatcgccaagcaaggtggcggagggggaggaggatcagtacccggaatcgagcggatgggaccaggaatcgatagacttggcggcgcaggaatggaaagaatgggggctggcctgggccatgggatggacagggtgggatccgagatcgaaaggatgggcttggtcatggatcgaatgggctcagtggaaaggatgggctccgggatcgaacggatggggcctctcggcttggatcatatggccagcagcatcgagaggatgggccaaacaatggaacgcatcggctccggagtagagcgtatgggagccggaatgggattcgggttagaaaggatggctgcccctatcgaccgggttggccagactatcgagcgcatgggcagcggggtggagcggatgggccctgctatcgagcgtatgggactgtcgatggagaggatggtaccggcagggatgggtgccggtcttgaacgcatgggccccgtcatggaccgtatggcaacaggcctggagcgaatgggtgccaacaacctggagcgcatggggttggagcgaatgggggcaaactcactggagcgcatggggcttgagcggatgggggccaacagtctggagagaatgggtcccgctatgggtccagcacttggcgcaggtatcgaacgcatgggactggcaatgggcgggggaggcggcgcatcgtttgatagggcaatcgagatggaacggggaaactttggcgggagctttgccggtagtttcggtggagctggcggtcacgcgcccggggtggccagaaaagcttgccaaatcttcgtgagaaatctgccttttgatttcacctggaagatgttaaaggataagttcaacgaatgcggtcacgtgctgtacgccgatattaagatggagaacgggaagagcaaaggatgcggagtggtcaaattcgagagtcctgaggtggccgaaagagcttgccgtatgatgaatggtatgaagttaagtgggagagaaatcgacgtccgcatcgatcggaatgcctag

SEQ ID NO: 221135 - DNA, 2076 bp, Artificial Sequence
  derived and/or modified sequence
atggcagccggagtggaggccgcagctgaagtcgctgcaaccgaaataaaaatggaagaggagtcaggtgccccaggcgttcccagtggaaatggggcacccggtcccaagggcgagggggagcggccagcgcagaatgagaaacgtaaagagaaaaatattaaaagaggcggtaacaggttcgaaccctatgcgaaccctacaaaacgctaccgggcatttatcactaacattccctttgatgtaaagtggcagtcactgaaagaccttgtaaaggagaaggtcggtgaggtcacgtacgtggagctactcatggacgccgaaggaaagtctcggggttgcgcagtggtggaatttaaaatggaagaaagtatgaaaaaagccgcagaagtcctgaataagcatagtctgtctggacggccattgaaagtgaaagaggaccccgacggggaacacgccaggcgtgcgatgcagaaggcaggaaggctgggttcaacagttttcgttgccaacctcgactacaaggttggatggaagaagctgaaggaggttttctcaatggctggcgtggttgtgcgtgcggacattcttgaggacaaggatggcaaatcaagagggattggtactgtgaccttcgagcaatctatcgaagccgttcaggccatttccatgtttaacggacagttgctgttcgataggccgatgcacgtgaaaatggacgagcgggcactgccaaagggggatttttttccgccagaaaggccccaacagttaccccacggactgggtgggattggaatgggacttggtcccggaggccagcccatcgacgcaaaccacctgaacaaggggataggaatgggaaatatcggccctgcagggatggggatggagggaatcggcttcggcattaacaaaatgggcggtatggaggggcctttcggtgggggaatggagaatatgggtcgcttcggaagcgggatgaacatggggaggatcaacgagatactgtccaacgcactgaagagaggcgagattatcgcaaaacagggaggaggaggcggtggcggatcagtcccaggaatcgaacggatggggcctgggattgatcgactgggaggcgctggtatggagaggatgggagcagggttgggacacgggatggatcgcgttggctccgagatcgagaggatggggctcgtcatggacagaatgggcagcgtcgaaagaatgggtagcggcatcgaaagaatggggccactgggcttggaccacatggcatccagtatcgaacgcatggggcaaactatggagcgcattggcagtggcgtggaacgaatgggagccggaatgggattcggtctcgaaaggatggccgcacccatcgatagagtcggccaaaccattgaaaggatgggaagcggggtcgagaggatgggacccgctatcgaacgcatggggctaagcatggagcgaatggtgccggcaggtatgggtgccggtctggagcgtatgggacctgtgatggatcgcatggctacagggctcgagaggatgggagctaacaatctggagaggatggggctagagcggatgggtgctaatagcctcgagcgaatgggcttggagaggatgggggcaaactcactcgaaaggatggggcctgctatggggccagcacttggtgctggcatcgaacgaatgggtttagctatgggcggtggcggaggggctagctttgaccgcgctatcgagatggagcggggtaactttggcggatcatttgccggatcattcggcggagccggtggccatgctccgggagtggcacgcaaggcttgtcagatttttgtgcgaaacctgcccttcgacttcacatggaagatgctgaaagataaatttaatgagtgcggacatgtgctgtatgctgatatcaagatggagaatggaaaatccaagggatgcggggtggtgaagttcgagagcccagaggtggccgagagagcctgcaggatgatgaacggaatgaagctgagcggcagagaaatcgacgtgcgaattgatcgaaacgcatag

SEQ ID NO: 221136 - protein, 734 aa, Artificial Sequence
  derived and/or modified sequence
MSWESGAGPGLGSQGMDLVWSAWYGKCVKGKGSLPLSAHGIVVAWLSRAEWDQVTVYLFCDDHKLQRYALNRITVWRSRSGNELPLAVASTADLIRCKLLDVTGGLGTDELRLLYGMALVRFVNLISERKTKFAKVPLKCLAQEVNIPDWIVDLRHELTHKKMPHINDCRRGCYFVLDWLQKTYWCRQLENSLRETWELEEFREGIEEEDQEEDKNIVVDDITEQKPEPQDDGKSTESDVKADGDSKGSEEVDSHCKKALSHKELYERARELLVSYEEEQFTVLEKFRYLPKAIKAWNNPSPRVECVLAELKGVTCENREAVLDAFLDDGFLVPTFEQLAALQIEYEDGQTEVQRGEGTDPKSHKNVDLNDVLVPKPFSQFWQPLLRGLHSQNFTQALLERMLSELPALGISGIRPTYILRWTVELIVANTKTGRNARRFSAGQWEARRGWRLFNCSASLDWPRMVESCLGSPCWASPQLLRIIFKAMGQGLPDEEQEKLLRICSIYTQSGENSLVQEGSEASPIGKSPYTLDSLYWSVKPASSSFGSEAKAQQQEEQGSVNDVKEEEKEEKEVLPDQVEEEEENDDQEEEEEDEDDEDDEEEDRMEVGPFSTGQESPTAENARLLAQKRGALQGSAWQVSSEDVRWDTFPLGRMPGQTEDPAELMLENYDTMYLLDQPVLEQRLEPSTCKTDTLGLSCGVGSGNCSNSSSSNFEGLLWSQGQLHGLKTGLQLF

SEQ ID NO: 221137 - DNA, 2328 bp, Artificial Sequence
  derived and/or modified sequence
gtgcggagcggcgcggcacagagcctgttgttgagctcagtatgtcgtgggaatccggggccgggccaggtctaggttcccaggggatggatctcgtgtggagtgcgtggtacggaaagtgcgttaaagggaaagggtcgttgccactctcggcccacggcatcgtggtcgcctggctcagcagggccgagtgggaccaggtgacggtttatctgttctgtgacgaccataagttgcagcggtacgcgcttaaccgcatcacggtgtggaggagcaggtcaggcaacgaactccctctggcagtggcttctactgctgacctgatacgctgtaagctcttggatgtaactggtggcttgggcactgatgaacttagactgctctatggcatggcattggtcaggtttgtgaatcttatctcagagaggaagacaaagtttgccaaggtccccctcaagtgtctggctcaagaggtaaatattccggattggattgttgaccttcgccatgagttgacccacaagaaaatgccccatataaatgactgccgcagaggctgctactttgtcctggattggctccagaagacctattggtgccgccaactggagaacagcctgagagagacctgggagttggaggagttcagggaagggatagaggaagaggatcaagaggaagataagaacattgttgttgatgacatcacagaacagaaaccagagcctcaggatgatgggaaaagtacggagtcagatgtaaaggccgatggagacagcaaaggcagcgaagaggtggattctcattgcaaaaaggccctgagtcataaagagctatatgaaagagcccgagaactgctggtatcatacgaagaggagcagtttacgggaggctgtgctggatgcttttctggatgatggcttccttgtccccacatttgaacagttggcagctttgcagatagaatatgaagatggtcagactgaggtccagagaggggaaggtactgacccaaagtcacacaaaaacgtggacttgaatgacgtcctggtgccaaagccgttctctcagttctggcagcccctgctcaggggcctgcactcccagaacttcacgcaggccctattggagaggatgctctctgaactgccagccttggggatcagcgggatccggcctacctacatcctcagatggaccgttgaactgatcgtggccaacaccaagactggacggaatgctcgccgattttctgcaggccagtgggaagcaagaaggggctggaggctgttcaactgctccgcctcccttgactggccccggatggttgagtcctgcttgggctcaccttgctgggccagcccccaactccttcggatcatcttcaaagccatggggcagggcctgccagacgaggagcaggagaagctgctgcgcatctgttccatttatacccagagtggagaaaacagcctggtgcaggagggctctgaggcctcccccattgggaagtctccatatacactagacagcctgtattggagcgtcaagccagccagctccagcttcgggtctgaagcaaaggcccagcaacaggaggagcagggcagtgttaatgatgtcaaggaagaggagaaggaggagaaagaggtcttgccagaccaggtagaggaggaggaagaaaatgatgaccaagaggaggaagaggaggatgaagatgatgaagatgatgaagaggaagacagaatggaggtggggcctttctctacagggcaagagtcccccactgccgagaatgctaggcttctggcccagaaaagaggagctttgcagggctctgcatggcaggttagctcagaagacgtgcgatgggacacatttcccctaggccgaatgccaggtcagaccgaggacccagcagagctcatgctggagaattatgacaccatgtatcttttggaccagcctgtgctagagcagcggctggaaccctcaacatgcaagactgacaccttgggcctgagctgtggtgtcggcagtggcaactgcagcaacagcagcagcagcaacttcgagggccttctctggagccaggggcagctgcatgggctcaaaactggcctgcagctcttctgatggccatccctggtgcaagtgttcatccagccgtgccagggcaacagcccaccccctagtacaactgatgctccctgagacaacctgggagacagcctggatcagccacatcaactcagttgtccaccacaggggaattttgaatgtcttttgtttttgttttgttttgaaaaataataaacaggcaactgt

SEQ ID NO: 221138 - DNA, 2439 bp, Artificial Sequence
  derived and/or modified sequence
gtgcggagcggcgcggcacagagcctgttgttgagctcagtatgtcgtgggaatccggggccgggccaggtctaggttcccaggggatggatctcgtgtggagtgcgtggtacggaaagtgcgttaaagggaaagggtcgttgccactctcggcccacggcatcgtggtcgcctggctcagcagggccgagtgggaccaggtgacggtttatctgttctgtgacgaccataagttgcagcggtacgcgcttaaccgcatcacggtgtggaggagcaggtcaggcaacgaactccctctggcagtggcttctactgctgacctgatacgctgtaagctcttggatgtaactggtggcttgggcactgatgaacttagactgctctatggcatggcattggtcaggtttgtgaatcttatctcagagaggaagacaaagtttgccaaggtccccctcaagtgtctggctcaagaggtaaatattccggattggattgttgaccttcgccatgagttgacccacaagaaaatgccccatataaatgactgccgcagaggctgctactttgtcctggattggctccagaagacctattggtgccgccaactggagaacagcctgagagagacctgggagttggaggagttcagggaagggatagaggaagaggatcaagaggaagataagaacattgttgttgatgacatcacagaacagaaaccagagcctcaggatgatgggaaaagtacggagtcagatgtaaaggccgatggagacagcaaaggcagcgaagaggtggattctcattgcaaaaaggccctgagtcataaagagctatatgaaagagcccgagaactgctggtatcatacgaagaggagcagtttacggtgctggagaaatttaggtatttacctaaggccattaaggcgtggaataacccgtccccacgtgtagaatgtgtcctggcagagctcaagggcgttacatgcgagaacagggaggctgtgctggatgcttttctggatgatggcttccttgtccccacatttgaacagttggcagctttgcagatagaatatgaagatggtcagactgaggtccagagaggggaaggtactgacccaaagtcacacaaaaacgtggacttgaatgacgtcctggtgccaaagccgttctctcagttctggcagcccctgctcaggggcctgcactcccagaacttcacgcaggccctattggagaggatgctctctgaactgccagccttggggatcagcgggatccggcctacctacatcctcagatggaccgttgaactgatcgtggccaacaccaagactggacggaatgctcgccgattttctgcaggccagtgggaagcaagaaggggctggaggctgttcaactgctccgcctcccttgactggccccggatggttgagtcctgcttgggctcaccttgctgggccagcccccaactccttcggatcatcttcaaagccatggggcagggcctgccagacgaggagcaggagaagctgctgcgcatctgttccatttatacccagagtggagaaaacagcctggtgcaggagggctctgaggcctcccccattgggaagtctccatatacactagacagcctgtattggagcgtcaagccagccagctccagcttcgggtctgaagcaaaggcccagcaacaggaggagcagggcagtgttaatgatgtcaaggaagaggagaaggaggagaaagaggtcttgccagaccaggtagaggaggaggaagaaaatgatgaccaagaggaggaagaggaggatgaagatgatgaagatgatgaagaggaagacagaatggaggtggggcctttctctacagggcaagagtcccccactgccgagaatgctaggcttctggcccagaaaagaggagctttgcagggctctgcatggcaggttagctcagaagacgtgcgatgggacacatttcccctaggccgaatgccaggtcagaccgaggacccagcagagctcatgctggagaattatgacaccatgtatcttttggaccagcctgtgctagagcagcggctggaaccctcaacatgcaagactgacaccttgggcctgagctgtggtgtcggcagtggcaactgcagcaacagcagcagcagcaacttcgagggccttctctggagccaggggcagctgcatgggctcaaaactggcctgcagctcttctgatggccatccctggtgcaagtgttcatccagccgtgccagggcaacagcccaccccctagtacaactgatgctccctgagacaacctgggagacagcctggatcagccacatcaactcagttgtccaccacaggggaattttgaatgtcttttgtttttgttttgttttgaaaaataataaacaggcaactgta

SEQ ID NO: 221139 - DNA, 2205 bp, Artificial Sequence
  derived and/or modified sequence
atgtcttgggaatcaggggctggcccagggctgggcagtcagggcatggacctggtctggtccgcatggtacggcaagtgtgttaaaggcaaaggatccctgcccctgtcagcacacggcattgtcgtcgcttggctgagtagggcggagtgggaccaagttaccgtgtacctgttctgtgacgaccataaattacaaaggtacgcgctcaaccgcatcaccgtctggagatcccgctcaggtaatgagctgccgctggctgtggcgagcacagccgacctgattcgctgcaagctcctggatgtcacaggcgggctcggaactgacgaactccggctcctgtatggtatggcattggtgcggtttgtcaacttgatcagtgaaaggaagacaaagttcgctaaagtgccactgaagtgtttggcccaagaagtaaatatcccagactggattgtcgatctgagacatgaactgacccacaagaagatgccacacattaatgactgtcgacggggctgttacttcgtgctcgattggctacagaagacgtactggtgccgccagttagaaaactctctgagagagacatgggagctcgaggagttccgggaggggattgaggaggaagaccaggaagaagataagaacatagttgttgacgatataaccgagcaaaaaccagagccccaggacgatggaaagagcactgagtcagacgtgaaggccgatggtgactcgaagggttccgaggaggtggactcccactgtaagaaggccctgtcccacaaagaattatacgagagggcccgcgagttgctggtgtcgtacgaagaggaacaatttacagtccttgagaaatttcgctacctcccgaaggctatcaaggcatggaataacccctctcctcgcgtcgaatgcgtgcttgccgagctgaagggggtgacctgcgagaacagggaagccgttctggacgcatttcttgatgatggatttctggtgcctactttcgaacagctcgccgccttgcagattgagtacgaagacggacaaaccgaagtccagcgcggggagggcactgaccccaaatcccacaagaacgtggacctgaatgatgttctggtacccaaacctttcagtcagttctggcagcctctgctgagaggactccattcccagaacttcactcaagccctgctggagcgcatgctcagtgagctgccagcgctggggatttccgggattcgccctacctacatattaagatggactgtagaactgatcgtcgctaatacgaagaccgggcgaaatgcacggcggttttctgccggccaatgggaggcccggcgtgggtggcggctgtttaattgcagtgcatccctggactggcctaggatggtcgagtcatgcctcggctccccatgctgggcatcacctcaattgctgcgtattatttttaaggccatgggacaggggctaccagatgaagagcaggaaaagctgctgcggatctgctccatttacactcaatctggtgagaattcccttgtccaggagggcagcgaagccagtcctatcggcaagtccccctataccctggatagcctctattggagcgtgaagcccgcttcatcatccttcggctccgaagcaaaggcccagcaacaggaggaacagggaagcgtgaatgatgtgaaagaggaggagaaggaagagaaggaggtgctgcccgaccaggttgaggaggaagaagagaatgatgaccaggaagaagaagaggaagacgaggacgacgaggacgacgaagaggaggataggatggaagtaggaccatttagcaccggacaggagagtcccaccgcggaaaatgccaggcttctagcacagaagagaggagccttacagggaagtgcctggcaggtttcttctgaggatgtccgctgggacacttttccgttgggcaggatgcctggacaaactgaagatcccgcggagctgatgctggagaattatgacaccatgtatctcctggatcagccagtactggagcagagactggagccaagcacatgcaagaccgataccctgggcctgtcatgcggcgtcgggtctgggaattgttctaatagctcttcatctaacttcgagggcctgctctggagtcagggacaattgcatggcctcaagaccggactgcagctcttttag

SEQ ID NO: 221140 - DNA, 2205 bp, Artificial Sequence
  derived and/or modified sequence
atgtcctgggagagcggggccggccctggcctgggcagccagggcatggacctggtgtggagcgcctggtacggcaaatgtgtgaagggcaagggcagcctgcccctgagcgcccatggaattgtggtggcctggctgagcagagctgagtgggaccaggtgacagtgtacctgttctgtgatgaccacaagctgcagagatatgccctgaaccgcatcaccgtgtggaggagccgctctggaaatgagctgcccctggccgtggccagcacagctgacctgatccgctgcaagctgctggatgtgactggaggcctgggcacagatgagctgcggctgctgtatggcatggccctggtgcgctttgtgaacctgatcagcgagaggaagaccaagtttgccaaggtgcccctgaagtgcctggcccaggaggtgaacatcccagactggatcgtggacctgcggcatgagctgacccacaagaagatgccccacatcaatgactgccggcggggctgctactttgtgctggactggctgcagaagacctactggtgccggcagctggagaacagcctgcgggagacctgggagctggaggagttccgggagggcatcgaggaggaggaccaggaggaggacaagaacatcgtggtggatgacatcacagagcagaagccagagccccaggatgatggcaagagcacagaaagtgatgtgaaggcagatggagacagcaaaggaagtgaggaggtggacagccactgcaagaaggccctgagccacaaggagctgtatgaaagagcccgggagctgctggtgtcctatgaggaggagcagttcaccgtgctggagaagttccgctacctgcccaaggccatcaaggcctggaacaaccccagcccccgggtggagtgtgtgctggccgagctgaagggcgtgacctgtgaaaatcgggaggccgtgctggatgccttcctggatgatggcttcctggtgcccacctttgagcagctggccgccctgcagatcgagtatgaagatggccagacagaggtgcagagaggagagggcacagaccccaagagccacaagaatgtggacctgaatgatgtgctggtgcccaagcccttcagccagttctggcagcccctgctgcggggcctgcacagccagaacttcacccaggccctgctggagaggatgctgtctgagctgcctgccctgggcatcagcggcatccggcccacctacatcctgcgctggacagtggagctgattgtggccaacaccaagacaggaagaaatgcccggcgcttctctgctggccagtgggaggcccggcggggctggaggctcttcaactgcagcgccagcctggactggcccaggatggtggagagctgcctgggcagcccctgctgggccagcccccagctgctgcgcatcatcttcaaggccatgggccagggcctgcctgatgaggagcaggagaagctgctgcgcatctgcagcatctacacccagagcggggagaacagcctggtgcaggagggcagcgaggccagccccatcggcaagagcccctacaccctggacagcctgtactggagcgtgaagccagccagcagcagctttggcagcgaggccaaggcccagcagcaggaggagcagggctctgtgaatgatgtgaaggaggaggagaaggaggagaaggaggtgctgcctgaccaggtggaggaggaggaggagaatgatgaccaggaggaggaggaggaggatgaagatgatgaagatgatgaggaggaggacaggatggaggtgggccccttcagcacaggccaggagagccccacagcagaaaatgcccggctgctggcccagaagagaggagccctgcagggcagcgcctggcaggtgtccagtgaagatgtgcgctgggacaccttccccctgggccgcatgcctggccagacagaggaccctgctgagctgatgctggagaactatgacaccatgtacctgctggaccagcctgtgctggagcagaggctggagcccagcacctgcaagacagacaccctgggcctgagctgtggggtgggcagcggcaactgcagcaacagcagcagcagcaactttgagggcctgctgtggagccagggccagctgcacggcctgaagacaggcctgcagctgttctag

SEQ ID NO: 221141 - DNA, 2205 bp, Artificial Sequence
  derived and/or modified sequence
atgagctgggagagcggcgccggccccggcctgggcagccagggcatggacttggtatggtctgcatggtatggtaagtgcgtgaagggcaaaggaagcctgcctctgtctgcccatgggatcgtggtggcatggctgagccgagctgagtgggatcaggtcacggtctatctattctgcgatgatcacaaactccaacgttatgctctgaaccgcatcaccgtctggagaagtcggtcagggaacgagcttccactcgctgtcgcatccacagcagatcttatcaggtgtaagctgctagacgttactggcggcctgggcacggatgagctccggctgctctacggtatggcgcttgtgcgctttgtaaatttgattagtgaaaggaagaccaagtttgctaaagtccccttaaagtgcttagcccaggaggtaaatatccccgactggattgttgacctgcggcacgaactcactcataaaaaaatgccccacatcaatgactgtcgtagaggatgttatttcgtcctggactggcttcaaaaaacatactggtgtcgacagctggaaaattctttgcgcgaaacctgggagcttgaggagttccgagaaggcattgaagaagaggaccaggaggaagacaagaacattgttgttgacgatataaccgaacagaagcccgaacctcaggacgatggaaagtccacagagtctgacgtcaaagctgatggcgactccaaaggatctgaggaagtagactctcactgtaaaaaagctctgagtcacaaggagttgtacgagcgcgcaagggagctgttagtgagctacgaggaagaacagttcacagttctggaaaaattccggtatctacccaaagccataaaagcttggaataacccgtcccccagggtggagtgcgttctcgccgagctgaaaggggtcacatgcgagaatcgggaggccgtactggacgcttttctcgacgacggcttcctggtgcccacctttgaacagctggccgcactgcaaattgagtacgaggacggccagactgaagtgcagcgtggcgagggtactgacccaaaatcgcacaagaacgtcgatttaaatgatgtgctcgtccccaagccattttcacaattctggcagccgttgctgcgcgggttgcattcccagaattttacgcaggccctcttggagcgcatgttgagcgaactgcccgctctcggaatttcggggattcgtcccacttacatcttaagatggaccgtggagcttatcgttgcaaacaccaaaaccggaaggaacgctagacgcttcagcgccggtcagtgggaggcacggcgtggttggagactctttaattgtagtgcttccctggactggccccggatggtggagagctgtctagggtccccgtgctgggcctcgccgcagctcttgaggatcatttttaaggctatgggacaggggctgcccgatgaggaacaggaaaagctgctgagaatctgcagcatttatacacagtctggtgaaaattcattggtccaggaaggtagtgaagctagcccaatcggaaaaagcccttatacgttggactctttgtattggtccgtgaagcccgcctctagctctttcggttccgaagcaaaagcacagcagcaggaggagcagggaagtgtgaatgatgtcaaagaagaggagaaggaggagaaagaggtactaccagatcaagtagaagaagaagaggagaatgacgatcaggaggaagaggaggaggacgaggacgatgaagacgacgaggaggaggacaggatggaggttggaccattctctaccggacaagagagtcctactgccgaaaacgcaagactgctcgctcagaaaagaggcgcccttcaggggtccgcatggcaggtgtcgtccgaggacgtgaggtgggacacgttcccattagggcggatgccaggtcagaccgaggaccctgcagaactcatgctggagaactatgatacaatgtacctgctcgaccagccagtcttggagcagcgacttgaaccctctacctgcaagacggatacactgggcttgtcctgtggggtgggctctggtaattgttctaactcttcctcaagcaatttcgagggcctgctctggagtcagggacagctacacggcctgaagactgggctgcagctgttttag

SEQ ID NO: 221142 - DNA, 2205 bp, Artificial Sequence
  derived and/or modified sequence
atgtcatgggaaagtggtgcaggtccaggcctggggagccaaggcatggacttggtctggtcagcctggtatggaaaatgcgttaagggtaagggcagcctgccactgtcagcccacgggattgtggttgcctggctgtcccgcgcagagtgggaccaggtcaccgtgtacttattttgcgatgatcacaaattgcagagatatgcccttaaccgcatcacagtgtggcggagccggtctggcaatgaactgcccctggcagtggcgagtacagcggacctgattagatgtaaactgttggatgtgaccggtgggctggggacagacgagttgaggcttctttatggcatggcgctcgtgcgtttcgtgaacctcatctctgagcgaaagaccaagtttgccaaagtcccactaaagtgtctggctcaagaggtgaacatacccgactggatagtggacttaagacatgagcttacccacaagaagatgcctcatattaatgactgtaggaggggatgctatttcgtgctggattggctgcaaaaaacatactggtgccgccagttggagaatagcctgcgggagacgtgggagctggaagagtttagagaaggtatcgaagaagaggaccaggaagaagataagaacattgtggtagacgacatcacagagcagaaacccgagccacaggacgacggaaaatccaccgaaagcgatgtcaaggctgacggagactcaaaaggttccgaagaggtcgactcccactgtaaaaaagccctgtcacacaaggagttatatgaaagggccagagagttgctcgtttcttacgaggaggaacagttcactgtgctcgaaaaattccgctatcttcccaaggcgattaaagcctggaataatccttctcctagggtggagtgtgtcttggccgagcttaaaggggtcacttgtgagaatcgcgaggctgtgctggatgcctttttggacgacggttttctggtcccaacattcgaacaactggcagccctccagattgaatatgaggatgggcaaaccgaagtacagagaggtgaagggaccgatcccaaatcccacaagaacgtggacctcaacgacgtgctcgttcccaagccattttcacagttttggcagcctctgttgcgaggccttcatagccagaatttcacacaggccctgttggaacgcatgttgagcgagttgcccgcactgggcatttccggcataagaccaacatatattctgcgttggaccgtcgagcttattgtggctaatacaaagaccggacgcaacgccagaaggttttctgctggacagtgggaggcacggagaggctggcgtctgttcaactgttctgcatccctggattggccaagaatggtggaatcatgcctcggctccccatgctgggcttctccgcaactcctgcgaatcatttttaaagccatgggccaggggctccctgacgaggagcaggaaaaactccttagaatctgttcaatttatacccagtcaggcgaaaacagcctggtgcaggagggcagtgaagccagcccaattgggaagtccccgtatactctcgattccctgtattggtccgttaagcccgcatcttcctctttcggtagtgaggccaaagcgcagcagcaggaagaacaggggagtgtgaatgacgtcaaagaggaagaaaaggaagagaaggaagttctgcccgatcaggtggaggaggaagaagagaatgatgatcaggaagaagaggaggaggacgaagatgatgaagatgacgaagaagaggacaggatggaggtggggccttttagtaccggacaggaatctcccactgccgagaacgccagactcctcgctcagaaaagaggagccctgcagggatctgcatggcaagtgtcaagtgaggatgtcaggtgggacacttttcccctggggaggatgccaggccaaacggaggaccccgctgagctgatgctcgagaactacgacacaatgtacctgctggaccagcccgtgttagaacaaagattagaaccttccacttgcaaaacagacactcttggcctaagttgtggagtgggatcaggcaactgcagtaacagctcctcatccaattttgaaggactgctatggtctcagggtcagctgcacggccttaaaaccgggctacaactgttttag

SEQ ID NO: 221143 - DNA, 2205 bp, Artificial Sequence
  derived and/or modified sequence
atgagctgggagagcggcgccggccccggcctgggcagccagggcatggacctggtgtggagcgcctggtacggcaagtgcgtgaagggcaagggcagcctgcccctgagcgcccacggcatcgtggtggcctggctgagcagagccgagtgggaccaggtgaccgtgtacctgttctgcgacgaccacaagctgcagagatacgccctgaacagaatcaccgtgtggagaagcagaagcggcaacgagctgcccctggccgtggccagcaccgccgacctgatcagatgcaagctgctggacgtgaccggcggcctgggcaccgacgagctgagactgctgtacggcatggccctggtgagattcgtgaacctgatcagcgagagaaagaccaagttcgccaaggtgcccctgaagtgcctggcccaggaggtgaacatccccgactggatcgtggacctgagacacgagctgacccacaagaagatgccccacatcaacgactgcagaagaggctgctacttcgtgctggactggctgcagaagacctactggtgcagacagctggagaacagcctgagagagacctgggagctggaggagttcagagagggcatcgaggaggaggaccaggaggaggacaagaacatcgtggtggacgacatcaccgagcagaagcccgagccccaggacgacggcaagagcaccgagagcgacgtgaaggccgacggcgacagcaagggcagcgaggaggtggacagccactgcaagaaggccctgagccacaaggagctgtacgagagagccagagagctgctggtgagctacgaggaggagcagttcaccgtgctggagaagttcagatacctgcccaaggccatcaaggcctggaacaaccccagccccagagtggagtgcgtgctggccgagctgaagggcgtgacctgcgagaacagagaggccgtgctggacgccttcctggacgacggcttcctggtgcccaccttcgagcagctggccgccctgcagatcgagtacgaggacggccagaccgaggtgcagagaggcgagggcaccgaccccaagagccacaagaacgtggacctgaacgacgtgctggtgcccaagcccttcagccagttctggcagcccctgctgagaggcctgcacagccagaacttcacccaggccctgctggagagaatgctgagcgagctgcccgccctgggcatcagcggcatcagacccacctacatcctgagatggaccgtggagctgatcgtggccaacaccaagaccggcagaaacgccagaagattcagcgccggccagtgggaggccagaagaggctggagactgttcaactgcagcgccagcctggactggcccagaatggtggagagctgcctgggcagcccctgctgggccagcccccagctgctgagaatcatcttcaaggccatgggccagggcctgcccgacgaggagcaggagaagctgctgagaatctgcagcatctacacccagagcggcgagaacagcctggtgcaggagggcagcgaggccagccccatcggcaagagcccctacaccctggacagcctgtactggagcgtgaagcccgccagcagcagcttcggcagcgaggccaaggcccagcagcaggaggagcagggcagcgtgaacgacgtgaaggaggaggagaaggaggagaaggaggtgctgcccgaccaggtggaggaggaggaggagaacgacgaccaggaggaggaggaggaggacgaggacgacgaggacgacgaggaggaggacagaatggaggtgggccccttcagcaccggccaggagagccccaccgccgagaacgccagactgctggcccagaagagaggcgccctgcagggcagcgcctggcaggtgagcagcgaggacgtgagatgggacaccttccccctgggcagaatgcccggccagaccgaggaccccgccgagctgatgctggagaactacgacaccatgtacctgctggaccagcccgtgctggagcagagactggagcccagcacctgcaagaccgacaccctgggcctgagctgcggcgtgggcagcggcaactgcagcaacagcagcagcagcaacttcgagggcctgctgtggagccagggccagctgcacggcctgaagaccggcctgcagctgttctag

SEQ ID NO: 221144 - protein, 403 aa, Artificial Sequence
  derived and/or modified sequence
MAGAATQASLESAPRIMRLVAECSRSRARAGELWLPHGTVATPVFMPVGTQATMKGITTEQLDALGCRICLGNTYHLGLRPGPELIQKANGLHGFMNWPHNLLTDSGGFQMVSLVSLSEVTEEGVRFRSPYDGNETLLSPEKSVQIQNALGSDIIMQLDDVVSSTVTGPRVEEAMYRSIRWLDRCIAAHQRPDKQNLFAIIQGGLDADLRATCLEEMTKRDVPGFAIGGLSGGESKSQFWRMVALSTSRLPKDKPRYLMGVGYATDLVVCVALGCDMFDCVFPTRTARFGSALVPTGNLQLRKKVFEKDFGPIDPECTCPTCQKHSRAFLHALLHSDNTAALHHLTVHNIAYQLQLMSAVRTSIVEKRFPDFVRDFMGAMYGDPTLCPTWATDALASVGITLG

SEQ ID NO: 221145 - protein, 225 aa, Artificial Sequence
  derived and/or modified sequence
MAGAATQASLESAPRIMRLVAECSRSRARAGELWLPHGTVATPVFMPVGTQATMKGITTEQLDALGCRICLGNTYHLGLRPGPELIQKANGLHGFMNWPHNLLTDSGGFQMVSLVSLSEVTEEGVRFRSPYDGNETLLSPEKSVQIQNALGSDIIMQLDDVVSSTVTGPRVEEAMYRPLGLVTGALLQVNPLAGPVHCSPSAAGQAEPLRHYPGWAGRRSPGHLP

SEQ ID NO: 221146 - DNA, 1212 bp, Artificial Sequence
  derived and/or modified sequence
atggctggagccgccacccaggccagcctggagagcgctcctaggattatgcgattagttgcagaatgttcaaggtctcgagctcgggccggcgagctgtggctccctcatgggaccgtagctacaccagtgtttatgccagtcggcacccaggcaacgatgaagggcattacaacagaacaattggacgccttagggtgccggatttgtttgggaaacacgtatcatctgggtctcaggccaggaccagaattaattcagaaggcaaacggactgcacggttttatgaattggcctcacaacttgctgaccgatagcgggggatttcaaatggtgtcgctcgttagcctttccgaggtcacagaggaaggggtgaggtttcgctctccttacgatggcaatgaaaccctcctcagccccgaaaagagtgtccagatccagaacgctctaggttccgacataataatgcagttagacgatgtggtgtcttctaccgtcacaggtccccgtgttgaggaggcgatgtaccgcagtatcagatggctcgacagatgcatagcagcccaccagagacctgataaacagaacctgtttgccatcatccagggcgggctcgacgccgaccttcgtgccacctgtctcgaggagatgactaagagagacgttcccggatttgccatcggaggtttgtctggtggagagtctaaatcccagttttggcgcatggtggctctgagtacaagccgtctccccaaggataaaccacggtacctgatgggcgtaggatacgcaacagatttagtggtgtgcgtggccctggggtgcgacatgtttgactgcgttttccctacgcgcaccgcacgctttggaagcgccttggtacccactggcaacctgcagcttaggaagaaagttttcgagaaagacttcggccccatcgatcctgaatgtacatgccccacatgccagaaacacagtcgcgcctttttgcacgcactactgcactctgacaacaccgccgccctgcaccatctcacagtgcacaatatcgcctatcagctgcaattgatgtctgcagtcagaacatccattgtggaaaaaagattccccgactttgttcgagacttcatgggcgccatgtatggcgaccccactttgtgcccaacttgggcaacggatgccttggcttctgtgggcatcactttgggctag

SEQ ID NO: 221147 - DNA, 678 bp, Artificial Sequence
  derived and/or modified sequence
atggccggtgcagctacacaggctagtctggagtctgctccacgcattatgagactggtcgctgaatgttccaggtcccgtgcacgtgctggcgagctatggcttcctcatggaacagtcgcgaccccggtatttatgcctgttggcactcaggccacgatgaagggaattaccacagagcaactagacgccttaggctgcaggatttgtctgggcaacacttatcatctcgggctccggccagggccagaactgatacagaaagcaaatggccttcacgggttcatgaattggccccacaatttgctgaccgacagcggaggctttcagatggtcagccttgtttcccttagcgaggtcaccgaagaaggagtgaggttccggtccccatacgacggaaatgaaacccttctgtcccctgagaaatccgtgcagatccagaacgcattgggatctgacatcattatgcagcttgacgacgtggtgtcctcaacagttaccggaccaagggtcgaagaggccatgtatagaccactcggtctggttacaggtgcgctcctgcaggttaacccactggccggccccgtgcactgctcgccgtccgcagccggacaggccgaacctctgcgacattatccgggatgggccggccgccgatcgccggggcatcttccctag

SEQ ID NO: 221148 - DNA, 1212 bp, Artificial Sequence
  derived and/or modified sequence
atggccggggccgccacccaggccagcctggagagcgccccccgcatcatgaggctggtggccgagtgcagccgcagccgggcccgggccggggagctgtggctgccccatggaacagtggccacccctgtgttcatgcctgtgggcacccaggccaccatgaagggcatcaccacagagcagctggatgccctgggctgccgcatctgcctgggcaacacctaccacctgggcctgcggcccggccctgagctgatccagaaggccaacggcctgcacggcttcatgaactggccccacaacctgctgacagacagcggcggcttccagatggtgtccctggtgtccctgtctgaggtgacagaggagggcgtgcgcttccgcagcccctatgatggaaatgagaccctgctgagccctgagaagtctgtgcagatccagaatgccctgggcagtgacatcatcatgcagctggatgatgtggtgagcagcacagtgacaggcccccgggtggaggaggccatgtaccgcagcatccgctggctggaccgctgcatcgccgcccaccagaggccagacaagcagaacctgtttgccatcatccagggcggcctggatgctgacctgcgggccacctgcctggaggagatgaccaagagagatgtgcccggctttgccatcggcggcctgtctggaggagagagcaagagccagttctggaggatggtggccctgagcaccagccggctgcccaaggacaagccccgctacctgatgggcgtgggctacgccacagacctggtggtgtgtgtggccctgggctgtgacatgtttgactgtgtgttccccaccaggacagccaggtttggaagtgccctggtgcccaccggcaacctgcagctgaggaagaaggtgtttgagaaggactttggccccattgatcctgagtgcacctgccccacctgccagaagcacagccgggccttcctgcacgccctgctgcacagcgacaacacagctgccctgcaccacctgactgtgcacaacatcgcctaccagctgcagctgatgtctgctgtgaggaccagcatcgtggagaagcgcttcccagactttgtgcgggacttcatgggcgccatgtatggagaccccaccctgtgccccacctgggccacagatgccctggcctctgtgggcatcaccctgggctag

SEQ ID NO: 221149 - DNA, 678 bp, Artificial Sequence
  derived and/or modified sequence
atggccggggccgccacccaggccagcctggagagcgccccccgcatcatgaggctggtggccgagtgcagccgcagccgggcccgggccggggagctgtggctgccccatggaacagtggccacccctgtgttcatgcctgtgggcacccaggccaccatgaagggcatcaccacagagcagctggatgccctgggctgccgcatctgcctgggcaacacctaccacctgggcctgcggcccggccctgagctgatccagaaggccaacggcctgcacggcttcatgaactggccccacaacctgctgacagacagcggcggcttccagatggtgtccctggtgtccctgtctgaggtgacagaggagggcgtgcgcttccgcagcccctatgatggaaatgagaccctgctgagccctgagaagtctgtgcagatccagaatgccctgggcagtgacatcatcatgcagctggatgatgtggtgagcagcacagtgacaggcccccgggtggaggaggccatgtaccggcccctgggcctggtgactggagccctgctgcaggtgaaccccctggccggccctgtgcactgcagccccagcgctgctggccaggccgagcccctgcggcactacccaggctgggccggccgccgcagccctggccacctgccctag

SEQ ID NO: 221150 - DNA, 1212 bp, Artificial Sequence
  derived and/or modified sequence
atggccggcgccgccacccaggccagcctggagagcgccccccggatcatgcggttggtcgcggagtgctctcgctccagggccagggccggtgaactgtggctgcctcacggaaccgtagctacccctgtcttcatgcccgtgggaacccaagcgactatgaagggcatcaccaccgaacaactcgatgcgctgggctgtcggatatgtctggggaatacttaccatctggggctgcgccctgggcccgagctgattcagaaggctaatggcctacatggtttcatgaactggccccacaatctgcttaccgacagtggtgggtttcaaatggtcagcttagtgagtttaagtgaagtgacggaggagggggtccggtttagatccccctatgacggtaacgagaccctgctgtccccagaaaagtctgtacagatacagaacgctctcggctccgacattattatgcaactggatgacgtggtttcttcgacagtgactggacctcgcgtggaggaggcaatgtatagaagcatcaggtggctggatcgttgtattgctgcccaccagaggcccgataaacagaatttatttgctattattcaaggaggactcgacgccgacctgcgcgctacctgcctggaggagatgaccaagcgagatgttcccggttttgcaataggtgggctttcagggggagagtctaagtctcaattctggaggatggttgctctgagcacctcgcggttaccaaaagacaagcccagataccttatgggagtcggctacgccactgacttggttgtgtgtgtggccctggggtgtgatatgtttgactgcgtctttcctactagaaccgctcgtttcgggtcggccttagtgcctaccgggaatctgcagcttcgaaaaaaagtgtttgagaaagattttgggcctattgatcccgagtgcacatgccccacttgccagaagcatagccgagccttcttgcatgcgcttctacactccgacaataccgccgctctgcaccaccttacagtgcataatatcgcctatcagttgcagctgatgtctgccgtgaggaccagtattgtggagaagaggttccctgatttcgttcgcgacttcatgggagctatgtacggggacccaacgctgtgtccaacttgggccaccgacgcgctcgcatccgttggtattaccctaggctag

SEQ ID NO: 221151 - DNA, 678 bp, Artificial Sequence
  derived and/or modified sequence
atggccggcgccgccacccaggccagcctggagagcgccccccggattatgagacttgtagcagagtgttcgcggtcgcgggccagagccggagaactctggcttccccacggaacagtggcaacacctgtgttcatgcccgtcgggacacaggccacaatgaaaggaataacgacagagcagctggacgccttggggtgccgtatctgtcttggaaacacttatcacctgggacttagacctggccccgagttgatacagaaggccaatggcttgcatggctttatgaactggccccacaacctgctgacggactcagggggctttcagatggtctcactggtctcactgtctgaagtaactgaagaaggcgtacgattccgcagtccgtacgacggaaatgaaacgttgctgagccctgagaagagcgttcagattcagaacgcacttggcagcgatataattatgcaactcgacgacgtcgtgtcctccacagttacaggccctagggtggaggaagccatgtaccgcccactggggctcgtaactggcgctctcttacaggttaatcctctggcaggtccagtacactgcagccctagtgcagcaggtcaggcggaacctctgcggcactaccccggctgggccggtcgaaggtccccaggccatctgccctag

SEQ ID NO: 221152 - DNA, 1212 bp, Artificial Sequence
  derived and/or modified sequence
atggccggtgcggctacccaggcgtcactggaaagcgcccctcggattatgcggctggtcgctgagtgcagtcgatctcgggctagagccggtgagctttggctgccacacggcaccgtcgccaccccagtctttatgccagtcggcacccaggctactatgaaaggaatcacaacggagcagctcgatgccttaggttgtaggatttgtcttggcaatacctaccatctggggctgcggccaggcccagagctcatacaaaaagcaaatgggctgcacggctttatgaactggccccacaatctgcttacggattctggtggcttccagatggtgtccctggtttcactgagcgaggtgaccgaagagggtgttcgcttccgctctccttatgatggcaacgaaaccctgttgtcccccgagaaaagcgtccaaatacagaacgcgctgggtagtgatatcatcatgcagcttgatgacgttgtgagcagtaccgtaacgggtccaagagtggaagaggctatgtacagatccattcggtggcttgataggtgtatcgccgcacaccaaaggccagataaacagaatctattcgctattattcagggaggtcttgacgccgatctgcgagcaacttgtctggaagaaatgactaagcgcgacgtcccgggattcgccattgggggtttgagcggcggagaatctaagagtcagttttggaggatggtcgctctcagcacctctcggctgccgaaggataagccacgctatctgatgggcgtcggatatgccaccgatctggtggtgtgtgtagcactaggatgcgatatgttcgactgcgtcttcccaacccgtaccgcgaggtttggatccgctctagtgccaacaggcaacctgcaactacgaaagaaggttttcgaaaaggattttggacctattgatccagaatgcacatgtccaacgtgccagaagcactctcgagcatttttacacgctctcctccactccgataacacagctgctctgcaccatctcacggtgcacaacattgcatatcagttacagcttatgagcgccgtgcggacatccattgtagagaagcgatttcccgattttgttcgtgatttcatgggtgccatgtatggagaccccaccctttgccctacatgggctaccgacgcgctcgcctctgtggggatcacgttgggctag

SEQ ID NO: 221153 - DNA, 678 bp, Artificial Sequence
  derived and/or modified sequence
atggctggcgcagcgactcaggcctcactggagagcgcccctcgaattatgcgcttagtcgctgagtgcagtagatcaagggccagggcgggagagctgtggttgccccacggaactgtggccacaccagtgtttatgcccgttggaacccaggccaccatgaaggggatcacgaccgagcagctggatgctttggggtgcagaatctgtctcggaaacacctatcacctggggctccgtccagggcctgagcttatacagaaggctaacggcctccatggctttatgaactggccacacaacctcctaacggacagcgggggatttcagatggtttccctggtcagcctcagcgaggtgactgaggaaggtgtcagattccgcagcccctatgacggcaacgagaccctgcttagccctgagaagagtgtccagattcaaaacgctcttggttcagacatcattatgcagctggatgatgttgtcagctccacagtaacaggccctcgggtcgaagaagctatgtatagacccctgggactagtgaccggggctctccttcaagtgaacccattggccggaccggttcactgttcaccttccgcggctggacaggccgagccactgcgccattacccaggttgggccggaaggagatctccaggtcatctgccttag

SEQ ID NO: 221154 - DNA, 1331 bp, Artificial Sequence
  derived and/or modified sequence
ggcccacgtggttccgacagtcaagatggcgggagcagctacccaggcttccctggagtcggccccacggatcatgcggctggtggccgaatgcagccgctccagggcccgggcaggcgagctgtggctgccgcatgggacagtggccactcctgtgttcatgccagtgggcacgcaggccaccatgaagggcatcacgaccgaacagctggacgctctgggttgccgcatctgcctgggcaatacctaccatctgggtctaaggccgggacccgagctgatccagaaagccaacggtctccacggcttcatgaattggcctcataatctgctaacggacagcggcggtttccagatggtgtcgctggtgtctctgtccgaggtgacggaggagggcgtccgcttccgctccccctacgacggcaatgagaccctgctgagcccggagaaatccgtgcagatccagaatgcgctgggctcggacatcatcatgcagctggacgacgtggttagcagtactgtgactgggccacgtgtggaggaggccatgtacaggtcaatccgctggctggaccggtgcattgcagcccatcagcggccggacaagcagaacctcttcgccattatccagggtgggctggacgcagatctccgggccacctgccttgaagagatgaccaagcgagacgtgcctggcttcgccatcgggggcctgagcgggggtgagagcaagtcgcagttctggcggatggtggcgctgagcacctctcggctgccgaaggacaagccccgatatctgatgggggttggctatgccactgatctggtagtctgcgtggctcttggatgtgacatgttcgactgcgtcttccccacacggacagcgcgctttggctctgccctggtgcccactgggaacctgcagttgaggaagaaggtgtttgagaaggacttcggccccatagacccggagtgcacctgccccacgtgccaaaagcacagccgcgccttcctgcacgcactgctgcacagtgacaacacggccgcgctgcaccacctcacggtccacaacatcgcctaccagctgcagctcatgagcgccgtccgcaccagcatcgtggagaagcgcttcccggacttcgtgcgggacttcatgggcgccatgtacggggatcccaccctctgtcccacctgggccactgacgctctggcctctgtgggaatcacactgggctgacctggcattgggagagggagggaggaaggaagggagggaggggctggaagatactgaaggattcctttttgaaaggttttttttattgtaactt

SEQ ID NO: 221155 - DNA, 1502 bp, Artificial Sequence
  derived and/or modified sequence
agtcaagatggcgggagcagctacccaggcttccctggagtcggccccacggatcatgcggctggtggccgaatgcagccgctccagggcccgggcaggcgagctgtggctgccgcatgggacagtggccactcctgtgttcatgccagtgggcacgcaggccaccatgaagggcatcacgaccgaacagctggacgctctgggttgccgcatctgcctgggcaatacctaccatctgggtctaaggccgggacccgagctgatccagaaagccaacggtctccacggcttcatgaattggcctcataatctgctaacggacagcggcggtttccagatggtgtcgctggtgtctctgtccgaggtgacggaggagggcgtccgcttccgctccccctacgacggcaatgagaccctgctgagcccggagaaatccgtgcagatccagaatgcgctgggctcggacatcatcatgcagctggacgacgtggttagcagtactgtgactgggccacgtgtggaggaggccatgtacaggcccctggggcttgtgactggggccctgttgcaggtcaatccgctggctggaccggtgcattgcagcccatcagcggccggacaagcagaacctcttcgccattatccagggtgggctggacgcagatctccgggccacctgccttgaagagatgaccaagcgagacgtgcctggcttcgccatcgggggcctgagcgggggtgagagcaagtcgcagttctggcggatggtggcgctgagcacctctcggctgccgaaggacaagccccgatatctgatgggggttgggtatgttgtggatagggaagccagagccctacctgtgggaagtggattcctggggaccccctaccctgcttggggaggtggcatttgggggaaacggacacaggtctgatctgaggagactaggaagacatggctgtcccttgggggccattctgagggaatatggcccagtctggggcagtgtgagggttgggaggggccctgggaagcccctgaggttctctgccccctcccgtcatggctgcaaccccagctatgccactgatctggtagtctgcgtggctcttggatgtgacatgttcgactgcgtcttccccacacggacagcgcgctttggctctgccctggtgcccactgggaacctgcagttgaggaagaaggtgtttgagaaggacttcggccccatagacccggagtgcacctgccccacgtgccaaaagcacagccgcgccttcctgcacgcactgctgcacagtgacaacacggccgcgctgcaccacctcacggtccacaacatcgcctaccagctgcagctcatgagcgccgtccgcaccagcatcgtggagaagcgcttcccggacttcgtgcgggacttcatgggcgccatagtgtgtctgtgtcttcttgaggaagtggcctgtctgggtccccctcccagtctgagcgtcattgcagt

SEQ ID NO: 221156 - DNA, 1212 bp, Artificial Sequence
  derived and/or modified sequence
atggccggcgccgccacccaggccagcctggagagcgcccccagaatcatgagactggtggccgagtgcagcagaagcagagccagagccggcgagctgtggctgccccacggcaccgtggccacccccgtgttcatgcccgtgggcacccaggccaccatgaagggcatcaccaccgagcagctggacgccctgggctgcagaatctgcctgggcaacacctaccacctgggcctgagacccggccccgagctgatccagaaggccaacggcctgcacggcttcatgaactggccccacaacctgctgaccgacagcggcggcttccagatggtgagcctggtgagcctgagcgaggtgaccgaggagggcgtgagattcagaagcccctacgacggcaacgagaccctgctgagccccgagaagagcgtgcagatccagaacgccctgggcagcgacatcatcatgcagctggacgacgtggtgagcagcaccgtgaccggccccagagtggaggaggccatgtacagaagcatcagatggctggacagatgcatcgccgcccaccagagacccgacaagcagaacctgttcgccatcatccagggcggcctggacgccgacctgagagccacctgcctggaggagatgaccaagagagacgtgcccggcttcgccatcggcggcctgagcggcggcgagagcaagagccagttctggagaatggtggccctgagcaccagcagactgcccaaggacaagcccagatacctgatgggcgtgggctacgccaccgacctggtggtgtgcgtggccctgggctgcgacatgttcgactgcgtgttccccaccagaaccgccagattcggcagcgccctggtgcccaccggcaacctgcagctgagaaagaaggtgttcgagaaggacttcggccccatcgaccccgagtgcacctgccccacctgccagaagcacagcagagccttcctgcacgccctgctgcacagcgacaacaccgccgccctgcaccacctgaccgtgcacaacatcgcctaccagctgcagctgatgagcgccgtgagaaccagcatcgtggagaagagattccccgacttcgtgagagacttcatgggcgccatgtacggcgaccccaccctgtgccccacctgggccaccgacgccctggccagcgtgggcatcaccctgggctag

SEQ ID NO: 221157 - DNA, 678 bp, Artificial Sequence
  derived and/or modified sequence
atggccggcgccgccacccaggccagcctggagagcgcccccagaatcatgagactggtggccgagtgcagcagaagcagagccagagccggcgagctgtggctgccccacggcaccgtggccacccccgtgttcatgcccgtgggcacccaggccaccatgaagggcatcaccaccgagcagctggacgccctgggctgcagaatctgcctgggcaacacctaccacctgggcctgagacccggccccgagctgatccagaaggccaacggcctgcacggcttcatgaactggccccacaacctgctgaccgacagcggcggcttccagatggtgagcctggtgagcctgagcgaggtgaccgaggagggcgtgagattcagaagcccctacgacggcaacgagaccctgctgagccccgagaagagcgtgcagatccagaacgccctgggcagcgacatcatcatgcagctggacgacgtggtgagcagcaccgtgaccggccccagagtggaggaggccatgtacagacccctgggcctggtgaccggcgccctgctgcaggtgaaccccctggccggccccgtgcactgcagccccagcgccgccggccaggccgagcccctgagacactaccccggctgggccggcagaagaagccccggccacctgccctag

SEQ ID NO: 221158 - protein, 898 aa, Artificial Sequence
  derived and/or modified sequence
MSVTEEDLCHHMKVVVRVRPENTKEKAAGFHKVVHVVDKHILVFDPKQEEVSFFHGKKTTNQNVIKKQNKDLKFVFDAVFDETSTQSEVFEHTTKPILRSFLNGYNCTVLAYGATGAGKTHTMLGSADEPGVMYLTMLHLYKCMDEIKEEKICSTAVSYLEVYNEQIRDLLVNSGPLAVREDTQKGVVVHGLTLHQPKSSEEILHLLDNGNKNRTQHPTDMNATSSRSHAVFQIYLRQQDKTASINQNVRIAKMSLIDLAGSERASTSGAKGTRFVEGTNINRSLLALGNVINALADSKRKNQHIPYRNSKLTRLLKDSLGGNCQTIMIAAVSPSSVFYDDTYNTLKYANRAKDIKSSLKSNVLNVNNHITQYVKICNEQKAEILLLKEKLKAYEEQKAFTNENDQAKLMISNPQEKEIERFQEILNCLFQNREEIRQEYLKLEMLLKENELKSFYQQQCHKQIEMMCSEDKVEKATGKRDHRLAMLKTRRSYLEKRREEELKQFDENTNWLHRVEKEMGLLSQNGHIPKELKKDLHCHHLHLQNKDLKAQIRHMMDLACLQEQQHRQTEAVLNALLPTLRKQYCTLKEAGLSNAAFESDFKEIEHLVERKKVVVWADQTAEQPKQNDLPGISVLMTFPQLGPVQPIPCCSSSGGTNLVKIPTEKRTRRKLMPSPLKGQHTLKSPPSQSVQLNDSLSKELQPIVYTPEDCRKAFQNPSTVTLMKPSSFTTSFQAISSNINSDNCLKMLCEVAIPHNRRKECGQEDLDSTFTICEDIKSSKCKLPEQESLPNDNKDILQRLDPSSFSTKHSMPVPSMVPSYMAMTTAAKRKRKLTSSTSNSSLTADVNSGFAKRVRQDNSSEKHLQENKPTMEHKRNICKINPSMVRKFGRNISKGNLR

SEQ ID NO: 221159 - DNA, 2697 bp, Artificial Sequence
  derived and/or modified sequence
atgagcgtgaccgaggaggacctgtgccaccacatgaaggtggtggtgagagtgagacccgagaacaccaaggagaaggccgccggcttccacaaggtggtgcacgtggtggacaagcacatcctggtgttcgaccccaagcaggaggaggtgagcttcttccacggcaagaagaccaccaaccagaacgtgatcaagaagcagaacaaggacctgaagttcgtgttcgacgccgtgttcgacgagaccagcacccagagcgaggtgttcgagcacaccaccaagcccatcctgagaagcttcctgaacggctacaactgcaccgtgctggcctacggcgccaccggcgccggcaagacccacaccatgctgggcagcgccgacgagcccggcgtgatgtacctgaccatgctgcacctgtacaagtgcatggacgagatcaaggaggagaagatctgcagcaccgccgtgagctacctggaggtgtacaacgagcagatcagagacctgctggtgaacagcggccccctggccgtgagagaggacacccagaagggcgtggtggtgcacggcctgaccctgcaccagcccaagagcagcgaggagatcctgcacctgctggacaacggcaacaagaacagaacccagcaccccaccgacatgaacgccaccagcagcagaagccacgccgtgttccagatctacctgagacagcaggacaagaccgccagcatcaaccagaacgtgagaatcgccaagatgagcctgatcgacctggccggcagcgagagagccagcaccagcggcgccaagggcaccagattcgtggagggcaccaacatcaacagaagcctgctggccctgggcaacgtgatcaacgccctggccgacagcaagagaaagaaccagcacatcccctacagaaacagcaagctgaccagactgctgaaggacagcctgggcggcaactgccagaccatcatgatcgccgccgtgagccccagcagcgtgttctacgacgacacctacaacaccctgaagtacgccaacagagccaaggacatcaagagcagcctgaagagcaacgtgctgaacgtgaacaaccacatcacccagtacgtgaagatctgcaacgagcagaaggccgagatcctgctgctgaaggagaagctgaaggcctacgaggagcagaaggccttcaccaacgagaacgaccaggccaagctgatgatcagcaacccccaggagaaggagatcgagagattccaggagatcctgaactgcctgttccagaacagagaggagatcagacaggagtacctgaagctggagatgctgctgaaggagaacgagctgaagagcttctaccagcagcagtgccacaagcagatcgagatgatgtgcagcgaggacaaggtggagaaggccaccggcaagagagaccacagactggccatgctgaagaccagaagaagctacctggagaagagaagagaggaggagctgaagcagttcgacgagaacaccaactggctgcacagagtggagaaggagatgggcctgctgagccagaacggccacatccccaaggagctgaagaaggacctgcactgccaccacctgcacctgcagaacaaggacctgaaggcccagatcagacacatgatggacctggcctgcctgcaggagcagcagcacagacagaccgaggccgtgctgaacgccctgctgcccaccctgagaaagcagtactgcaccctgaaggaggccggcctgagcaacgccgccttcgagagcgacttcaaggagatcgagcacctggtggagagaaagaaggtggtggtgtgggccgaccagaccgccgagcagcccaagcagaacgacctgcccggcatcagcgtgctgatgaccttcccccagctgggccccgtgcagcccatcccctgctgcagcagcagcggcggcaccaacctggtgaagatccccaccgagaagagaaccagaagaaagctgatgcccagccccctgaagggccagcacaccctgaagagcccccccagccagagcgtgcagctgaacgacagcctgagcaaggagctgcagcccatcgtgtacacccccgaggactgcagaaaggccttccagaaccccagcaccgtgaccctgatgaagcccagcagcttcaccaccagcttccaggccatcagcagcaacatcaacagcgacaactgcctgaagatgctgtgcgaggtggccatcccccacaacagaagaaaggagtgcggccaggaggacctggacagcaccttcaccatctgcgaggacatcaagagcagcaagtgcaagctgcccgagcaggagagcctgcccaacgacaacaaggacatcctgcagagactggaccccagcagcttcagcaccaagcacagcatgcccgtgcccagcatggtgcccagctacatggccatgaccaccgccgccaagagaaagagaaagctgaccagcagcaccagcaacagcagcctgaccgccgacgtgaacagcggcttcgccaagagagtgagacaggacaacagcagcgagaagcacctgcaggagaacaagcccaccatggagcacaagagaaacatctgcaagatcaaccccagcatggtgagaaagttcggcagaaacatcagcaagggcaacctgagatag

SEQ ID NO: 221160 - DNA, 2697 bp, Artificial Sequence
  derived and/or modified sequence
atgagcgtaactgaagaggatttgtgtcaccacatgaaagttgtggtgcgggtgcgacctgaaaacacaaaggagaaggccgcaggcttccacaaagttgtgcatgtggtggacaagcacattctcgtctttgaccccaaacaggaagaagtctcattctttcatggcaagaaaaccacaaatcagaacgtcattaaaaaacagaataaggatcttaaatttgtcttcgacgctgtgttcgatgaaacgagcactcagtctgaggtttttgaacacacgactaaacccatactgcgctccttcctgaatggatataattgtactgtgcttgcctatggcgccaccggcgccggcaagacccacaccatgctgggcagtgctgatgaacctggagtgatgtatctgacgatgctgcatctgtataagtgtatggacgaaataaaggaggagaaaatctgctccaccgccgtaagttacctggaagtgtacaacgagcaaatcagagatttgttggtaaacagtggaccactagccgttagggaggacacacagaagggtgtagtcgtccatggtttgactttacaccagccaaagtccagcgaagagattttgcacttgttagacaatggcaataaaaataggactcagcatcctaccgatatgaacgcaacttcgtcccgatctcacgctgtatttcagatttatcttcgccaacaggacaagacagcgtccatcaaccaaaacgtgcgcatcgccaagatgtccttgatcgacctggctggctccgagcgggcatctacatcaggtgctaaaggaactcgcttcgtggagggaaccaatatcaacagaagcctgttagccctgggcaacgtaattaacgccctagccgattccaagaggaaaaaccagcacatcccctatcgcaatagtaagctgacccggttgttaaaggacagcctgggcggcaattgtcaaacaataatgatcgccgcggtgtcacctagctccgtattctacgacgacacctacaacacattaaaatatgctaatcgggcaaaggacattaaatcctctctcaagagtaatgtcctgaacgtgaacaatcacataactcagtatgtgaaaatctgcaacgaacagaaagccgaaattttgctgctgaaggagaagttaaaggcctacgaagagcaaaaagcctttacaaatgagaatgaccaggccaaactgatgatttccaatcctcaggagaaagaaattgagcggtttcaggagatcctgaattgcttgtttcaaaaccgagaagaaattagacaagagtacctgaaactggagatgttgctgaaagaaaacgagctgaaatcgttttaccaacagcagtgtcacaagcagatcgagatgatgtgtagtgaggacaaagtcgagaaagccacaggtaaacgtgatcatcggcttgcaatgttaaaaacgcggcgatcttacttagaaaagcgacgggaggaagagctgaagcagtttgacgagaatacaaactggctgcatagggtcgagaaggaaatgggcctactgagccaaaacggccatattcccaaagagctgaaaaaggatctgcactgccaccatctccatcttcagaacaaggaccttaaagcgcaaattcgacacatgatggacttggcgtgcctacaggagcagcaacacaggcaaaccgaagcagtcctgaacgcacttttgccaactctgcgcaaacagtattgtactctcaaagaggctggcctatccaacgccgcttttgaaagcgatttcaaagagatcgagcaccttgtggagcgcaagaaggttgtcgtgtgggctgaccagaccgccgaacaacccaagcagaacgacctccctggcatctctgtgctgatgaccttcccccagctgggacctgttcagcctatcccatgctgctctagctccggcgggacaaatctggtcaagatcccgaccgagaaaaggactcggcgaaaactaatgccctcgcccctgaaggggcaacacacgctgaagagtcctccatctcagtccgtgcagctcaatgacagccttagcaaggaattgcagccgattgtgtacactcctgaggactgtagaaaagcttttcagaatccgtcgacggtgacactgatgaaaccaagcagcttcaccacctccttccaggcgattagctccaacattaacagcgacaattgtctcaagatgctctgcgaggtggccataccccacaatcggcgcaaagagtgtggccaggaagatttggattcaactttcactatctgcgaggatattaaaagttcaaaatgtaaacttcctgagcaagagtccctacccaacgataacaaggatattttacaaagactggacccctcgagtttctcgaccaagcactcaatgccagtgccctctatggtgcccagctatatggccatgactacagcagcgaagagaaaacgaaagctcacttccagcacatcgaactcttctctgacagcagacgtcaactcaggtttcgctaagcgggtccggcaggacaattcttctgagaagcacttgcaagagaataaaccaacaatggagcataaaagaaatatttgtaagatcaatcctagcatggtgaggaagtttggccgcaatatctctaaagggaatctcagatag

SEQ ID NO: 221161 - DNA, 3406 bp, Artificial Sequence
  derived and/or modified sequence
ctgaagcgctgggaggcggacattaaagtgaagtggttgcggtaacctggcctgggcctgaagtgagtgagaggcacatgaagagaagtattcaagtatttatacagataggaatcaagataatcaacaatgtctgtcactgaggaagacctgtgccaccatatgaaagtagtagttcgtgtacgtccggaaaacactaaagaaaaagcagctggatttcataaagtggttcatgttgtggataaacatatcctagtttttgatcccaaacaagaagaagtcagttttttccatggaaagaaaactacaaatcaaaatgttataaagaaacaaaataaggatcttaaatttgtatttgatgctgtttttgatgaaacgtcaactcagtcagaagtttttgaacacactactaagccaattcttcgtagttttttgaatggatataattgcacagtacttgcctatggtgccactggtgctgggaagacccacactatgctaggatcagctgatgaacctggagtgatgtatctaacaatgttacacctttacaaatgcatggatgagattaaagaagagaaaatatgtagtactgcagtttcatatctggaggtatataatgaacagattcgtgatctcttagtaaattcagggccacttgctgtccgggaagatacccaaaaaggggtggtcgttcatggacttactttacaccagcccaaatcctcagaagaaattttacatttattggataatggaaacaaaaacaggacacaacatcccactgatatgaatgccacatcttctcgttctcatgctgttttccaaatttacttgcgacaacaagacaaaacagcaagtatcaatcaaaatgtccgtattgccaagatgtcactcattgacctggcaggatctgagcgagcaagtacttccggtgctaaggggacccgatttgtagaaggcacaaatattaatagatcacttttagctcttgggaatgtcatcaatgccttagcagattcaaagagaaagaatcagcatatcccttacagaaatagtaagcttactcgcttgttaaaggattctcttggaggaaactgtcaaactataatgatagctgctgttagtccttcctctgtattctacgatgacacatataacactcttaagtatgctaaccgggcaaaggacattaaatcttctttgaagagcaatgttcttaatgtcaataatcatataactcaatatgtaaagatctgtaatgagcagaaggcagagattttattgttaaaagaaaaactaaaagcctatgaagaacagaaagccttcactaatgaaaatgaccaagcaaagttaatgatttcaaaccctcaggaaaaagaaatcgaaaggtttcaagaaatcctgaactgcttgttccagaatcgagaagaaattagacaagaatatctgaagttggaaatgttacttaaagaaaatgaacttaaatcattctaccaacaacagtgccataaacaaatagaaatgatgtgttctgaagacaaagtagaaaaggccactggaaaacgagatcatagacttgcaatgttgaaaactcgtcgctcctacctggagaaaaggagggaggaggaattgaagcaatttgatgagaatactaattggctccatcgtgtcgaaaaagaaatgggactcttaagtcaaaacggtcatattccaaaggaactcaagaaagatcttcattgtcaccatttgcacctccagaacaaagatttgaaagcacaaattagacatatgatggatctagcttgtcttcaggaacagcaacacaggcagactgaagcagtattgaatgctttacttccaaccctaagaaaacaatattgcacattaaaagaagccggcctgtcaaatgctgcttttgaatctgacttcaaagagatcgaacatttggtagagaggaaaaaagtggtagtttgggctgaccaaactgccgaacaaccaaagcaaaacgatctaccagggatttctgttcttatgacctttccacaacttggaccagttcagcctattccttgttgctcatcttcaggtggaactaatctggttaagattcctacagaaaaaagaactcggagaaaactaatgccatctcccttgaaaggacagcatactctaaagtctccaccatctcaaagtgtgcagctcaatgattctcttagcaaagaacttcagcctattgtatatacaccagaagactgtagaaaagcttttcaaaatccgtctacagtaaccttaatgaaaccatcatcatttactacaagttttcaggctatcagctcaaacataaacagtgataattgtctgaaaatgttgtgtgaagtagctatccctcataatagaagaaaagaatgtggacaggaggacttggactctacatttactatatgtgaagacatcaagagctcgaagtgtaaattacccgaacaagaatcactaccaaatgataacaaagacattttacaacggcttgatccttcttcattctcaactaagcattctatgcctgtaccaagcatggtgccatcctacatggcaatgactactgctgccaaaaggaaacggaaattaacaagttctacatcaaacagttcgttaactgcagacgtaaattctggatttgccaaacgtgttcgacaagataattcaagtgagaagcacttacaagaaaacaaaccaacaatggaacataaaagaaacatctgtaaaataaatccaagcatggttagaaaatttggaagaaatatttcaaaaggaaatctaagataaatcacttcaaaaccaagcaaaatgaagttgatcaaatctgcttttcaaagtttatcaataccctttcaaaaatatatttaaaatctttgaaagaagacccatcttaaagctaagtttacccaagtactttcagcaagcagaaaaatgaaactctttgttttcttcttttgtgttctaaaaaaataaaatttcaaaagaaaaggttgtcttttaagttttttaaatatttgttgccttttaaaatccctgagtgtaagttaccatggtggcagcttagttttactatgccacaacaagttgactaggacattttagtaaatggtagtgagttaaattatctttattattttttaaaaataagaatttagaagtggtaaaattatggcccaagatgtatttggttctctattatgttttgatacattattttaatcatatatatgactttccttttcaaaaatactttaatgtacaagtgtaaatatatgtgcccataaaatcattgtaaatattatttagtcatcacaaataaaatattgtcccttgctacttgatatattaaagatgtagattttaaagt

SEQ ID NO: 221162 - DNA, 2697 bp, Artificial Sequence
  derived and/or modified sequence
atgtctgtgacagaggaggacctgtgccaccacatgaaggtggtggtgcgggtgcggcctgagaacaccaaggagaaggccgccggcttccacaaggtggtgcacgtggtggacaagcacatcctggtgtttgaccccaagcaggaggaggtgtccttcttccacggcaagaagaccaccaaccagaatgtcatcaagaagcagaacaaggacctgaagtttgtgtttgatgctgtgtttgatgagaccagcacccagagcgaggtgtttgagcacaccaccaagcccatcctgcggagcttcctgaatggctacaactgcaccgtgctggcctacggggccactggagctgggaagacccacaccatgctgggcagcgcagatgagcccggggtgatgtacctgaccatgctgcacctgtacaagtgcatggatgagatcaaggaggagaagatctgcagcacagctgtgtcctacctggaggtgtacaatgagcagatccgggacctgctggtgaacagcggccccctggccgtgcgggaggacacccagaagggcgtggtggtgcacggcctgaccctgcaccagcccaagagcagcgaggagatcctgcacctgctggacaatggaaacaagaacagaacccagcaccccacagacatgaatgccaccagcagccgcagccatgctgtgttccagatctacctgcggcagcaggacaagacagccagcatcaaccagaatgtgagaattgccaagatgagcctgattgacctggccggcagcgagcgggccagcaccagcggggccaagggcaccaggtttgtggagggcaccaacatcaacagaagcctgctggccctgggcaatgtcatcaatgccctggccgacagcaagaggaagaaccagcacatcccctacagaaacagcaagctgacccggctgctgaaggacagcctgggcggcaactgccagaccatcatgattgctgctgtgagccccagcagcgtcttctatgatgacacctacaacaccctgaagtatgccaacagagccaaggacatcaagagcagcctgaagagcaatgtgctgaatgtgaacaaccacatcacccagtatgtgaagatctgcaatgagcagaaggccgagatcctgctgctgaaggagaagctgaaggcctatgaggagcagaaggccttcaccaatgaaaatgaccaggccaagctgatgatcagcaacccccaggagaaggagattgagcgcttccaggagatcctgaactgcctcttccagaaccgggaggagatccggcaggagtacctgaagctggagatgctgctgaaggaaaatgagctgaagagcttctaccagcagcagtgccacaagcagatcgagatgatgtgcagcgaggacaaggtggagaaggccaccgggaagagggaccaccggctggccatgctgaagacccggcgcagctacctggagaagagaagagaggaggagctgaagcagtttgatgagaacaccaactggctgcaccgggtggagaaggagatgggcctgctgagccagaatggccacatccccaaggagctgaagaaggacctgcactgccaccacctgcacctgcagaacaaggacctgaaggcccagatccgccacatgatggacctggcctgcctgcaggagcagcagcaccggcagacagaagctgtgctgaatgccctgctgcccaccctgaggaagcagtactgcaccctgaaggaggccggcctgagcaatgctgcctttgaaagtgacttcaaggagattgagcacctggtggagaggaagaaggtggtggtgtgggccgaccagacagctgagcagcccaagcagaatgacctgcccggcatctctgtgctgatgaccttcccccagctgggccctgtgcagcccatcccctgctgcagcagcagcggcggcaccaacctggtgaagatccccacagagaagaggaccaggaggaagctgatgcccagccccctgaagggccagcacaccctgaagagcccccccagccagagcgtgcagctgaatgacagcctgagcaaggagctgcagcccatcgtgtacaccccagaggactgcaggaaggccttccagaaccccagcacagtgaccctgatgaagcccagcagcttcaccaccagcttccaggccatcagcagcaacatcaacagcgacaactgcctgaagatgctgtgtgaggtggccatcccccacaacagaagaaaagaatgtggccaggaggacctggacagcaccttcaccatctgtgaggacatcaagagcagcaagtgcaagctgcctgagcaggagagcctgcccaatgacaacaaggacatcctgcagaggctggaccccagcagcttcagcaccaagcacagcatgcctgtgcccagcatggtgcccagctacatggccatgaccacagctgccaagaggaagaggaagctgaccagcagcaccagcaacagcagcctgacagcagatgtgaacagcggctttgccaagagggtgcggcaggacaacagcagcgagaagcacctgcaggagaacaagcccaccatggagcacaagaggaacatctgcaagatcaaccccagcatggtgaggaagtttggaagaaacatcagcaagggcaacctgaggtag

SEQ ID NO: 221163 - DNA, 2697 bp, Artificial Sequence
  derived and/or modified sequence
atgagcgtgaccgaggaggacctgtgccaccacatgaaggtggtggtgcgggttagacctgagaacacaaaagagaaagccgccggcttccataaggtcgtccacgtggtggacaaacacattttagtctttgacccaaaacaagaggaggtttccttctttcatgggaagaaaaccaccaatcagaacgtcatcaaaaagcagaataaagacctaaagttcgtgtttgacgccgtattcgatgaaacgtctacacagagtgaagtgtttgagcataccacaaagcctattcttcgctcatttcttaatggatataattgtactgtacttgcttacggcgccacaggagctggtaagacccacacaatgctaggcagcgctgacgagcccggggtgatgtatctgaccatgctacacctgtataaatgtatggatgaaatcaaagaagagaaaatctgtagtactgccgtgtcatatcttgaagtttacaatgaacaaatccgcgatctcctcgtgaattcgggcccactggccgtgcgagaagacacacagaagggagttgtagtgcacggcctaactctacatcagcccaagtcttctgaggagattctccatttgctggataacggcaataaaaaccggactcagcatccgacagacatgaatgccacctcctcacgcagtcacgctgtgtttcagatctacctgcggcagcaggataagacagcaagcataaatcaaaacgtccgcattgcgaagatgagcttgatcgatctggccggttcagagagagcttcaacctctggtgcgaagggaaccaggttcgtagaaggaactaacatcaaccggtccttgctggctcttggaaacgtgatcaacgcactggctgatagtaaaagaaaaaatcaacacatcccttaccggaattccaagctgacacgcttgcttaaagacagtctgggtgggaattgtcagactatcatgatcgcggctgtctcgccgtccagcgtgttctatgatgacacctataacaccctcaagtatgcaaacagggcaaaggatatcaagtcaagtctcaaaagcaatgtcctaaatgtgaacaaccacattactcaatatgtcaaaatctgcaatgaacagaaagcagagatcctattgctgaaagagaagttgaaggcttacgaagaacaaaaggccttcacaaatgagaacgaccaggctaaacttatgatttcaaacccccaggaaaaagaaatagagaggttccaggaaattctcaactgcttgttccagaaccgggaagagatacgccaggagtatcttaaactggaaatgcttttaaaagaaaacgaactgaagtctttctaccagcagcaatgccataaacagattgaaatgatgtgttcagaggacaaggttgagaaagctacggggaaacgagatcacagactggctatgttgaaaacgcggcgtagttacctggaaaaacggcgcgaggaggagctgaagcagttcgacgagaacaccaactggctgcaccgcgtggagaaggagatgggcctcctgagccagaatggtcatatccccaaagagctgaaaaaggatctccactgtcaccatctccatcttcagaacaaggatctgaaggcccagataagacatatgatggacctggcatgcctgcaggagcagcagcataggcagacggaggccgtccttaacgccttgctacccactctgcgcaaacagtactgcacgctgaaggaggccggactgagtaatgccgcttttgagtcggattttaaagagatcgagcaccttgtcgaacggaagaaagtggtggtctgggctgaccagaccgcagagcaacctaagcagaatgacctgccggggatttctgtgctcatgactttcccccaattgggccccgtacaacccattccctgttgttcgtcttccggcggaactaacttggtcaagatcccaaccgaaaaacgtactagacggaagctcatgccaagtccacttaagggtcagcacactcttaagtcaccccctagtcagtccgtgcagttaaatgattcattatccaaggagctccagcctatcgtgtacacccctgaggattgccgcaaggccttccagaatccaagtaccgtgaccctgatgaagccgagttcattcaccacgtcctttcaggctatctcgagtaacattaacagcgataattgtctcaagatgttgtgtgaggtcgccatccctcacaacaggcggaaagagtgcggacaggaagatctggactctaccttcaccatttgcgaggatattaagagttccaagtgcaagctacccgagcaagagtcactgcccaacgacaataaggatattctacaaagacttgatccttcctctttttctaccaaacactccatgcccgtacctagcatggtcccatcctatatggctatgaccaccgcggccaagcggaaaagaaagttaacttcgagcacttccaatagctcactgacggctgacgtgaatagcgggtttgctaagagggtgcggcaggataatagctcagagaaacacctgcaggagaacaagccaaccatggaacacaagcgcaatatttgtaaaataaacccctcaatggtacggaagtttggtcggaatataagcaagggcaacttgcgttag

SEQ ID NO: 221164 - DNA, 2697 bp, Artificial Sequence
  derived and/or modified sequence
atgagtgtcaccgaggaagacctctgccatcatatgaaagtcgtggtgcgggtgcggccagaaaacaccaaggagaaagcggctgggtttcacaaggtcgtccacgtggtcgacaagcatatactcgtatttgatcctaagcaggaagaagttagttttttccatggaaagaagaccacaaatcaaaatgtaatcaaaaagcagaataaggatttgaaattcgtgttcgacgcagtgttcgatgagaccagcacacagtcagaggtattcgaacacaccaccaaacccattttaaggtcattcctgaacggatacaattgtacagtgcttgcttacggggctaccggagctggcaaaactcacacaatgctcgggtcagcagatgaacccggagtcatgtatctgactatgcttcacttgtacaagtgtatggatgaaattaaagaagagaagatctgttcgaccgcggtgagctatctcgaagtatacaatgaacaaatccgagacttgctggtgaatagtggacccctcgctgtgcgcgaggatactcagaagggtgtggttgtgcacgggctgactttgcaccagcctaaatcttccgaggagatcctgcacctgttggacaacgggaataagaaccggacccagcatcccactgatatgaatgctaccagttcacggtcccatgcggtatttcagatctatctgcgacagcaggataagactgcttccatcaaccagaatgtgagaatagccaagatgtctctcattgatttagcgggttctgaaagagccagcacgtctggagcaaagggcaccaggtttgtggagggtactaacattaatagatccctgctcgcgctcggtaacgtaattaacgcccttgctgactctaaacgcaagaatcagcacattccatacagaaattctaagctgacgcggctgttgaaggacagcctcgggggtaactgccagacaataatgattgctgccgtgagcccctccagtgtgttctatgatgatacctacaataccctcaaatacgccaatagagctaaggatatcaaaagctcactcaaatccaatgtgctgaacgtgaacaaccatatcacccagtacgtcaagatctgtaacgagcagaaggccgaaattctcctgctgaaagaaaagctgaaggcctacgaagagcagaaagctttcactaatgagaatgatcaggccaagctgatgatcagtaatcctcaagagaaagaaattgagcggtttcaggaaatactgaactgcctgttccagaacagagaggagatcagacaagagtacctcaagctggaaatgctccttaaagagaacgaactgaagtccttttaccagcagcagtgtcacaaacaaatcgagatgatgtgtagcgaggataaggtggagaaggccacagggaagcgcgatcatcgcttggcgatgctcaaaaccaggagaagttacctcgaaaaaaggcgcgaagaggaactcaagcagtttgacgaaaacacaaattggttgcatcgcgtggagaaggaaatgggcctgcttagccagaatggccacatccccaaggagctgaagaaggatcttcactgtcaccatctgcacttacagaacaaggacctaaaagcccagatcaggcacatgatggacctcgcctgcctgcaagagcagcagcacagacagacagaagctgtgttaaatgccctgttgcccaccctgcgaaagcaatattgtactctcaaggaggctggcctcagcaacgcagcgttcgagtctgacttcaaagaaatcgagcatttagtggagcggaaaaaagtggtggtgtgggcagatcagactgccgaacagcctaaacaaaatgatcttcccggtatttctgtcctcatgaccttcccacagcttggaccagttcagccgatcccctgttgctcctcatccggaggaaccaatctggtgaagatcccaaccgagaagaggactaggcgcaagttaatgccctcgcctctaaaaggccagcacacactcaaaagccctccgagccaaagcgtgcagttgaatgacagcctaagcaaggagttgcagccaatcgtctacaccccagaggattgtaggaaggcttttcagaacccttctaccgttaccctgatgaagccttcctcattcaccacaagttttcaggctattagctcaaacataaactcagataattgcctgaaaatgttatgcgaggtggccatcccccacaaccgacgcaaagaatgcggccaggaggaccttgactccacctttacaatttgtgaggacattaaaagctccaagtgcaagctcccagaacaggagtccctgcccaatgataataaggacattttacagcggcttgacccaagcagtttctccacaaagcattccatgcctgtgccaagcatggtccctagttacatggccatgaccacagcagcaaagcggaagaggaagctgacctcaagtactagtaatagcagtctgaccgctgatgtgaactcaggattcgccaagagagtgcgccaagataacagtagtgagaagcaccttcaggagaataaacctacaatggagcacaaacgcaatatatgcaagattaacccatccatggtccgaaaattcggaagaaatatttcaaagggtaacctcaggtag

SEQ ID NO: 221165 - protein, 620 aa, Artificial Sequence
  derived and/or modified sequence
MGPLQFRDVAIEFSLEEWHCLDTAQRNLYRNVMLENYSNLVFLGIVVSKPDLIAHLEQGKKPLTMKRHEMVANPSVICSHFAQDLWPEQNIKDSFQKVILRRYEKRGHGNLQLIKRCESVDECKVHTGGYNGLNQCSTTTQSKVFQCDKYGKVFHKFSNSNRHNIRHTEKKPFKCIECGKAFNQFSTLITHKKIHTGEKPYICEECGKAFKYSSALNTHKRIHTGEKPYKCDKCDKAFIASSTLSKHEIIHTGKKPYKCEECGKAFNQSSTLTKHKKIHTGEKPYKCEECGKAFNQSSTLTKHKKIHTGEKPYVCEECGKAFKYSRILTTHKRIHTGEKPYKCNKCGKAFIASSTLSRHEFIHMGKKHYKCEECGKAFIWSSVLTRHKRVHTGEKPYKCEECGKAFKYSSTLSSHKRSHTGEKPYKCEECGKAFVASSTLSKHEIIHTGKKPYKCEECGKAFNQSSSLTKHKKIHTGEKPYKCEECGKAFNQSSSLTKHKKIHTGEKPYKCEECGKAFNQSSTLIKHKKIHTREKPYKCEECGKAFHLSTHLTTHKILHTGEKPYRCRECGKAFNHSATLSSHKKIHSGEKPYECDKCGKAFISPSSLSRHEIIHTGEKP

SEQ ID NO: 221166 - protein, 592 aa, Artificial Sequence
  derived and/or modified sequence
MGPLQFRDVAIEFSLEEWHCLDTAQRNLYRNVMLENYSNLVFLGIVVSKPDLIAHLEQGKKPLTMKRHEMVANPSVICSHFAQDLWPEQNIKDSFQKVILRRYEKRGHGNLQLIKRCESVDECKVHTGGYNGLNQCSTTTQSKVFQCDKYGKVFHKFSNSNRHNIRHTEKKPFKCIECGKAFNQFSTLITHKKIHTGEKPYICEECGKAFKYSSALNTHKRIHTGEKPYKCDKCDKAFIASSTLSKHEIIHTGKKPYKCEECGKAFNQSSTLTKHKKIHTGEKPYKCEECGKAFNQSSTLTKHKKIHTGEKPYVCEECGKAFKYSRILTTHKRIHTGEKPYKCNKCGKAFIASSTLSRHEFIHMGKKHYKCEECGKAFIWSSVLTRHKRVHTGEKPYKCEECGKAFVASSTLSKHEIIHTGKKPYKCEECGKAFNQSSSLTKHKKIHTGEKPYKCEECGKAFNQSSSLTKHKKIHTGEKPYKCEECGKAFNQSSTLIKHKKIHTREKPYKCEECGKAFHLSTHLTTHKILHTGEKPYRCRECGKAFNHSATLSSHKKIHSGEKPYECDKCGKAFISPSSLSRHEIIHTGEKP

SEQ ID NO: 221167 - DNA, 1863 bp, Artificial Sequence
  derived and/or modified sequence
atgggccccctgcagttcagagacgtggccatcgagttcagcctggaggagtggcactgcctggacaccgcccagagaaacctgtacagaaacgtgatgctggagaactacagcaacctggtgttcctgggcatcgtggtgagcaagcccgacctgatcgcccacctggagcagggcaagaagcccctgaccatgaagagacacgagatggtggccaaccccagcgtgatctgcagccacttcgcccaggacctgtggcccgagcagaacatcaaggacagcttccagaaggtgatcctgagaagatacgagaagagaggccacggcaacctgcagctgatcaagagatgcgagagcgtggacgagtgcaaggtgcacaccggcggctacaacggcctgaaccagtgcagcaccaccacccagagcaaggtgttccagtgcgacaagtacggcaaggtgttccacaagttcagcaacagcaacagacacaacatcagacacaccgagaagaagcccttcaagtgcatcgagtgcggcaaggccttcaaccagttcagcaccctgatcacccacaagaagatccacaccggcgagaagccctacatctgcgaggagtgcggcaaggccttcaagtacagcagcgccctgaacacccacaagagaatccacaccggcgagaagccctacaagtgcgacaagtgcgacaaggccttcatcgccagcagcaccctgagcaagcacgagatcatccacaccggcaagaagccctacaagtgcgaggagtgcggcaaggccttcaaccagagcagcaccctgaccaagcacaagaagatccacaccggcgagaagccctacaagtgcgaggagtgcggcaaggccttcaaccagagcagcaccctgaccaagcacaagaagatccacaccggcgagaagccctacgtgtgcgaggagtgcggcaaggccttcaagtacagcagaatcctgaccacccacaagagaatccacaccggcgagaagccctacaagtgcaacaagtgcggcaaggccttcatcgccagcagcaccctgagcagacacgagttcatccacatgggcaagaagcactacaagtgcgaggagtgcggcaaggccttcatctggagcagcgtgctgaccagacacaagagagtgcacaccggcgagaagccctacaagtgcgaggagtgcggcaaggccttcaagtacagcagcaccctgagcagccacaagagaagccacaccggcgagaagccctacaagtgcgaggagtgcggcaaggccttcgtggccagcagcaccctgagcaagcacgagatcatccacaccggcaagaagccctacaagtgcgaggagtgcggcaaggccttcaaccagagcagcagcctgaccaagcacaagaagatccacaccggcgagaagccctacaagtgcgaggagtgcggcaaggccttcaaccagagcagcagcctgaccaagcacaagaagatccacaccggcgagaagccctacaagtgcgaggagtgcggcaaggccttcaaccagagcagcaccctgatcaagcacaagaagatccacaccagagagaagccctacaagtgcgaggagtgcggcaaggccttccacctgagcacccacctgaccacccacaagatcctgcacaccggcgagaagccctacagatgcagagagtgcggcaaggccttcaaccacagcgccaccctgagcagccacaagaagatccacagcggcgagaagccctacgagtgcgacaagtgcggcaaggccttcatcagccccagcagcctgagcagacacgagatcatccacaccggcgagaagccctag

SEQ ID NO: 221168 - DNA, 1779 bp, Artificial Sequence
  derived and/or modified sequence
atgggccccctgcagttcagagacgtggccatcgagttcagcctggaggagtggcactgcctggacaccgcccagagaaacctgtacagaaacgtgatgctggagaactacagcaacctggtgttcctgggcatcgtggtgagcaagcccgacctgatcgcccacctggagcagggcaagaagcccctgaccatgaagagacacgagatggtggccaaccccagcgtgatctgcagccacttcgcccaggacctgtggcccgagcagaacatcaaggacagcttccagaaggtgatcctgagaagatacgagaagagaggccacggcaacctgcagctgatcaagagatgcgagagcgtggacgagtgcaaggtgcacaccggcggctacaacggcctgaaccagtgcagcaccaccacccagagcaaggtgttccagtgcgacaagtacggcaaggtgttccacaagttcagcaacagcaacagacacaacatcagacacaccgagaagaagcccttcaagtgcatcgagtgcggcaaggccttcaaccagttcagcaccctgatcacccacaagaagatccacaccggcgagaagccctacatctgcgaggagtgcggcaaggccttcaagtacagcagcgccctgaacacccacaagagaatccacaccggcgagaagccctacaagtgcgacaagtgcgacaaggccttcatcgccagcagcaccctgagcaagcacgagatcatccacaccggcaagaagccctacaagtgcgaggagtgcggcaaggccttcaaccagagcagcaccctgaccaagcacaagaagatccacaccggcgagaagccctacaagtgcgaggagtgcggcaaggccttcaaccagagcagcaccctgaccaagcacaagaagatccacaccggcgagaagccctacgtgtgcgaggagtgcggcaaggccttcaagtacagcagaatcctgaccacccacaagagaatccacaccggcgagaagccctacaagtgcaacaagtgcggcaaggccttcatcgccagcagcaccctgagcagacacgagttcatccacatgggcaagaagcactacaagtgcgaggagtgcggcaaggccttcatctggagcagcgtgctgaccagacacaagagagtgcacaccggcgagaagccctacaagtgcgaggagtgcggcaaggccttcgtggccagcagcaccctgagcaagcacgagatcatccacaccggcaagaagccctacaagtgcgaggagtgcggcaaggccttcaaccagagcagcagcctgaccaagcacaagaagatccacaccggcgagaagccctacaagtgcgaggagtgcggcaaggccttcaaccagagcagcagcctgaccaagcacaagaagatccacaccggcgagaagccctacaagtgcgaggagtgcggcaaggccttcaaccagagcagcaccctgatcaagcacaagaagatccacaccagagagaagccctacaagtgcgaggagtgcggcaaggccttccacctgagcacccacctgaccacccacaagatcctgcacaccggcgagaagccctacagatgcagagagtgcggcaaggccttcaaccacagcgccaccctgagcagccacaagaagatccacagcggcgagaagccctacgagtgcgacaagtgcggcaaggccttcatcagccccagcagcctgagcagacacgagatcatccacaccggcgagaagccctag

SEQ ID NO: 221169 - DNA, 1863 bp, Artificial Sequence
  derived and/or modified sequence
atggggcctctgcagttccgcgatgtggcaattgaattctcattggaggagtggcattgcctggatactgcgcaacggaacctttaccgaaatgtgatgctggagaattactcaaaccttgtatttctgggaattgtggtctcgaaacccgacctgattgcccatctggaacaggggaaaaaacctttgactatgaaacgccacgagatggtggcgaatccatccgttatttgttcccacttcgcccaggacctgtggccagaacagaacatcaaggactccttccagaaggtgattcttcgccggtatgagaaaagagggcacggtaacctgcagctgatcaaaaggtgcgagagcgtggacgagtgcaaggttcataccggtgggtacaacggcttaaaccaatgctcaacgaccactcagtccaaagtgtttcagtgcgataagtacgggaaagtgttccataagttttccaattctaatagacacaacatcagacacactgaaaagaagccattcaagtgcatcgagtgcgggaaagcattcaaccagttttccacactgatcactcacaaaaagatccacaccggcgaaaagccctacatatgcgaggagtgcgggaaagctttcaaatattcctctgctctcaacacacataaacgtattcatacaggcgagaagccctataaatgcgataagtgcgataaggcatttattgccagcagtacattgtccaaacacgaaatcatccacacaggaaaaaaaccttacaagtgtgaagaatgcgggaaagctttcaatcagagttccaccctcacaaaacacaagaaaattcataccggcgagaagccatataagtgcgaagaatgcggcaaagccttcaaccagtccagcacacttacaaagcacaagaagatccacactggcgaaaagccatatgtgtgtgaggaatgtggaaaggcctttaagtacagtcggatcctgacaactcataagcggatccacacgggcgaaaaaccctacaagtgtaataagtgcggcaaggccttcatcgctagtagcactctcagccgacacgaatttatacacatgggaaagaaacactacaagtgtgaggagtgtggcaaggctttcatctggtccagtgtcctgacacgacacaaaagagtgcataccggtgagaagccttataagtgtgaagagtgcggcaaggccttcaaatacagcagtactcttagctcccacaaacggtcgcatacaggagaaaaaccctacaagtgtgaggaatgcggcaaagctttcgttgcgagttccacactcagcaagcacgagataatccataccggcaaaaagccctacaagtgcgaagaatgtggtaaggcgtttaaccaatcctcatctctgaccaaacataagaaaatccatacaggggaaaagccatacaagtgtgaagagtgcggcaaggccttcaatcaatcttccagcctgactaaacataagaagatacacacaggagaaaaaccatataagtgcgaggagtgtggtaaagcttttaaccagtcatccaccttaattaaacacaagaaaatacacactagagagaaaccttacaagtgcgaggagtgtggtaaggcatttcacctgagtacacacctgacgacacataagattctgcacacaggtgagaaaccatataggtgcagggagtgcgggaaggccttcaatcactccgccacactttcatcacataaaaagattcactctggggaaaaaccttatgaatgtgacaaatgcggaaaggctttcataagtccctcttctttgtccagacatgaaattattcatacgggcgagaaaccatag

SEQ ID NO: 221170 - DNA, 1779 bp, Artificial Sequence
  derived and/or modified sequence
atgggacctctacaatttcgcgatgttgctatcgaattctcattagaagaatggcactgcctcgacaccgcacagcgaaatctctacagaaatgtgatgctggagaactattcaaaccttgtgtttctgggcatcgtggtgagcaagcctgacctcattgcgcacctggaacaggggaagaaaccattaacgatgaaacgccacgagatggttgcgaacccaagcgtgatttgtagccacttcgctcaggacctgtggccagaacaaaatatcaaggactcgttccagaaggtaatcctccgaagatatgagaagcggggccatggaaatctccagctcatcaaacgttgcgaatctgtggatgagtgtaaggtgcatacaggcggttacaacggcctgaatcagtgcagtacgacaacacagagcaaagtctttcaatgcgacaaatacgggaaggtattccacaagtttagcaactctaataggcacaacatcaggcataccgaaaagaagccgtttaagtgcatagagtgcggcaaagcctttaaccagttctcgaccctcattacccataaaaaaattcacacgggggaaaaaccttacatatgtgaagagtgcggcaaggcctttaaatacagctctgccctcaatacacataaacgtattcataccggtgagaagccctacaagtgcgacaaatgtgataaagcctttattgcttctagcactctgagcaaacacgagattatccacacaggcaagaagccatataagtgtgaagaatgtgggaaggctttcaatcaatctagcacactcaccaaacacaagaaaattcatacaggagaaaagccctataaatgcgaagagtgtggcaaggcatttaaccagtcttccacattgactaagcataaaaagattcataccggcgagaagccgtacgtgtgcgaggagtgcggaaaggcatttaagtacagccgaattttaaccacccacaaacgcattcatacaggggagaaaccctacaagtgcaacaaatgcgggaaggccttcattgcctccagcaccttatctcggcacgagttcatccacatgggtaagaaacactacaagtgtgaggaatgcggaaaggctttcatttggagtagcgtgcttaccagacataaacgcgtccacaccggtgaaaagccttataaatgtgaagaatgtggaaaagcatttgtggctagctccactctttcaaaacatgaaataatccacactggcaagaaaccatacaagtgcgaggaatgtggaaaagctttcaatcagtcatcttcattaacaaagcacaaaaagatccataccggggagaagccatacaaatgtgaagagtgtggcaaggccttcaatcagagtagtagcctgaccaagcacaaaaagattcatactggagagaagccgtacaagtgcgaggagtgcggcaaagcctttaaccaaagcagcaccctgatcaaacacaagaagattcatacacgggaaaagccttacaaatgcgaggagtgcggaaaggcattccacttaagtactcatctcaccactcacaagatcctccatacaggcgaaaaaccttaccgctgtagagagtgcgggaaggcattcaatcactcagccacgctctcatcgcataaaaagatacattccggcgagaagccgtatgagtgcgacaagtgcggaaaagcattcatctctcccagtagccttagccgtcacgaaattatccatactggcgaaaaaccctag

SEQ ID NO: 221171 - DNA, 1863 bp, Artificial Sequence
  derived and/or modified sequence
atgggccccctgcagttcagagatgtggccatcgagttcagcctggaggagtggcactgcctggacacagcccagaggaacctgtacagaaatgtgatgctggagaactacagcaacctggtgttcctgggcatcgtggtgtccaagccagacctgattgcccacctggagcagggcaagaagcccctgaccatgaagagacatgagatggtggccaaccccagcgtcatctgcagccactttgcccaggacctgtggccagagcagaacatcaaggacagcttccagaaggtgatcctgcggcgctatgagaagaggggccacggcaacctgcagctgatcaagagatgtgagagcgtggatgagtgcaaggtgcacactggaggctacaacggcctgaaccagtgcagcaccaccacccagagcaaggtgttccagtgtgacaagtatggcaaggtgttccacaagttcagcaacagcaacagacacaacatccgccacacagagaagaagcccttcaagtgcattgaatgtgggaaggccttcaaccagttcagcaccctcatcacccacaagaagatccacactggagagaagccctacatctgtgaagaatgtgggaaggccttcaagtacagcagcgccctgaacacccacaagaggatccacactggagagaagccctacaagtgtgacaagtgtgacaaggccttcatcgccagcagcaccctgagcaagcatgagatcatccacacaggcaagaagccctacaagtgtgaagaatgtgggaaggccttcaaccagagcagcaccctgaccaagcacaagaagatccacactggagagaagccctacaagtgtgaagaatgtgggaaggccttcaaccagagcagcaccctgaccaagcacaagaagatccacactggagagaagccctacgtgtgtgaagaatgtgggaaggccttcaagtacagccgcatcctgaccacccacaagaggatccacactggagagaagccctacaagtgcaacaagtgtgggaaggccttcatcgccagcagcaccctgagcagacatgagttcatccacatgggcaagaagcactacaagtgtgaagaatgtgggaaggccttcatctggagctctgtgctgaccaggcacaagagggtgcacactggagagaagccctacaagtgtgaagaatgtgggaaggccttcaagtacagcagcaccctgagcagccacaagaggagccacactggagagaagccctacaagtgtgaagaatgtgggaaggcctttgtggccagcagcaccctgagcaagcatgagatcatccacacaggcaagaagccctacaagtgtgaagaatgtgggaaggccttcaaccagagcagcagcctgaccaagcacaagaagatccacactggagagaagccctacaagtgtgaagaatgtgggaaggccttcaaccagagcagcagcctgaccaagcacaagaagatccacactggagagaagccctacaagtgtgaagaatgtgggaaggccttcaaccagagcagcaccctcatcaagcacaagaagatccacacccgggagaagccctacaagtgtgaagaatgtgggaaggccttccacctgagcacccacctgaccacccacaagatcctgcacactggagagaagccctaccgctgcagagaatgtgggaaggccttcaaccacagcgccaccctgagcagccacaagaagatccacagcggggagaagccctatgaatgtgacaagtgtgggaaggccttcatcagccccagcagcctgagcagacatgagatcatccacactggagagaagccctag

SEQ ID NO: 221172 - DNA, 1779 bp, Artificial Sequence
  derived and/or modified sequence
atgggccccctgcagttcagagatgtggccatcgagttcagcctggaggagtggcactgcctggacacagcccagaggaacctgtacagaaatgtgatgctggagaactacagcaacctggtgttcctgggcatcgtggtgtccaagccagacctgattgcccacctggagcagggcaagaagcccctgaccatgaagagacatgagatggtggccaaccccagcgtcatctgcagccactttgcccaggacctgtggccagagcagaacatcaaggacagcttccagaaggtgatcctgcggcgctatgagaagaggggccacggcaacctgcagctgatcaagagatgtgagagcgtggatgagtgcaaggtgcacactggaggctacaacggcctgaaccagtgcagcaccaccacccagagcaaggtgttccagtgtgacaagtatggcaaggtgttccacaagttcagcaacagcaacagacacaacatccgccacacagagaagaagcccttcaagtgcattgaatgtgggaaggccttcaaccagttcagcaccctcatcacccacaagaagatccacactggagagaagccctacatctgtgaagaatgtgggaaggccttcaagtacagcagcgccctgaacacccacaagaggatccacactggagagaagccctacaagtgtgacaagtgtgacaaggccttcatcgccagcagcaccctgagcaagcatgagatcatccacacaggcaagaagccctacaagtgtgaagaatgtgggaaggccttcaaccagagcagcaccctgaccaagcacaagaagatccacactggagagaagccctacaagtgtgaagaatgtgggaaggccttcaaccagagcagcaccctgaccaagcacaagaagatccacactggagagaagccctacgtgtgtgaagaatgtgggaaggccttcaagtacagccgcatcctgaccacccacaagaggatccacactggagagaagccctacaagtgcaacaagtgtgggaaggccttcatcgccagcagcaccctgagcagacatgagttcatccacatgggcaagaagcactacaagtgtgaagaatgtgggaaggccttcatctggagctctgtgctgaccaggcacaagagggtgcacactggagagaagccctacaagtgtgaagaatgtgggaaggcctttgtggccagcagcaccctgagcaagcatgagatcatccacacaggcaagaagccctacaagtgtgaagaatgtgggaaggccttcaaccagagcagcagcctgaccaagcacaagaagatccacactggagagaagccctacaagtgtgaagaatgtgggaaggccttcaaccagagcagcagcctgaccaagcacaagaagatccacactggagagaagccctacaagtgtgaagaatgtgggaaggccttcaaccagagcagcaccctcatcaagcacaagaagatccacacccgggagaagccctacaagtgtgaagaatgtgggaaggccttccacctgagcacccacctgaccacccacaagatcctgcacactggagagaagccctaccgctgcagagaatgtgggaaggccttcaaccacagcgccaccctgagcagccacaagaagatccacagcggggagaagccctatgaatgtgacaagtgtgggaaggccttcatcagccccagcagcctgagcagacatgagatcatccacactggagagaagccctag

SEQ ID NO: 221173 - DNA, 1863 bp, Artificial Sequence
  derived and/or modified sequence
atgggccccctgcagttccgggacgtggccatcgagttcagcctggaagagtggcactgtttagatacagcgcaaagaaacctgtaccgcaacgtgatgctcgaaaactactcaaacctggtcttcttaggaatagtggtgtccaaacccgacttaatcgcccatctcgaacagggcaagaaacctctgacaatgaaaagacacgaaatggtggcaaatccctccgtgatttgttcccacttcgctcaggatctgtggccggagcagaatattaaggacagttttcaaaaggttattctgaggcggtacgagaaacgtggccatggcaacttgcagctgataaaacggtgcgaatctgtggatgaatgcaaggtgcacaccggcggctacaacggattaaatcagtgctcaaccaccactcagagtaaggtgttccaatgcgataaatacggaaaggtcttccataaattctcaaactccaataggcataacattaggcatacagaaaagaagccttttaaatgtattgagtgcggcaaggcatttaatcagttctcgactctgattactcataagaaaattcatactggcgaaaagccatacatctgcgaagagtgcggaaaggcttttaagtattcttcagccctgaatactcacaaaagaatccatacaggagagaaaccctataagtgcgacaagtgtgacaaagcctttattgcctccagtaccctcagtaagcacgaaatcattcataccggcaagaaaccctacaaatgtgaggaatgcgggaaggcattcaaccagtctagcacactcacgaagcataagaaaatccacaccggtgaaaagccttacaaatgcgaagaatgcgggaaggcctttaatcagagcagtacccttacaaagcacaaaaaaatccacaccggcgagaaaccatacgtgtgcgaggaatgtggcaaggccttcaaatattcaagaatcctcacaacccataagcgcatccataccggtgagaagccgtataaatgcaataagtgcggcaaggctttcatcgcctcatctacactgagtcgtcacgagttcatacatatgggaaagaagcactacaagtgcgaggagtgtggaaaagccttcatttggtcaagtgtgcttactagacacaagcgggttcacacaggggaaaaaccgtacaaatgcgaagaatgtggaaaagcattcaaatatagcagtacattatcaagtcataagagatctcacaccggcgaaaagccatataagtgtgaggagtgtggtaaggcattcgttgctagttcaaccctgtcaaaacacgagattatccacacaggcaagaagccatataaatgcgaagagtgtggcaaggcttttaaccagtctagtagcctgacgaaacataagaagatccatactggtgagaaaccgtataaatgtgaggaatgcggcaaagcattcaatcagagttcgagcctgaccaagcacaaaaagatccacacgggtgaaaaaccttacaagtgtgaggaatgcggcaaagcattcaatcagtcctccacgctcattaaacacaaaaagattcatacccgggagaagccgtacaagtgcgaggaatgtgggaaagcttttcacctgtcaactcacttgacaacgcataagatcctccataccggagaaaagccgtaccggtgtagggaatgcgggaaggcgttcaaccactcagccaccctcagctcccacaagaaaattcactccggcgagaagccatacgagtgtgacaaatgtggcaaagcgtttatctccccttcctcgctgagccgacatgagattattcacactggggagaagccttag

SEQ ID NO: 221174 - DNA, 1779 bp, Artificial Sequence
  derived and/or modified sequence
atgggccccctgcagttccgggacgtggccatcgagttcagcctggaggagtggcattgtctggatacagcccaaaggaacctgtacaggaacgtgatgctggagaattatagcaacttggtcttcctcggaattgtggtgtcaaaacccgatttaatcgcgcaccttgagcaggggaaaaagcccctgaccatgaaaaggcatgaaatggtggcaaatccatccgtaatttgctcgcactttgcccaagatttgtggccagaacaaaatattaaagactcgtttcagaaggttatcctgcgtcggtatgaaaagagaggtcacggcaacctgcagttgatcaaaaggtgcgagtctgtcgatgaatgtaaggtgcatactggaggttataacggtctcaaccaatgctctacaacaactcagagcaaggtttttcagtgcgacaaatatggcaaggtcttccacaaattctctaacagcaatagacacaatattcgccacactgagaagaagccctttaaatgcattgagtgtgggaaggctttcaatcagttttccacacttataacccacaagaagatccacacaggggaaaagccatacatatgtgaagaatgcggaaaggcctttaagtactcgagtgccttaaacacacacaagagaatccacacaggcgagaagccatataagtgtgacaaatgtgacaaggccttcatcgcttcgtcaaccctgtcgaaacacgagatcatccataccggcaagaagccctacaaatgcgaagagtgcgggaaagccttcaaccagtcttcaactctcacaaaacataaaaagatccacactggggagaaaccatataagtgcgaggagtgtggcaaggcttttaaccagagcagtaccctcacaaagcacaaaaaaatacacactggagagaaaccttacgtctgcgaggagtgcggcaaagcatttaagtattctcggatattgactactcataaacgtatccatactggtgagaaaccatacaagtgtaacaagtgcggaaaagcctttatagcttcgagtaccctttcaagacatgagtttattcatatggggaagaagcattacaaatgtgaagaatgcggcaaggcctttatctggtcttccgtattaacccgccataaaagggtgcatacgggcgagaaaccttacaagtgtgaagagtgtggcaaggcgtttgttgcttccagtactctgtccaaacacgagattattcacaccggcaaaaaaccatacaagtgcgaagaatgcggtaaggcttttaaccagagttctagcttaaccaagcacaaaaaaatccacacgggcgagaagccgtacaagtgtgaagagtgtgggaaggcttttaatcagagcagcagtctgactaagcataaaaagatccataccggtgaaaagccttataagtgcgaggagtgcggaaaggctttcaaccagagcagtactctcatcaagcacaagaaaattcacacacgtgagaagccatacaaatgcgaggagtgcggcaaggcctttcacctgtccacccaccttactacgcacaagatcctccacacaggggaaaaaccctatcggtgtcgggagtgcggcaaagctttcaaccactccgcaacattgagctcccacaagaagatccacagcggagagaagccctatgagtgcgacaagtgcggaaaagcttttatcagcccctcttcactgtctaggcacgaaattattcacactggcgagaaaccttag

SEQ ID NO: 221175 - DNA, 1863 bp, Artificial Sequence
  derived and/or modified sequence
atggggcctttgcagtttagggacgtcgccattgaattttcactagaggagtggcactgcctcgatacggcccagagaaatttgtacagaaatgtgatgctcgagaactactcgaacctggtgtttcttggaattgtggtgtccaaacccgatctaattgcgcatctggagcaggggaagaaaccattgaccatgaagcggcacgaaatggtggccaaccccagcgttatctgttcacattttgcccaggatctgtggcctgagcagaatatcaaggactctttccagaaggtgattctgcgtcggtacgaaaagaggggccatggtaatctacagctaataaagcgctgtgagtctgtcgatgaatgcaaagttcacaccgggggttacaacggcttgaaccaatgctccacaactactcagtcaaaagtttttcagtgtgacaagtatggaaaggtgttccataaattctctaacagcaatcgtcacaacatcagacataccgagaagaagccatttaagtgtattgaatgcggcaaagccttcaaccagttcagtactctcattacacataagaagatccacacaggagaaaagccctatatttgcgaggaatgcgggaaagcttttaagtacagcagtgccctgaacacccataagcgaattcacacaggcgagaagccttacaaatgcgataaatgcgataaggcgttcatcgcgtcatccacactttccaagcacgaaataatccacactggcaagaaaccgtataagtgtgaggagtgtggaaaagccttcaatcagtcctccactctcactaaacacaaaaaaattcatacgggggagaaaccttacaagtgtgaggaatgtggcaaggctttcaaccagagctccacccttactaaacataaaaagatccatacgggtgagaaaccatatgtgtgtgaggagtgcggaaaagcctttaagtattctcggatactgactacgcataagcgcattcataccggagagaagccctacaaatgcaacaagtgcggaaaggcgtttatcgcttcgagtactctgagtaggcacgaattcattcatatgggtaaaaagcactacaagtgcgaagagtgtgggaaggcatttatctggtcctctgttctaacccgtcacaagcgggtgcacactggcgaaaagccctacaaatgcgaagagtgtgggaaggcatttaagtacagttccactttgagtagccataagcggtcacacaccggagagaagccatacaagtgcgaggaatgtggtaaggcctttgtggcttcaagcactttgtcgaaacacgaaattatacacactgggaagaagccctacaaatgcgaagagtgtggcaaagctttcaatcagagctctagccttacaaaacacaagaagatccatacaggggaaaaaccttacaagtgcgaagaatgtggcaaggccttcaaccaaagctccagtctgactaagcacaaaaaaattcacacaggtgagaaaccttacaaatgcgaagaatgtggtaaggcctttaatcagtcctctaccctcattaaacataagaaaatacacactagagagaagccctataagtgcgaggagtgcggaaaagcatttcatctgtctacacatttaaccacccataagatcttgcacactggggaaaagccttatagatgtagggaatgcggcaaggcatttaaccactcggctaccctgtcaagccacaaaaaaattcacagcggggagaagccttatgaatgtgacaagtgtgggaaggcttttatctcccccagttccttgagtagacacgagataattcacactggtgagaagccatag

SEQ ID NO: 221176 - DNA, 1779 bp, Artificial Sequence
  derived and/or modified sequence
atgggccctctgcaatttcgcgatgtggctattgagttttcattggaggaatggcactgcctcgataccgcccagagaaacctttaccggaacgtgatgctcgaaaactactcgaatttggtattcctagggattgtcgtgagcaaacccgatctgatcgctcaccttgagcagggaaagaaacctcttactatgaaaagacacgagatggtggctaacccgagcgttatctgcagtcactttgcccaagatctctggccggagcagaacataaaagactcattccagaaggtgattctccgacggtacgagaagagaggccatggcaacctccagctgattaaaaggtgtgagagcgtggacgagtgcaaggttcacaccggtggttacaatggcctcaatcaatgcagcaccaccactcaatctaaagttttccagtgcgacaagtacggcaaagtattccataagttttctaacagtaaccgccataatatcaggcataccgaaaagaagccatttaaatgcatcgagtgcggcaaagccttcaaccaattctccaccctgatcactcacaaaaaaattcacaccggggaaaaaccttatatctgtgaggaatgtggaaaggccttcaaatattcttcagccttgaacacccacaagcggatccacacgggagagaaaccatacaagtgtgacaagtgcgacaaggccttcattgcctcctctacattgtcgaagcacgaaatcatccatacaggcaaaaaaccttacaagtgcgaggagtgcgggaaggccttcaaccaatcctcaactctgacaaaacataaaaaaatccatacaggagaaaagccttacaagtgcgaggaatgtggaaaggcctttaatcagagttccaccttgacaaagcataagaagattcacaccggagaaaaaccttacgtgtgtgaggagtgcggaaaggcatttaaatacagtcggatactcaccacacataagcgcatccacactggtgagaagccctacaaatgtaacaagtgcgggaaggcctttatagcctcatcaacgctgtcacgtcacgagtttatccacatgggaaagaagcactacaaatgcgaggaatgcgggaaggctttcatatggtcatccgtgcttacgaggcacaagagagtccatacaggcgagaagccttacaagtgtgaggaatgtggcaaggcattcgttgcctcatcaacactgtccaagcacgagattattcacactggcaaaaagccatataagtgcgaggagtgcggtaaagcattcaatcagtcatcctctctgacaaaacacaagaaaatccacaccggggagaaaccgtacaagtgcgaggaatgcggtaaagcatttaatcagagttcatccttgaccaaacacaaaaagatccatacaggcgaaaaaccatataaatgcgaagaatgcgggaaggcctttaatcaatcctccacactcatcaagcataagaaaattcacacacgagaaaaaccctataagtgcgaggagtgcggcaaagcctttcatttgagtactcatttgactactcataaaattctccatacaggagagaaaccctacaggtgtcgagaatgcggcaaggcctttaaccattccgcaacgctgagtagtcataaaaagattcattctggcgaaaaaccgtacgaatgtgacaaatgcggcaaggccttcatatctccttcgagcttgtcacgtcatgagatcatccatactggcgagaagccatag

SEQ ID NO: 221177 - DNA, 2794 bp, Artificial Sequence
  derived and/or modified sequence
gaacagggcggcttctggtttggcgggtcctttgtctctcggtgcagccggagctccaggtctcctcttcactactctgtgtcctgtgctcctacaggcccagcctctgtggccctgtgacctgcaggtattgggagatccacagctaagacaccaggacccctggaagcctagaaatgggaccattgcaatttagagatgtggccatagaattctctctggaggagtggcattgcctggacactgcacagcggaatctatataggaatgtgatgttagagaactacagtaacctggtcttccttggtattgttgtctctaagccagacctgatcgcccatctggagcaaggaaaaaaacctttgactatgaagagacatgagatggtagccaacccctcagttatatgttctcattttgcccaagatctttggccagagcagaacataaaagattctttccaaaaagtgatactgagaagatatgaaaaacgtggacatggaaatttacagttaataaaaaggtgtgaaagtgtagatgagtgtaaggtgcacacaggaggttataatggacttaaccagtgtagtacaactacccagagcaaagtatttcaatgtgataaatatgggaaagtctttcataaattttcaaattcaaatagacataatataagacatactgaaaaaaaacctttcaaatgcatagaatgtggcaaagcttttaaccagttctcaacccttataacacataagaaaattcatactggagagaaaccctacatttgtgaagaatgtggcaaagcctttaagtactcctctgcccttaatacacataagagaattcatactggagagaaaccatacaagtgtgataaatgtgacaaagcctttattgcatcctcaacccttagtaaacatgagatcattcatactggaaagaaaccctacaagtgtgaagaatgtggcaaagcttttaaccaatcctcgacacttactaaacataagaaaattcatactggagagaaaccctacaaatgtgaagaatgtggcaaagcttttaaccaatcctcaacacttactaaacataagaaaattcatactggagagaagccctacgtttgtgaagaatgtggcaaagcctttaagtactcccgtatccttactacacataagagaattcatactggagagaaaccatacaagtgtaataaatgtggcaaagcctttattgcatcctcaacccttagtagacatgagttcattcatatgggaaagaaacattacaaatgtgaagaatgtggcaaagccttcatttggtcctcagtcctaactagacataagagagttcatactggagagaagccctacaaatgtgaagaatgtggcaaagcctttaagtactcctctacccttagttcacataagagaagtcatactggagagaaaccctacaaatgtgaagaatgtggcaaagcctttgttgcatcctcaacccttagtaaacatgagatcattcatactggaaagaaaccctacaagtgtgaagaatgtggcaaagcttttaaccagtcctcatcccttactaaacataagaaaattcatactggagagaaaccctacaaatgtgaagaatgtggcaaagcttttaaccagtcctcttcccttactaaacataagaaaattcatactggagagaaaccctacaaatgtgaagaatgtggcaaagcttttaaccagtcctcaacccttattaaacataagaaaattcatactagagagaaaccctacaaatgtgaagaatgtggcaaagcttttcacctatccacacaccttactacacataagatacttcatactggagagaaaccttatagatgtagagaatgtggcaaagcttttaaccattctgcaaccctttcttcacataagaaaatccattctggagagaaaccatacgagtgtgataaatgtggcaaagcctttatttcaccctcaagccttagtagacatgagataattcatactggggagaaaccctagaagtgtgaagaatgtggcaaagccttcaagtggtcctcacaccttactatacactgagagttctgaacttactctgtaaccatcccaaactcctcccaggcacagtctggcagaggtcctgccatttcggagacctggaggaagtggcccatttacagccatgtaggcaggcctgcagaccttggcctttactacggtacctgaagtggttcaatgactcagtttcagttacctgagccacagcttaaggtcagttctgcctatatagaaacccacacagttaacctgaggaaatgctctctggtactcactgaaagccacactcatccacatcctgatacaaggcccaccatatgcagacctgactgccaaaacatgccctagtgtctgccgtacagagtgaagtcctgaaggatatttagtctgtccaaaactaaaatgaagatttcaactccccaaccccctctaacaagccagctaaaggtggactatagtgcagacccagcaaccttgtgaccaggctaaaacccctcatcactacaaattcagagggcatctcatcaccctaagggcccaacgaaagatctttaccttctaacatcagtttatgaaaacttgaaaaggtgtttgctccatcaaattcagacaccagtacaaaactatattatgcccattgtctggttctattttaatgtagcactggaagtgtgtggcagaagaattagtcaaagaaataaaaatagccattgaaattg

SEQ ID NO: 221178 - DNA, 1955 bp, Artificial Sequence
  derived and/or modified sequence
gaacagggcggcttctggtttggcgggtcctttgtctctcggtgcagccggagctccaggtctcctcttcactactctgtgtcctgtgctcctacaggcccagcctctgtggccctgtgacctgcaggtattgggagatccacagctaagacaccaggacccctggaagcctagaaatgggaccattgcaatttagagatgtggccatagaattctctctggaggagtggcattgcctggacactgcacagcggaatctatataggaatgtgatgttagagaactacagtaacctggtcttccttggtattgttgtctctaagccagacctgatcgcccatctggagcaaggaaaaaaacctttgactatgaagagacatgagatggtagccaacccctcagttatatgttctcattttgcccaagatctttggccagagcagaacataaaagattctttccaaaaagtgatactgagaagatatgaaaaacgtggacatggaaatttacagttaataaaaaggtgtgaaagtgtagatgagtgtaaggtgcacacaggaggttataatggacttaaccagtgtagtacaactacccagagcaaagtatttcaatgtgataaatatgggaaagtctttcataaattttcaaattcaaatagacataatataagacatactgaaaaaaaacctttcaaatgcatagaatgtggcaaagcttttaaccagttctcaacccttataacacataagaaaattcatactggagagaaaccctacatttgtgaagaatgtggcaaagcctttaagtactcctctgcccttaatacacataagagaattcatactggagagaaaccatacaagtgtgataaatgtgacaaagcctttattgcatcctcaacccttagtaaacatgagatcattcatactggaaagaaaccctacaagtgtgaagaatgtggcaaagcttttaaccaatcctcgacacttactaaacataagaaaattcatactggagagaaaccctacaaatgtgaagaatgtggcaaagcttttaaccaatcctcaacacttactaaacataagaaaattcatactggagagaagccctacgtttgtgaagaatgtggcaaagcctttaagtactcccgtatccttactacacataagagaattcatactggagagaaaccatacaagtgtaataaatgtggcaaagcctttattgcatcctcaacccttagtagacatgagttcattcatatgggaaagaaacattacaaatgtgaagaatgtggcaaagccttcatttggtcctcagtcctaactagacataagagagttcatactggagagaagccctacaaatgtgaagaatgtggcaaagcctttgttgcatcctcaacccttagtaaacatgagatcattcatactggaaagaaaccctacaagtgtgaagaatgtggcaaagcttttaaccagtcctcatcccttactaaacataagaaaattcatactggagagaaaccctacaaatgtgaagaatgtggcaaagcttttaaccagtcctcttcccttactaaacataagaaaattcatactggagagaaaccctacaaatgtgaagaatgtggcaaagcttttaaccagtcctcaacccttattaaacataagaaaattcatactagagagaaaccctacaaatgtgaagaatgtggcaaagcttttcacctatccacacaccttactacacataagatacttcatactggagagaaaccttatagatgtagagaatgtggcaaagcttttaaccattctgcaaccctttcttcacataagaaaatccattctggagagaaaccatacgagtgtgataaatgtggcaaagcctttatttcaccctcaagccttagtagacatgagataattcatactggggagaaaccctag

SEQ ID NO: 221179 - DNA, 530 bp, Artificial Sequence
  derived and/or modified sequence
gtctctcggtgcagccggagctccaggtctcctcttcactactctgtgtcctgtgctcctacaggcccagcctctgtggccctgtgacctgcaggtattgggagatccacagctaagacaccaggacccctggaagcctagaaatgggaccattgcaatttagagatgtggccatagaattctctctggaggagtggcattgcctggacactgcacagcggaatctatataggaatgtgatgttagagaactacagtaacctggtcttccttggtattgttgtctctaagccagacctgatcgcccatctggagcaaggaaaaaaacctttgactatgaagagacatgagatggtagccaacccctcagttatatgttctcattttgcccaagatctttggccagagcagaacataaaagattctttccaaaaagtgatactgagaagatatgaaaaacgtggacatggaaatttacagttaataaaaaggtgtgaaagtactccatctgaaaaagaaaaaaaaaagaaa

SEQ ID NO: 221180 - protein, 974 aa, Artificial Sequence
  derived and/or modified sequence
MAKAGRAGGPPPGGGAPWHLRNVLSDSVESSDDEFFDAREEMAEGKNAILIGMSQWNSNDLVEQIETMGKLDEHQGEGTAPCTSSILQEKQRELYRVSLRRQRFPAQGSIEIHEDSEEGCPQRSCKTHVLLLVLHGGNILDTGAGDPSCKAADIHTFSSVLEKVTRAHFPAALGHILIKFVPCPAICSEAFSLVSHLNPYSHDEGCLSSSQDHVPLAALPLLAISSPQYQDAVATVIERANQVYREFLKSSDGIGFSGQVCLIGDCVGGLLAFDAICYSAGPSGDSPASSSRKGSISSTQDTPVAVEEDCSLASSKRLSKSNIDISSGLEDEEPKRPLPRKQSDSSTYDCEAITQHHAFLSSIHSSVLKDESETPAAGGPQLPEVSLGRFDFDVSDFFLFGSPLGLVLAMRRTVLPGLDGFQVRPACSQVYSFFHCADPSASRLEPLLEPKFHLVPPVSVPRYQRFPLGDGQSLLLADALHTHSPLFLEGSSRDSPPLLDAPASPPQASRFQRPGRRMSEGSSHSESSESSDSMAPVGASRITAKWWGSKRIDYALYCPDVLTAFPTVALPHLFHASYWESTDVVAFILRQVMRYESVNIKESARLDPAALSPANPREKWLRKRTQVKLRNVTANHRANDVIAAEDGPQVLVGRFMYGPLDMVALTGEKVDILVMAEPSSGRWVHLDTEITNSSGRITYNVPRPRRLGVGVYPVKMVVRGDQTCAMSYLTVLPRGMECVVFSIDGSFAASVSIMGSDPKVRPGAVDVVRHWQDLGYMILYITGRPDMQKQRVVSWLSQHNFPQGMIFFSDGLVHDPLRQKAIFLRNLMQECFIKISAAYGSTKDISVYSVLGLPASQIFIVGRPTKKYQTQCQFLSEGYAAHLAALEASHRSRPKKNNSRMILRKGSFGLHAQPEFLRKRNHLRRTMSVQQPDPPAANPKPERAQSQPESDKDHERPLPALSWARGPPKFESVP

SEQ ID NO: 221181 - DNA, 2925 bp, Artificial Sequence
  derived and/or modified sequence
atggcaaaagcaggacgggccggcgggcccccacctggtggtggcgcaccgtggcatttgagaaacgttttgtctgacagtgtagagagctctgacgatgagttcttcgacgcccgcgaggagatggccgaagggaagaacgcgattcttatcggtatgagccagtggaattccaacgacctggtggagcagatcgagacgatgggaaagctggacgagcaccagggggaaggtacggccccatgtacctcctctatcctgcaggagaaacagcgggaattatacagagtctctcttaggaggcagcgcttcccggcccagggaagtattgagatccacgaggacagtgaagaaggatgtccccagcgttcttgcaaaacccatgtgctcctgctggttctccatggtgggaatattctcgacacgggggcaggcgatcccagctgcaaagcagctgacattcacacattttcgtccgtccttgagaaagttacacgcgctcacttcccagccgccttaggacatattttaattaaattcgtgccctgcccagccatatgcagcgaggctttctcacttgtctctcacctgaacccttactcccatgacgagggctgcctgagctcgtcccaagaccacgtgcccctggctgctcttcctttgctcgccattagcagcccacagtaccaggatgccgtggcaaccgtgatcgagagagctaaccaggtctatagagagtttctcaaatcctccgacgggatcggcttttccggacaagtatgcttgatcggagattgcgtgggcggtctgctagctttcgatgcgatctgttactcggccgggccatcaggcgattctcctgccagcagcagccgcaaggggagcatatcaagtacacaggatacgcccgttgccgtcgaagaagactgcagtctggcgagttccaagcgactcagtaaaagcaatatagacatatcctccggccttgaagatgaggaacccaagcggcctcttcctcggaagcagtcagacagttcgacatacgactgcgaagccattacacaacatcatgcgttcttaagcagtatccactccagcgtcttgaaggacgaaagtgagacccctgccgcaggcggcccacagctcccagaggtgagcctggggcgtttcgacttcgatgttagtgacttctttctcttcggttctcctctaggactagtgttagctatgcgccgcaccgtactaccgggcctcgatggattccaagtgcgtcctgcgtgttctcaagtgtactccttctttcactgcgccgatccttcagcctctcggctcgagcccctgctggaaccaaaattccacttagtacccccagtctcagtgcctaggtaccagcgcttccctttaggagacggtcagtccctgctactggcagacgcactacacacccacagcccactattcctggaaggctcctctcgtgactctccccccttactggacgctcctgcttccccgccacaggcaagtcggttccagcgtccaggcaggaggatgagtgaaggttcaagccatagtgaaagctcggaatccagtgattctatggccccagtgggcgcttcccgaattacagcgaagtggtggggcagtaaacgcattgactacgccctgtactgtccggatgtcctgacagcattcccaacagtggctttgccccacctgttccacgcatcatactgggaatctaccgatgtggtcgccttcatactgcgtcaggtgatgcgctacgaaagcgttaacatcaaggaaagtgcccgactggatcccgctgcactaagtccggctaatccgcgagagaagtggcttcgcaaacgcacccaggttaaactgagaaatgtcactgccaatcacagagccaatgatgtgatcgctgcagaagacggtccacaggtgctggtcggccggtttatgtacggccctttagatatggttgcgttgaccggcgagaaagtagacatcctggtgatggccgagccttcaagcggacggtgggtgcacttggataccgagattacaaatagttcaggcaggatcacgtataacgtccccagaccgcgccgcttgggtgtgggtgtgtaccctgtcaaaatggttgtgagaggtgatcaaacttgtgccatgtcctatctgaccgtcttgccacgcgggatggaatgtgtggtgttctctattgatggctcgttcgccgcatccgtctcaatcatgggcagtgatccaaaagtgaggcccggagctgtagatgtggttcggcactggcaggacctcgggtacatgatcctctatattaccggacggccagatatgcagaagcagcgagttgtgagctggctaagccagcacaatttccctcagggtatgatattcttctcagacggcctggtccacgacccgttgaggcagaaggccatctttctacgcaatctgatgcaagagtgctttatcaagataagtgccgcatacggcagcactaaggacatcagcgtatactcggtgctgggtctgcccgctagccagatcttcatcgttggtcgcccaacaaaaaaataccagactcagtgtcagttcctttctgagggctacgcagctcacctggccgccctggaggcgagccaccgctctcgccccaagaaaaataacagcagaatgattctacgtaaaggaagttttggactgcatgcgcaacccgaattccttcgaaaacgcaatcatctccggaggaccatgtctgtgcagcaacctgacccgccagctgctaatccgaaacccgagcgcgcgcagagccagcctgagagcgataaggatcacgagcgacccctgcccgccctttcgtgggcacggggtccaccaaagttcgagtccgtgccttag

SEQ ID NO: 221182 - DNA, 2925 bp, Artificial Sequence
  derived and/or modified sequence
atggccaaggccggccgggccggcggccccccacctgggggcggggccccctggcacctgagaaatgtgctgagtgacagcgtggagagcagtgatgatgagttctttgatgcccgggaggagatggccgagggcaagaatgccatcctgattggcatgagccagtggaacagcaatgacctggtggagcagatcgagaccatgggcaagctggatgagcaccagggcgagggcacagccccctgcaccagcagcatcctgcaggagaagcagcgggagctgtacagagtgtccctgcggcggcagcgcttccctgcccagggcagcattgagatccacgaggacagcgaggagggctgcccccagaggagctgcaagacccacgtgctgctgctggtgctgcatggaggcaacatcctggacaccggggccggggaccccagctgcaaggctgctgacatccacaccttcagctctgtgctggagaaggtgacccgggcccacttccctgctgccctgggccacatcctgatcaagtttgtgccctgcccagccatctgcagcgaggccttcagcctggtgagccacctgaacccctacagccatgatgagggctgcctgagcagcagccaggaccacgtgcccctggccgccctgcccctgctggccatcagcagcccccagtaccaggatgctgtggccaccgtgattgagcgggccaaccaggtgtaccgggagttcctgaagagcagtgatggcatcggcttcagcggccaggtgtgcctgattggagactgtgtgggcggcctgctggcctttgatgccatctgctacagcgctggccccagcggggacagccctgccagcagcagcaggaagggcagcatcagcagcacccaggacacccctgtggccgtggaggaggactgcagcctggccagcagcaagaggctgagcaagagcaacatcgacatcagcagcggcctggaggatgaggagcccaagaggcccctgcccaggaagcagagcgacagcagcacctatgactgtgaggccatcacccagcaccacgccttcctgagcagcatccacagctctgtgctgaaggatgagagcgagaccccagctgctgggggcccccagctgcctgaggtgtccctgggccgctttgattttgatgtgtctgacttcttcctgtttggcagccccctgggcctggtgctggccatgagaagaacagtgctgcccggcctggatggcttccaggtgcggcctgcctgcagccaggtgtacagcttcttccactgtgccgaccccagcgccagccggctggagcccctgctggagcccaagttccacctggtgccccctgtgtctgtgccccgctaccagcgcttccccctgggagatggccagagcctgctgctggctgatgccctgcacacccacagccccctcttcctggagggcagcagccgggacagcccccccctgctggatgccccagccagccccccccaggccagccgcttccagaggcctggccgcaggatgtctgagggcagcagccacagcgagagcagcgagagcagtgacagcatggcccctgtgggcgccagccgcatcacagccaagtggtggggcagcaagagaattgattatgccctgtactgcccagatgtgctgacagccttccccaccgtggccctgccccacctgttccacgccagctactgggagagcacagatgtggtggccttcatcctgcggcaggtgatgagatatgaatctgtgaacatcaaggagagcgcccggctggaccctgctgccctgagccctgccaacccccgggagaagtggctgaggaagaggacccaggtgaagctgagaaatgtgacagccaaccaccgggccaatgatgtgattgctgctgaagatggcccccaggtgctggtgggccgcttcatgtatggccccctggacatggtggccctgaccggggagaaggtggacatcctggtgatggccgagcccagcagcggccgctgggtgcacctggacacagagatcaccaacagcagcggccgcatcacctacaacgtgccccggccccggcggctgggcgtgggcgtgtaccctgtgaagatggtggtgcggggggaccagacctgtgccatgagctacctgactgtgctgccccggggcatggagtgtgtggtgttcagcattgatggcagctttgctgcctctgtgtccatcatgggcagtgaccccaaggtgcggcctggagctgtggatgtggtgcgccactggcaggacctgggctacatgatcctgtacatcaccggccgcccagacatgcagaagcagagggtggtgtcctggctgagccagcacaacttcccccagggcatgatcttcttcagtgatggcctggtgcatgaccccctgcggcagaaggccatcttcctgaggaacctgatgcaggagtgcttcatcaagatctctgctgcctacggcagcaccaaggacatctctgtgtacagcgtgctgggcctgcctgccagccagatcttcatcgtgggccggcccaccaagaagtaccagacccagtgccagttcctgtctgagggctacgccgcccacctggccgccctggaggccagccacaggagccggcccaagaagaacaacagcaggatgatcctgaggaagggcagctttggcctgcacgcccagcctgagttcctgaggaagaggaaccacctgcggaggaccatgtctgtgcagcagcctgaccccccagctgccaaccccaagccagagcgggcccagagccagcctgagagtgacaaggaccacgagcggcccctgcctgccctgtcctgggcccggggcccccccaagtttgagagcgtgccctag

SEQ ID NO: 221183 - DNA, 2925 bp, Artificial Sequence
  derived and/or modified sequence
atggccaaggccggccgggccggcggccccccccccggcggcggcgccccctggcacctgagaaacgtgttgtccgattcagttgaaagttcggatgatgaatttttcgacgcccgtgaagaaatggccgaaggtaagaacgctatcctaattggaatgagccagtggaacagcaatgatttggttgagcagatcgagacaatgggcaagctggacgaacaccaaggcgaaggcaccgcaccctgtacatcctccattctccaggagaaacagcgagagttatatcgggtgtctctacgtcgacagcggtttccagctcaggggtctatcgagatccacgaggactcggaggaaggctgcccccagcggagctgcaagacccatgtgttgctgctggtgttacatggcggtaatattctggataccggggccggagacccttcctgcaaagccgccgatattcataccttctcgagcgtcctcgagaaggtaacccgtgctcattttccggccgctctgggacacatactcatcaagttcgttccctgccctgcaatatgctccgaagcattcagcttggtgagccatttgaatccttacagccacgacgaaggctgtctttcatcttcgcaggaccacgtcccactggcggcgctacccttactggcgatttcttctccccagtaccaagacgccgtcgccacagtgattgagcgggcaaatcaggtgtatcgcgagtttttgaagagctcagacgggattggcttttcaggtcaagtttgtctgattggcgattgcgttggcggacttctggcttttgatgccatttgttatagcgccggcccgagcggggatagtcctgcatcaagtagccgcaaagggtccatctcttccacccaggatactcccgttgctgtggaagaggattgttcactggctagcagcaagcgtctgtccaaatcaaacatcgacatatcctcaggccttgaggacgaagaaccgaagaggcctttaccccgaaaacagtcagatagctccacctatgactgcgaggccatcacccagcatcacgcttttctgtccagcattcacagtagcgttctgaaggatgaatcagagacacctgccgctggaggcccgcagttgcctgaggtcagccttgggagatttgacttcgatgtttcggacttcttcctgtttggcagccccttgggactggtgttagccatgcggcgaaccgtgctgccgggcctagacggcttccaggtgcggcccgcgtgcagccaggtgtatagcttttttcattgcgcagatccctccgcttcccggttagaacccttgttggagcccaagttccacctggtgcctcctgtgtcagtcccccggtaccaaaggtttcccctcggcgacgggcagagcttgctcttagccgacgccctccatacacactctcccctttttctggaggggtcttcccgggattcccccccgctgctggatgcccccgcttctccgccacaggcttcacgttttcaaaggccaggccggcgcatgtcagaggggagtagtcattcggagtccagtgagagttccgacagcatggcacctgtcggagcctctcggattactgccaagtggtggggatcgaagaggattgactatgcgctgtattgccctgatgtcctgaccgccttccccaccgtggcccttccccaccttttccacgcttcctattgggaatccacagatgtggtcgcctttattctgagacaggtgatgcgctatgaatccgtaaatatcaaggaatctgcacgactagaccccgctgctttatctccagctaaccccagagagaagtggctgcggaagagaacgcaggtaaagctgagaaatgttaccgcaaaccacagggctaatgatgtcatcgcggctgaggatgggccacaggtgctggttggccgatttatgtacggacctctggacatggtggcactaacgggggagaaggtggatatactggttatggccgagccaagctcaggtcggtgggtgcacctcgacacagagatcacaaattcaagcggcaggataacatacaatgtgccccgccctaggcggctaggagtgggcgtttacccagtcaagatggtggtccggggtgaccagacctgcgcaatgagctatctgaccgttctgcctagagggatggagtgtgtcgtcttctcaatagacgggtctttcgcggcttccgttagcattatgggatctgatccaaaggtccgacctggagctgtcgacgtcgtgaggcattggcaggatctgggctatatgatcctgtacattactggccggcccgatatgcaaaagcagcgcgtggtgtcttggctgagccagcataacttcccacaggggatgatattttttagcgatggcctggtacacgaccccttgcggcaaaaggccatcttcctgaggaacttgatgcaagagtgcttcattaaaatttcagcggcatatggttctacaaaggacatcagtgtgtattctgtgttgggcctgcctgcgtcccagatatttatcgtgggccgaccgaccaaaaaatatcagacacaatgtcaatttttaagtgaggggtacgcagcgcatctggccgcccttgaagcatcacacaggtcacggcctaagaaaaataattccagaatgatcttacgtaaggggtcttttgggttgcacgctcagcccgagtttctgcgcaagcggaatcatctaaggagaactatgtccgtgcagcaaccagacccaccagctgctaaccctaaaccggaaagagcacagagccagcccgaatccgataaggaccacgagcggcctctgcccgcattatcatgggccagggggccaccaaagtttgagtcagtaccttag

SEQ ID NO: 221184 - DNA, 7151 bp, Artificial Sequence
  derived and/or modified sequence
gcggcggcggctgcggtggcggcagccgaggcgagcggggcgggggcgcgggcgcggcgctcggagtccgttcggggccggaggcggtcggggccgggcccgggaagcgcgaggagcgcgcgtagcgccgccggagcccgccgcccgggacatggccaaggcgggccgtgcaggtggtcctcccccgggcggcggtgccccctggcaccttcgaaatgtcctcagtgactctgtggagagctcagatgatgaattctttgatgccagagaggagatggctgaagggaagaatgccatcctcattgggatgagccagtggaactccaatgacctcgtggagcagatcgagaccatggggaaactggacgagcatcaaggagaagggaccgcgccgtgcacatccagcatcctccaggagaagcagcgagaactgtaccgggtttccttgagaagacagaggttcccagcccagggaagcatcgagatccacgaagacagcgaggaaggctgcccgcagcgctcctgcaagacacatgtcctcctgctggtcctgcatgggggaaacatcctggacacgggtgccggggacccgtcctgcaaggcagccgacatccacaccttcagctccgtgctggagaaggtcacacgagcccatttccctgctgccctgggccacatcctcatcaagttcgtcccctgtcctgccatctgctctgaggctttctcgcttgtctctcacctgaacccctacagccacgatgagggctgcctcagcagcagccaggaccacgtccctctggccgcccttcccctgttggccatctcctccccgcagtaccaggatgctgtcgccaccgtcatcgagcgagccaaccaggtctacagagagttcctgaagtcctctgatgggattggcttcagtgggcaggtgtgtctcatcggggactgtgtggggggcctcctggccttcgatgccatctgctacagtgcggggccctcaggggacagccctgccagcagcagccggaaggggagcatcagcagcacccaggacaccccagtcgcggtggaggaagattgcagcctggccagcagcaagcgtctcagcaaaagcaacattgacatctccagtgggttggaggatgaggagcccaagaggccgttgccgcggaaacagagcgactcctccacctatgactgcgaggccatcacccagcaccatgccttcctctcaagcatccactccagcgtgctaaaggatgagtctgagaccccggcggctggggggccgcagctccctgaggtcagcctgggccgctttgacttcgatgtgtccgacttcttcctcttcggctcgccactgggcctggtcctggccatgcggaggacggtgctgcctgggctggacggcttccaggtgcgtcctgcctgcagccaggtctacagcttcttccattgcgcagacccctctgcctcacggctcgagccactgctggagcccaagttccacctggtgccgcctgtcagcgtgcctcgctaccagaggttcccactgggcgatgggcagtccctcctcctcgctgatgccctacacacccacagccccctcttcctggagggcagctcccgggacagcccgccacttctggatgcccctgcctcgccccctcaggcctcgaggttccagcgcccaggacggaggatgagcgaggggagctcccacagcgagagctcggagtcctcggacagcatggcacccgtgggtgcctcccgcatcacagccaagtggtggggaagcaagaggatcgactatgccctgtactgccctgatgtcctcacggccttccccaccgtggccctgccccacctcttccacgccagttactgggagtccacagacgtggtggccttcatcctgagacaggtaatgcgctatgagagcgtgaacatcaaggaaagcgcccgcctggaccctgcagcactgagtcctgccaacccccgggagaagtggcttcgtaagcggactcaggtcaagctgaggaatgtcacggctaatcaccgggccaatgatgtgattgctgctgaagatggcccccaggtcctggtggggcggttcatgtacgggcccctcgacatggtggctctgactggagagaaggtggacatcctagtaatggcagagccatcctcaggccgctgggtacacctggacacagagatcaccaacagcagtggtcgcatcacatacaatgtgccgcggccccggcgcctgggggttggtgtctatcctgtgaagatggtcgtcaggggcgaccagacctgtgccatgagctacctcacggtgttgcccaggggcatggagtgtgtagtgttcagcattgatgggtccttcgcggccagcgtgtctatcatgggaagcgaccccaaggtccggccgggtgcagtggatgttgtccggcactggcaggacttgggctacatgatcctttacatcacgggacggccggacatgcagaagcagcgggtggtgtcgtggctgtcccagcacaacttcccacagggcatgatcttcttctccgatgggctggtgcatgacccgctgcggcagaaggccatcttcctgcgcaacctcatgcaggagtgcttcatcaaaatcagtgcggcctatggctccacgaaggacatctctgtctacagcgtgctgggcctgcctgcctcccagatcttcattgtgggccggcccaccaagaagtaccaaacccagtgccagttcctgagcgagggctacgccgcacacctggccgcgctggaggccagccaccgctcacgcccaaagaagaacaactcgcgcatgatcctgcgcaagggcagcttcgggctgcacgcgcagccagagttcctgcggaagcgcaaccacctgcgcagaaccatgtcagtgcagcagcccgacccgcccgccgccaaccccaagcccgagcgggcccagagccagcccgagtcggacaaagaccacgagcggccgctgccggcgctcagctgggcgcgtgggccccccaagttcgagtcggtgccctgaggggtgggctgtgctcagagcagggagcggggggcccaatcaggctgcctgcggggacgggagggggctgccctctccccgacacaggcgttttcctgctttttccctcccgtgtctgtccagcagtgtccgaccagagcggggagggatcctgcccgagcccggggggctccctgagctgcgacggggtgaggtccggggatctcggtgcagccactgctgcctcccacgggcctgcgaccgcaagcccaagtcagggttcatgtttgtgtcatcctgggggcaggcttgcccggggctgaagcgtttgggcaaagtcgaccaccctcctgcgtccccaggcttcacagcgagctaggcaggccctcaagggggcagccccagcctcggcaccaagcgccgctggcaggcacagcctctgggctgtcttgtggaggtgtgagtggcatttgtgcccgcccttcctgtggtttgggtcaccattttggggttggcgctcttatggcaagatggccactttctgggagtgagagcacatccccgggctcatgttacgccgtctctgtccacagccctcgggggtggggtctggtgctgacggtctgtcctgcagctgtccattgtccccaacccccgttgtcctcagtgtcctcaccatttccctgtggccctggaggccagggcttcctcttcccggagccctgcctcatgccctcccttgggaggctgcagccttgggctctggctcagctgggctggctgtgagcccctgagctggttgcttgccctctctgggctccgtcttccttctgttattggaggggtccccctagctgagattggtgtgagtctttgactcccaagatgtcctgcagtttggcccattgaggctcttcaggcctaagggtccctccgagtgtcctgtgacccacacctttcacacagcctgggagagggggtctgggtgggctggaaaggaggggctcttaaaggagcctctctgggtgggctgggaagggatccctactccacggagaggtgcagctggtttgccttgcactgcgtgtcccagggacaacccactcaaactgggtgtcctagggacaacccacctccctctcctgccaaaaggttactgattgggctccccataaccccagctctgccaggacccttttatcctttttggctcccagaggcatagagctgagattccagggttctaggggttcctggaagtttggctccaactgttgtattctcttccctttcccctgctgctcagtttgtgcccataacctcctcctgggtagtcccctgaggttggcaggacttggcccttctggggcccctaaagcctgctcaggccctcctgctgctgaaccttggcctgggcactgctttcctgcatcctggaaaaccccgactccctggcccaggcccacacctgctgtgtggggctgcccacgtggccactgagcccccataggctgccatcaaggccggtcccagcaatttcagccaggctgccccagggcccagacgtctgtatacacagcaggcacctgtgtcagctcagtgtcgcttctgctcaatgtctacctctcgcggctcccatgcagccagtgacgctgctggtgggggcggctggcaccgccgttgtgaattgcctggcaaattgggtgccctcctggggctggaggggtctgggctcctaacccccatccctgctctccccactagaaatgtgtcttcagtctgccagctcttctgctctacttccagtgctgcatcctgcactcaagcccagggctgctggcgagtctatggggaggagtgcggatcaggctcagcctcagcctcagcctcagcctcctctatggtcctgtctcctggcggttcacaggtgcccatcccccctttaacatttcacagttcttggctttccaaaggcaccagctcatatggcatagccaccccaaccctaatccttcccccaaatatcctgatttaaacttgggcagacttagtctgattcttgaaaactctaccatctccttcttgcagaaggcactggttacactaaaatgataaaataattagtatggggtactttgctcccagttacattccctcttccctgagaaccccaggctaggcgagagagggagagggagagagaaagagagagagggagagagagagagagagagggagagagaaagagagagagaaagaaaggaagacagaggaaagaaaggaagacagagagaggaaggcagagagagagagggagaaagaaagacaggaaggcagagagagagagagagagagaaaggaagacagagagagagagagaggaagagagagagagagaggaagagagagagagagctcatgagccaggatccctggggaatttgaagtcagtgtgaccagggttctgtggctctggggtcagagctgggacacaggacccagcaggagggccaccaccccttccttttggaaacagctctggttccaagcagcaatcaggtaggaggatcggggctttggctgatgatgcacacacaagatgctgatggtgtacggtgagatattgtgaacgcaacaactggagctgtagttggcgtgtgtgagtgtgtacctgcggttctgtttagtggcgagacaaggtatgtttcagtactgctttcacggcaactgtgtaatgcatatgctctttctacactagcggtttgctcagttttgtctgtccggttaagttggagaaagaaccaagttgtgttgttctctggagggggtgctgctgcctctccttgagtagttctgtgacccccaatccagctgttttgtagagaatccttctagcttctggtatgcctgctctccagcagctggaaacagatcttcctgcctgaccaaagctccttgtttcttgcgtggcatgtttgttcttcccgatccggtggctgtcgtagccgagggcctgcctgccaccttcctttatcatttgccctgttggggttcagggtgcatccttagcccaggacctgctcttccagcatcatgggttttttcctaaagatctcaacggctcccttgggctccataaaatatttcttttttaaaaaagcagactcctttcatgcattgggatgaacggccctcttgtctgggtgctgggctacagcaaacaaatgtgtttgaatcccagtattccagagattcctggcggtgggctgtctagaagaggcgaggctggatctcacggtttttaaactgtatttttacccctttgggacccatacctgtgccctggagtctttcatgaggcacgtgggtcctctgcatcctcactctcccccctagcccaggtgcagccccgggaggggtgccctgaccccgccttaaacaaccaactttcccaccgaatcccatcggcgggcggggggggggggtttgggtgccaagtgccctggaaacctattgtcttttggctcagccaaaagaaacattccctccttcctttccttccgggcttgggggaaaccttcgtaaaaatcatagttagggttaagtccaagcagtgaggcctgacctgggctctgctctccttgttgagacactaacaggcagttgggaggaaaatctgcatttgactccaccctctttggggcaaaggagaaacaggtgacccgagggggggcaggccagaggagggcgactcgtgcacagggacccccacccttggaccccgctgtccttttctagttgtttacttggtggtggcagccagtctgaccttgtctgtggtctgactgttcctaagtgtgtaactttcagtattatctgtgacagatggttctgtggtgaaaaaggtttattatattccttatggctgccttgtacaaaatccgttagaaacgctaatgtaagatatcagatttctaacaagacaaaaacagcattatggagttaaaagatttttacaactgggtcttgattttgatgtgagctggtttttagctctcaaatgttgtcacttaaataaaaaccttctttgccttta

SEQ ID NO: 221185 - DNA, 2925 bp, Artificial Sequence
  derived and/or modified sequence
atggccaaagccggtagggcaggcggtccccctccaggcggaggggctccgtggcatttgcgcaacgttctgtcggacagcgtagagagctctgatgacgaattctttgacgccagagaagagatggccgagggcaaaaatgctatactaatcggaatgtctcagtggaactctaacgatctggtggagcagatcgaaacaatgggaaaactggacgagcaccagggagagggtacagcaccctgtacatctagcattctgcaagaaaagcagcgcgaactgtacagagtgtccctgagaaggcagcgcttcccggctcagggatccatcgagatccatgaggacagtgaggaaggctgcccacagcgaagttgtaaaacccacgtcctcctgttagtgctccatggcggaaatatccttgataccggggcaggggaccctagttgtaaagccgctgacatacacacatttagtagcgtgctggaaaaagttacacgcgcacactttcctgccgctcttggtcacattcttattaagtttgtgccatgtccggctatttgttcagaagcgttctcactggtgtcccatctgaacccctacagtcacgacgagggatgtctcagctcgtcccaggatcacgtgccactagctgccctgcctctcttagccatctccagcccccaataccaagacgccgttgctaccgtgattgagagggctaaccaggtgtatcgggaatttctaaaaagctccgatggaatcggttttagcggacaagtctgccttataggcgactgtgtgggaggcctgttggcgttcgatgcaatctgctacagtgccggaccgtcaggggattcccccgcatcctcaagccgaaaggggtccatctctagcacccaagacacaccagtggcggtcgaagaggattgttctctggcctcatccaagaggctctcaaaaagcaatattgatatctcttctggcctggaggacgaggagccgaagagaccacttccgaggaagcagtccgacagctcaacgtacgattgcgaggcaatcacccaacaccatgctttcttgagttccatccactcttctgtgctcaaagacgaaagtgaaacgcccgcagccggagggccacaactccccgaggtaagcctgggcagattcgacttcgacgtgtcggattttttcctttttggctcaccgcttggtttagtgctggccatgaggcggaccgtcctccctgggctagacggattccaagtcagacccgcatgctcccaggtttacagcttcttccactgtgcagatccaagcgcgtcccgcttggagccactcctggagccaaagtttcacctggtcccaccagtaagcgtccccaggtaccagcgatttcctttgggagatggccagtccctccttctagccgatgccctgcacactcatagccccctttttctggaaggctcttcacgggactctcctcctctccttgacgcccctgcatctccgcctcaggcttcacgtttccagcggccagggagaaggatgtcagaaggatcatcccactctgagtcctctgaatctagtgattctatggctccggtcggtgcctcaagaatcacggcaaagtggtggggatctaaaagaatcgactacgccctatattgcccagacgtgctcacagccttcccaaccgtagctcttccccacctgtttcatgcaagctattgggaatccaccgacgttgtggccttcattctccggcaggtcatgagatacgagtcagtcaatatcaaggaaagtgcaagactggaccccgctgcactatcgcctgcgaaccctcgcgagaagtggttgcggaagaggacccaggttaagcttcgcaatgtgactgccaaccatagagctaatgacgttatcgcggctgaggatggtccccaggtgctggtaggccgatttatgtatggccctctggatatggtggcgctgacaggggaaaaagttgacatactagtaatggctgaacccagctccgggagatgggtacatctagatactgaaatcaccaatagtagcgggcgaatcacgtacaatgttcctaggccacgaaggctcggtgtcggcgtttacccagttaaaatggtcgttaggggcgatcagacctgtgccatgagttacctgacagtactgccgagagggatggagtgtgtcgtcttttcgatcgatggctcctttgcggcaagtgtatcaatcatggggagtgatcctaaagtgcgcccaggagcagtggatgtagtgcggcactggcaggacctggggtatatgatactttatatcactggccgacccgatatgcagaagcagcgcgtggtctcgtggctttctcaacacaacttcccccaagggatgatcttcttcagtgacggcttggttcacgaccccctccgccagaaggctatctttcttcgcaatctgatgcaagaatgctttataaagattagtgctgcttacggatctacgaaggacatttccgtatatagtgtgctgggtttgcccgcatcacagatatttatcgttggcaggcccactaaaaagtatcagacgcaatgccagtttctgtcagagggatatgcagcccatctggctgcgcttgaagcctcccataggtccaggccaaaaaagaataactcccgtatgattctccgcaagggcagttttggcctacacgctcagccggagttcctacgcaaaagaaaccatctccgaagaacaatgtcagtgcagcagcctgacccccctgcggctaaccctaagccagagcgggcacagagtcagcccgagagcgataaagatcacgagaggcccttacccgcactgtcctgggcccgagggcctccgaaatttgagagtgtcccttag

SEQ ID NO: 221186 - DNA, 2925 bp, Artificial Sequence
  derived and/or modified sequence
atggccaaggccggcagagccggcggccccccccccggcggcggcgccccctggcacctgagaaacgtgctgagcgacagcgtggagagcagcgacgacgagttcttcgacgccagagaggagatggccgagggcaagaacgccatcctgatcggcatgagccagtggaacagcaacgacctggtggagcagatcgagaccatgggcaagctggacgagcaccagggcgagggcaccgccccctgcaccagcagcatcctgcaggagaagcagagagagctgtacagagtgagcctgagaagacagagattccccgcccagggcagcatcgagatccacgaggacagcgaggagggctgcccccagagaagctgcaagacccacgtgctgctgctggtgctgcacggcggcaacatcctggacaccggcgccggcgaccccagctgcaaggccgccgacatccacaccttcagcagcgtgctggagaaggtgaccagagcccacttccccgccgccctgggccacatcctgatcaagttcgtgccctgccccgccatctgcagcgaggccttcagcctggtgagccacctgaacccctacagccacgacgagggctgcctgagcagcagccaggaccacgtgcccctggccgccctgcccctgctggccatcagcagcccccagtaccaggacgccgtggccaccgtgatcgagagagccaaccaggtgtacagagagttcctgaagagcagcgacggcatcggcttcagcggccaggtgtgcctgatcggcgactgcgtgggcggcctgctggccttcgacgccatctgctacagcgccggccccagcggcgacagccccgccagcagcagcagaaagggcagcatcagcagcacccaggacacccccgtggccgtggaggaggactgcagcctggccagcagcaagagactgagcaagagcaacatcgacatcagcagcggcctggaggacgaggagcccaagagacccctgcccagaaagcagagcgacagcagcacctacgactgcgaggccatcacccagcaccacgccttcctgagcagcatccacagcagcgtgctgaaggacgagagcgagacccccgccgccggcggcccccagctgcccgaggtgagcctgggcagattcgacttcgacgtgagcgacttcttcctgttcggcagccccctgggcctggtgctggccatgagaagaaccgtgctgcccggcctggacggcttccaggtgagacccgcctgcagccaggtgtacagcttcttccactgcgccgaccccagcgccagcagactggagcccctgctggagcccaagttccacctggtgccccccgtgagcgtgcccagataccagagattccccctgggcgacggccagagcctgctgctggccgacgccctgcacacccacagccccctgttcctggagggcagcagcagagacagcccccccctgctggacgcccccgccagccccccccaggccagcagattccagagacccggcagaagaatgagcgagggcagcagccacagcgagagcagcgagagcagcgacagcatggcccccgtgggcgccagcagaatcaccgccaagtggtggggcagcaagagaatcgactacgccctgtactgccccgacgtgctgaccgccttccccaccgtggccctgccccacctgttccacgccagctactgggagagcaccgacgtggtggccttcatcctgagacaggtgatgagatacgagagcgtgaacatcaaggagagcgccagactggaccccgccgccctgagccccgccaaccccagagagaagtggctgagaaagagaacccaggtgaagctgagaaacgtgaccgccaaccacagagccaacgacgtgatcgccgccgaggacggcccccaggtgctggtgggcagattcatgtacggccccctggacatggtggccctgaccggcgagaaggtggacatcctggtgatggccgagcccagcagcggcagatgggtgcacctggacaccgagatcaccaacagcagcggcagaatcacctacaacgtgcccagacccagaagactgggcgtgggcgtgtaccccgtgaagatggtggtgagaggcgaccagacctgcgccatgagctacctgaccgtgctgcccagaggcatggagtgcgtggtgttcagcatcgacggcagcttcgccgccagcgtgagcatcatgggcagcgaccccaaggtgagacccggcgccgtggacgtggtgagacactggcaggacctgggctacatgatcctgtacatcaccggcagacccgacatgcagaagcagagagtggtgagctggctgagccagcacaacttcccccagggcatgatcttcttcagcgacggcctggtgcacgaccccctgagacagaaggccatcttcctgagaaacctgatgcaggagtgcttcatcaagatcagcgccgcctacggcagcaccaaggacatcagcgtgtacagcgtgctgggcctgcccgccagccagatcttcatcgtgggcagacccaccaagaagtaccagacccagtgccagttcctgagcgagggctacgccgcccacctggccgccctggaggccagccacagaagcagacccaagaagaacaacagcagaatgatcctgagaaagggcagcttcggcctgcacgcccagcccgagttcctgagaaagagaaaccacctgagaagaaccatgagcgtgcagcagcccgacccccccgccgccaaccccaagcccgagagagcccagagccagcccgagagcgacaaggaccacgagagacccctgcccgccctgagctgggccagaggcccccccaagttcgagagcgtgccctag

SEQ ID NO: 221187 - protein, 503 aa, Artificial Sequence
  derived and/or modified sequence
MVLEMLNPIHYNITSIVPEAMPAATMPVLLLTGLFLLVWNYEGTSSIPGPGYCMGIGPLISHGRFLWMGIGSACNYYNRVYGEFMRVWISGEETLIISKSSSMFHIMKHNHYSSRFGSKLGLQCIGMHEKGIIFNNNPELWKTTRPFFMKALSGPGLVRMVTVCAESLKTHLDRLEEVTNESGYVDVLTLLRRVMLDTSNTLFLRIPLDESAIVVKIQGYFDAWQALLIKPDIFFKISWLYKKYEKSVKDLKDAIEVLIAEKRRRISTEEKLEECMDFATELILAEKRGDLTRENVNQCILEMLIAAPDTMSVSLFFMLFLIAKHPNVEEAIIKEIQTVIGERDIKIDDIQKLKVMENFIYESMRYQPVVDLVMRKALEDDVIDGYPVKKGTNIILNIGRMHRLEFFPKPNEFTLENFAKNVPYRYFQPFGFGPRGCAGKYIAMVMMKAILVTLLRRFHVKTLQGQCVESIQKIHDLSLHPDETKNMLEMIFTPRNSDRCLEH

SEQ ID NO: 221188 - protein, 166 aa, Artificial Sequence
  derived and/or modified sequence
MVLEMLNPIHYNITSIVPEAMPAATMPVLLLTGLFLLVWNYEGTSSIPGPGYCMGIGPLISHGRFLWMGIGSACNYYNRVYGEFMRVWISGEETLIISKSSSMFHIMKHNHYSSRFGSKLGLQCIGMHEKGIIFNNNPELWKTTRPFFMKALSGPGLVRMVTVCAE

SEQ ID NO: 221189 - protein, 218 aa, Artificial Sequence
  derived and/or modified sequence
MVLEMLNPIHYNITSIVPEAMPAATMPVLLLTGLFLLVWNYEGTSSIPGPGYCMGIGPLISHGRFLWMGIGSACNYYNRVYGEFMRVWISGEETLIISKSSSMFHIMKHNHYSSRFGSKLGLQCIGMHEKGIIFNNNPELWKTTRPFFMKALSGPGLVRMVTVCAESLKTHLDRLEEVTNESGYVDVLTLLRRVMLDTSNTLFLRIPLDGTEIFTLTS

SEQ ID NO: 221190 - protein, 359 aa, Artificial Sequence
  derived and/or modified sequence
MVLEMLNPIHYNITSIVPEAMPAATMPVLLLTGLFLLVWNYEGTSSIPGPGYCMGIGPLISHGRFLWMGIGSACNYYNRVYGEFMRVWISGEETLIISKSSSMFHIMKHNHYSSRFGSKLGLQCIGMHEKGIIFNNNPELWKTTRPFFMKALSGPGLVRMVTVCAESLKTHLDRLEEVTNESGYVDVLTLLRRVMLDTSNTLFLRIPLDESAIVVKIQGYFDAWQALLIKPDIFFKISWLYKKYEKSVKDLKDAIEVLIAEKRRRISTEEKLEECMDFATELILAEKRGDLTRENVNQCILEMLIAAPDTMSVSLFFMLFLIAKHPNVEEAIIKEIQTVIGERDIKIDDIQKLKKHDAK

SEQ ID NO: 221191 - protein, 352 aa, Artificial Sequence
  derived and/or modified sequence
MVLEMLNPIHYNITSIVPEAMPAATMPVLLLTGLFLLVWNYEGTSSIPGPGYCMGIGPLISHGRFLWMGIGSACNYYNRVYGEFMRVWISGEETLIISKSSSMFHIMKHNHYSSRFGSKLGLQCIGMHEKGIIFNNNPELWKTTRPFFMKALSGPGLVRMVTVCAESLKTHLDRLEEVTNESGYVDVLTLLRRVMLDTSNTLFLRIPLDESAIVVKIQGYFDAWQALLIKPDIFFKISWLYKKYEKSVKDLKDAIEVLIAEKRRRISTEEKLEECMDFATELILAEKRGDLTRENVNQCILEMLIAAPDTMSVSLFFMLFLIAKHPNVEEAIIKEIQTVIGERDIKIDDIQK

SEQ ID NO: 221192 - protein, 242 aa, Artificial Sequence
  derived and/or modified sequence
MVLEMLNPIHYNITSIVPEAMPAATMPVLLLTGLFLLVWNYEGTSSIPGPGYCMGIGPLISHGRFLWMGIGSACNYYNRVYGEFMRVWISGEETLIISKSSSMFHIMKHNHYSSRFGSKLGLQCIGMHEKGIIFNNNPELWKTTRPFFMKALSGPGLVRMVTVCAESLKTHLDRLEEVTNESGYVDVLTLLRRVMLDTSNTLFLRIPLDESAIVVKIQGYFDAWQALLIKPDIFFKISWLYK

SEQ ID NO: 221193 - protein, 181 aa, Artificial Sequence [sequence omitted]

SEQ ID NO: 221194 - protein, 283 aa, Artificial Sequence
  derived and/or modified sequence
MVLEMLNPIHYNITSIVPEAMPAATMPVLLLTGLFLLVWNYEGTSSIPGPGYCMGIGPLISHGRFLWMGIGSACNYYNRVYGEFMRVWISGEETLIISKSSSMFHIMKHNHYSSRFGSKLGLQCIGMHEKGIIFNNNPELWKTTRPFFMKALSGPGLVRMVTVCAESLKTHLDRLEEVTNESGYVDVLTLLRRVMLDTSNTLFLRIPLDESAIVVKIQGYFDAWQALLIKPDIFFKISWLYKKYEKSVKDLKDAIEVLIAEKRRRISTEEKLEECMDFATELI

SEQ ID NO: 221195 - protein, 165 aa, Artificial Sequence
  derived and/or modified sequence
MVLEMLNPIHYNITSIVPEAMPAATMPVLLLTGLFLLVWNYEGTSSIPGPGYCMGIGPLISHGRFLWMGIGSACNYYNRVYGEFMRVWISGEETLIISKSSSMFHIMKHNHYSSRFGSKLGLQCIGMHEKGIIFNNNPELWKTTRPFFMKALSGPGLVRMVTVCA

SEQ ID NO: 221196 - protein, 172 aa, Artificial Sequence
  derived and/or modified sequence
MVLEMLNPIHYNITSIVPEAMPAATMPVLLLTGLFLLVWNYEGTSSIPGPGYCMGIGPLISHGRFLWMGIGSACNYYNRVYGEFMRVWISGEETLIISKSSSMFHIMKHNHYSSRFGSKLGLQCIGMHEKGIIFNNNPELWKTTRPFFMKALSGPGLVRMVTVCAESLKTHL

SEQ ID NO: 221197 - protein, 244 aa, Artificial Sequence
  derived and/or modified sequence
MVLEMLNPIHYNITSIVPEAMPAATMPVLLLTGLFLLVWNYEGTSSIPGPGYCMGIGPLISHGRFLWMGIGSACNYYNRVYGEFMRVWISGEETLIISKSSSMFHIMKHNHYSSRFGSKLGLQCIGMHEKGIIFNNNPELWKTTRPFFMKESAIVVKIQGYFDAWQALLIKPDIFFKISWLYKKYEKSVKDLKDAIEVLIAEKRRRISTEEKLEECMDFATELILAEKRGDLTRENVNQCILEM

SEQ ID NO: 221198 - DNA, 1512 bp, Artificial Sequence
  derived and/or modified sequence
atggtgctggagatgctcaaccctatacattataacatcacgtcaatcgtccctgaggcgatgccagccgctacaatgcccgtgctgctgctaacaggcctgttcctacttgtgtggaactacgaaggcacaagttctattcctgggcctggatattgtatgggaatcggccctttaataagtcatggtcggttcctgtggatgggtattggttctgcttgcaactattacaaccgagtctacggtgaatttatgcgggtgtggatctctggtgaggagactttgatcattagcaagtcctcctcaatgttccacatcatgaaacataatcactattcgtctaggttcggatcaaagctcgggctacagtgtattggcatgcacgaaaagggaatcattttcaacaacaacccagagctttggaaaacaacacggccgttttttatgaaagccctgtcaggacccgggctagttcgcatggtgacagtgtgcgcggagagtttgaagacacatctggaccgcctggaggaagttaccaatgagtccgggtacgtggacgtcttgactttactgcgacgggtgatgcttgatacctccaatactctgttcctgaggatccccttggacgagagtgccatcgtggtgaagattcagggctactttgatgcatggcaggcccttctgattaagcccgatattttttttaagatttcgtggctgtataaaaaatatgagaagtctgtgaaagacctcaaggatgctatcgaagtccttatcgccgagaaaaggaggagaatctccactgaagaaaaactcgaggagtgtatggattttgccactgaactcatcctggccgagaagagaggggacctgacacgtgaaaatgttaaccaatgtatccttgagatgctgatagcagctcccgacacaatgagcgtcagtctttttttcatgctgttcctgatcgctaagcacccaaacgtggaggaggccattatcaaagaaatccagaccgtcattggagagcgcgacatcaaaatcgacgatatccagaagctgaaagtcatggaaaattttatctatgagtctatgcggtatcagccagtcgtggacctggtaatgcgcaaggcactcgaagacgacgttattgacgggtacccagtgaaaaagggtactaatatcatcctgaacatcggccgaatgcaccgtctagaattttttcctaaaccaaacgaatttacactggagaactttgcaaagaatgttccttacaggtactttcagccatttggcttcggccccagaggctgtgccggaaaatatatcgccatggtcatgatgaaagccatactggtaaccctcttacgcagatttcacgttaaaaccctgcaggggcaatgcgtggagtccatccagaagattcacgatctcagtctacacccagatgagactaaaaacatgctggaaatgattttcacccctcggaattccgaccgctgcctcgaacattag

SEQ ID NO: 221199 - DNA, 1512 bp, Artificial Sequence
  derived and/or modified sequence
atggtgctcgaaatgctgaacccaattcattataacatcactagcatcgtcccagaagccatgcctgcagctaccatgcctgttctgctgcttaccggcctgttcctgctggtatggaactacgagggtacctctagcatacctggaccaggctactgcatggggattggaccactgatctcccatggtagattcctgtggatgggcataggctcggcttgtaactactacaatagggtctatggcgaattcatgcgcgtgtggatatccggtgaggaaaccttgatcatcagtaaaagctcgagcatgttccacatcatgaagcacaaccactactcgtctagattcggcagcaagctcggcctccagtgcatcggcatgcacgagaaagggatcatcttcaataataaccccgagctatggaaaacaacacgcccattttttatgaaggccctgtcgggccctggactcgtccgcatggtcaccgtctgcgctgaatcactaaagactcacctggataggctggaagaagtgacgaatgaatcagggtacgtcgacgttctgacactactccggcgcgtcatgctggataccagcaacaccctctttctgagaattcccctagatgaaagcgccattgtggtgaagatccagggctactttgacgcttggcaggcgctgctgattaaaccagacatattctttaaaatctcatggctttataagaagtatgaaaagtctgtgaaggatctgaaagacgcaatcgaagtgttgattgcagagaaaagaagaaggatcagcacagaggaaaagttggaggagtgtatggacttcgccaccgaactaattcttgcagagaagcggggcgaccttacacgggaaaacgtcaatcagtgcatcttggaaatgctcattgcagcccctgacactatgagtgtcagtctcttctttatgctgttcctgattgccaaacaccctaacgtggaagaagcaataattaaggaaatccagactgtgattggtgagcgcgatattaaaattgatgacattcagaagctgaaggttatggagaattttatttatgaatcaatgagatatcagcctgtcgtggacctggtgatgcgaaaagctctggaggatgacgtcattgatggctatccagtaaagaaaggtaccaacattatcctcaacatcggaagaatgcatcggctggagttctttcctaagcctaacgaatttacactggagaacttcgctaagaatgtcccctaccggtacttccagccttttggatttgggccacggggatgcgccgggaaatacatcgcaatggtgatgatgaaagccatccttgtgactcttctccgtcggttccatgtaaagacactgcagggccagtgcgtggagagcatccagaagatccacgatctgagcctgcaccccgacgagacaaaaaacatgttagagatgatctttacacctcgcaattcagacaggtgcctggagcattag

SEQ ID NO: 221200 - DNA, 1512 bp, Artificial Sequence
  derived and/or modified sequence
atggttctggagatgctcaatccaatacactataacatcacctctatcgtgccagaggccatgccggcagccaccatgccagttctcctactgacaggcctgttcctgctcgtgtggaactacgaaggaacatcctctatccctggccctggatattgtatgggtatcggtcccttaatctcccacggtagattcttgtggatgggcattggttcggcgtgtaattattacaacagagtatatggcgaatttatgcgggtctggattagcggggaggaaactctgattatcagcaaaagcagcagtatgtttcatatcatgaagcacaaccattatagctctcgattcggatctaaacttgggctgcagtgcataggcatgcatgaaaagggcattatattcaataacaaccccgaattgtggaaaactacaaggcccttttttatgaaggccctatcgggccccggactggtaaggatggtaactgtctgtgcagaatcactcaaaacacacctggatcggttggaggaagtgaccaacgagagcggttacgttgacgtcctcacattgctgaggagggtaatgctcgacacaagcaacaccctattcctgcggattcccctggacgaatccgccattgtcgtgaaaatccaggggtatttcgacgcctggcaagcactgctgattaagcccgatatattcttcaagatttcctggctctacaagaagtacgaaaaatctgtgaaagatttaaaagatgcaattgaggtgttgattgctgagaaacggcggcgtatatccaccgaggagaagttagaggaatgtatggactttgccactgagctaatcctggcggaaaaacggggagacctgacccgggagaacgtgaatcagtgcatcctcgagatgctgatcgctgcccctgacacgatgtcagtctccctgtttttcatgctctttctgatagcaaagcatcctaatgtcgaggaggctatcattaaagaaatacagaccgtaattggagagagagatatcaagattgatgacattcagaagttaaaagttatggaaaacttcatctacgagagcatgcgataccaacctgtcgtggacctggtgatgcgaaaggcattagaggatgatgtcatcgatggctatcccgtcaaaaaggggacaaatatcatcctgaacatagggcgcatgcaccgactcgagttctttccaaaacctaacgaatttaccctggagaatttcgcaaagaacgttccctaccgatatttccagccattcggatttggaccaagaggctgcgctggtaagtacattgctatggtcatgatgaaagccatccttgtgacccttctgcgcaggtttcatgtgaagacactgcaggggcagtgcgttgagagtatccagaagattcatgatttgtcgttgcatccagacgagactaagaacatgctggagatgattttcactccccgcaactccgatcgctgtctcgaacattag

SEQ ID NO: 221201 - DNA, 501 bp, Artificial Sequence
  derived and/or modified sequence
atggtcctggagatgttgaatcccattcattacaacattacctctatcgtacccgaagcgatgcctgccgccacgatgcccgtgcttttgctgaccgggctttttctactggtatggaactacgaggggacaagctctatcccagggcctggttactgtatgggaattgggccattgattagtcatggccgattcctgtggatgggtattgggtcagcatgtaactactataatagagtgtatggtgaattcatgagggtctggatttccggcgaggagactttgattatctccaagagtagtagcatgtttcatataatgaagcacaaccactactcctctcgctttgggtccaaattgggactccagtgtatcggtatgcacgaaaaaggcatcatttttaataacaacccagagttgtggaagacaactcggcctttcttcatgaaggcactcagtggaccaggactggtgcggatggtaaccgtgtgtgccgagtag

SEQ ID NO: 221202 - DNA, 657 bp, Artificial Sequence
  derived and/or modified sequence
atggttctggagatgctcaacccaattcattataacatcacaagtatcgtacccgaggccatgcccgcagcgaccatgcctgttttactcctgacgggcttgtttttgctcgtatggaattacgaaggtacctcatcaattccagggccaggttattgtatggggatagggccactgatttctcacggacggtttctttggatgggtattggctccgcctgcaattattataatagggtctacggtgaattcatgagggtgtggatctccggcgaggagaccctgatcatctccaagagctcctcgatgtttcacatcatgaagcacaatcactactcgagtagattcggctcgaaacttgggcttcaatgtattggtatgcatgagaaagggattatcttcaataataaccccgagctgtggaagacaacaagacccttttttatgaaagcgttgtccgggccgggtctggtccggatggttaccgtgtgtgccgagtcactaaagacacatctcgaccgtctggaagaggttaccaatgaaagcggatatgttgatgtgctgacgctcttgagaagagtcatgcttgacactagtaacacactgttcctgcgaattcctctggacggcacagagatcttcactctaacgtcttag

SEQ ID NO: 221203 - DNA, 1080 bp, Artificial Sequence
  derived and/or modified sequence
atggtcctcgagatgttgaaccccatccactacaacatcacttcaattgtgccagaggccatgcccgcagctactatgcctgtgctgctgctgacagggctcttcctgctcgtctggaattatgaaggcacaagtagcatccccgggccggggtattgcatgggcatagggcccctgatatcccatggcagattcctatggatgggaatcgggagcgcctgcaattattataatcgggtgtacggcgagttcatgcgagtatggatttccggggaggaaacacttataatctccaaaagttctagcatgttccacataatgaaacacaatcactatagctccaggtttggtagtaagctgggattgcagtgcattgggatgcacgagaaaggaattatttttaacaataacccagaactttggaaaacaaccaggccattcttcatgaaagctctgtccggtcctggacttgtccggatggtaacagtctgtgcggaaagcctgaagacacatttggatcggctggaggaagtcactaacgaaagcggatacgtagacgtgctgaccttgttacgtagggtgatgctcgacaccagcaacaccctcttccttcgtatccccttggacgaatctgctatcgttgtgaaaattcagggatacttcgatgcctggcaggcgctgctgatcaagccagacatcttttttaagatctcttggctgtataaaaagtacgaaaagagcgttaaggatctcaaggacgccatcgaagtgctgatcgccgaaaaaagaaggcgtatcagcacagaggaaaagttagaagaatgcatggattttgccaccgaactgattttggccgaaaaacgtggggacttgacccgggaaaacgtcaatcaatgcattctagaaatgctcatagctgcccctgatactatgagtgtgagtctcttctttatgctcttcctgattgccaagcaccccaatgttgaggaggccatcatcaaagagattcaaacagtcatcggcgagcgtgatattaaaatagacgacatccagaaactgaagaagcatgatgcaaaatag

SEQ ID NO: 221204 - DNA, 1059 bp, Artificial Sequence
  derived and/or modified sequence
atggtgctagagatgctcaatcccatccactataacataaccagtatcgtgccggaggctatgcccgctgccacaatgcccgttctcctgttgactggcctgttcctgctggtctggaactacgaagggacctcgagtatccctggccccggctactgcatggggataggaccactgatctcacacgggcggtttctctggatgggaatcggttccgcctgtaactattataatagggtgtacggcgagtttatgagagtgtggatctctggcgaagagactctaattatctctaagtcaagctctatgttccatattatgaagcataaccattattccagccggtttggtagcaagctggggctacaatgcataggcatgcatgagaagggcataatctttaacaataatcccgagctgtggaagacaacccgaccatttttcatgaaagccctgtctggcccgggcctggtgagaatggttacggtgtgtgcggagtcgttaaaaacccacctcgatcgtcttgaggaggtcactaatgaatccgggtatgttgacgtgctgaccctgctgcggagggtgatgctggataccagcaataccctgttcctaagaatacccctggatgagagcgccatcgtggtgaaaatccaaggttatttcgatgcatggcaggcgttgctgattaagcccgacatcttcttcaagattagttggctctataagaagtatgagaagtccgtgaaggatctaaaggacgcaattgaggtgctgatagccgaaaagcgtcgtcggatctctaccgaagagaaacttgaggaatgcatggacttcgcaacagagctgatactggcggaaaagcgcggtgatctcacacgcgaaaatgtgaaccagtgtattctagagatgctcatcgcggcccccgatactatgagcgtgagtttgttctttatgttgttcttgatcgccaaacaccccaacgtggaggaggccatcatcaaggaaatacagacggttataggggaaagggatattaagattgacgacatccagaagtag

SEQ ID NO: 221205 - DNA, 729 bp, Artificial Sequence
  derived and/or modified sequence
atggtgcttgagatgcttaatcccatacattataatattacctcgatagtgcctgaggcaatgcccgccgccactatgccagtgttactccttaccgggttgttcttactggtctggaattatgagggcacatccagcatccccggtccagggtattgtatgggaataggcccattgatttctcatggcagatttctttggatgggtattgggagcgcatgtaactattataacagggtctacggggagttcatgcgagtgtggatcagcggtgaagaaactctgataatttcaaagtcctccagtatgtttcacatcatgaagcataatcactactcttctaggtttggctcgaaactggggctgcagtgcatcggaatgcatgaaaaaggcatcatattcaacaataaccccgaattatggaaaaccacacggccattctttatgaaggcactgtcaggtccaggcctggtgaggatggtgaccgtgtgtgcagaaagcctgaagacacacctggaccgacttgaagaggtcaccaatgaaagcgggtatgtggatgtgctgactctcctgagaagagttatgctggacacctctaatactctgttcttacgaatccctctggatgagagtgccatagttgttaagatacagggttactttgacgcctggcaggcactcttgataaagcccgacattttctttaagatctcctggctgtacaaatag

SEQ ID NO: 221206 - DNA, 546 bp, Artificial Sequence
  derived and/or modified sequence
atggtgcttgagatgttaaatccaatccattataatatcacgagtatcgtgcctgaggccatgcccgcagccaccatgccagtgttgctcctgactggcctgtttctgctcgtatggaattacgagggtacgtcatcaatccctggaccggggtactgcatgggcatcggacccctgatttctcacgggcggttcctgtggatgggcattggctcagcctgcaactattataatagggtgtatggggagtttatgagggtgtggatctccggggaagagacgctgatcatttccaaaagctccagtatgtttcatattatgaaacacaatcattattcttcccgattcgggagcaaactggggcttcagtgcatcgggatgcatgaaaaggggatcatcttcaataataatcccgaactttggaagacaactagacccttctttatgaaggctctatcagggcccggactagtgcgtatggtcactgtgtgcgcggagtctttaaagacacatcttctcctgtttactccggcctccgtcaactag

SEQ ID NO: 221207 - DNA, 657 bp, Artificial Sequence
  derived and/or modified sequence
atggtcctggagatgctgaaccccattcattataacattacctccattgttcccgaggccatgcctgctgccaccatgccggtactgttactaacaggactgttcctgctggtctggaattacgagggtacctctagtattccgggacccggatattgcatgggaattgggccactcattagccatgggcggtttctctggatgggcatagggtcggcttgtaattattacaacagagtgtacggggagttcatgcgtgtttggatttcaggagaagagacattaatcatcagcaaatcaagctcaatgttccacatcatgaagcacaaccattatagtagccgatttggaagtaagctgggtcttcagtgcatcggcatgcatgagaagggcataatcttcaataataatcctgagttgtggaagacaacaagaccctttttcatgaaggctctgagtggcccaggattagtgcgcatggtaaccgtatgtgcagagtctctgaagacccacctggatcggttggaagaagtaaccaatgagagtgggtacgttgacgtcctgacactgttgagaagagttatgctggatacctccaacaccctctttctccgcattccacttgacggtaccgagatttttactctgacgtcttag

SEQ ID NO: 221208 - DNA, 1059 bp, Artificial Sequence
  derived and/or modified sequence
atggtcctggaaatgctcaaccctatccactacaacataacctccatcgtgcccgaagccatgcctgccgccacaatgcccgtcttactgctcacaggcctatttctgcttgtgtggaactatgaagggacatcaagtatacctggacccggatattgcatgggtatcggaccactgatctcacatggccgcttcctgtggatgggcataggttctgcttgcaattattacaaccgggtttacggggagttcatgagggtttggatttctggtgaggagacactgataattagtaagtcatcaagtatgtttcatattatgaagcacaaccactacagctctcggtttgggtcaaaactcggtcttcaatgcataggcatgcacgagaaaggtattatttttaataacaatccagaactctggaagaccacccgcccattcttcatgaaagccctgagcggccccggcctggtcaggatggtgactgtctgcgcagagtctctaaaaacccatctggataggctcgaagaagtgacgaacgaatcagggtacgtcgatgtgctgactctgctgaggcgggttatgttagacacatctaatacactgttcctcagaattccattagatgagagcgccattgtggttaagatccagggctattttgacgcctggcaggctctgttgataaagcccgacatcttcttcaagattagttggctttacaaaaagtacgaaaaatccgtgaaggatctgaaggacgctatcgaggttctgatcgctgagaaacgccggcgcatcagtaccgaggaaaaacttgaggagtgcatggacttcgctacagaactgatacttgcagagaaacggggcgacctcacgcgagaaaatgtgaaccagtgtatcttagagatgctaatcgccgcccctgataccatgagcgtgagcctgtttttcatgctttttttaatcgctaagcaccctaatgttgaggaagcaatcatcaaggagattcagacagtgatcggagaaagggacatcaaaatcgatgatattcaaaaatag

SEQ ID NO: 221209 - DNA, 852 bp, Artificial Sequence
  derived and/or modified sequence
atggtcttagaaatgttaaaccccatccattataacattacgtctattgtgccagaggccatgccagctgccacgatgccagtgctgctactgacaggccttttcctgctggtgtggaactacgaaggcacatcttcaatccccggacccggatattgcatgggcattgggccacttataagccacggacggtttctgtggatggggatcggcagcgcgtgtaactactacaatcgcgtttacggggagttcatgcgcgtttggatttccggggaagaaactcttattataagcaaatcgagttctatgttccacatcatgaaacataatcattacagcagtcggtttggcagtaagctgggacttcagtgcatcggaatgcatgagaagggcatcatctttaacaataatcccgagttatggaagactactcgcccttttttcatgaaagcactgagtgggccgggcctggtcaggatggtgactgtctgtgccgaatctctgaagacccacctggaccggttggaagaggtgaccaacgaatccggctacgtcgatgtgctgacactactgaggcgggtcatgttggatacaagtaacactttgtttctgcgcatccccctggacgagtctgcaattgtagtaaagatccagggatacttcgatgcatggcaagcactactaatcaagcccgatattttctttaagatctcatggctctataaaaaatacgagaaaagcgtaaaggatctgaaggatgcaatagaggtactgattgccgaaaaacgacggaggatctccactgaagagaaattagaagaatgcatggattttgccacggagctgatttag

SEQ ID NO: 221210 - DNA, 498 bp, Artificial Sequence
  derived and/or modified sequence
atggtgttggaaatgctgaaccctattcactacaacataaccagcatcgtaccagaggcgatgcctgccgcgactatgcctgtgctgcttctgaccggcttatttctgttggtttggaattacgagggaacttccagcatccccgggcccggctactgcatggggatcgggcccctcatttcgcacggccgttttctgtggatgggcatagggtccgcctgtaactattacaacagagtgtacggtgagtttatgagagtctggatatctggagaagaaacactgataatcagcaaaagttccagtatgttccatattatgaaacataatcactacagcagccgctttgggtccaagcttggcttgcagtgcatagggatgcatgaaaaaggtatcattttcaataataaccctgaactgtggaaaaccacgcggccattttttatgaaggcactttcagggccagggttggtgaggatggtgacagtctgtgcttag

SEQ ID NO: 221211 - DNA, 1512 bp, Artificial Sequence
  derived and/or modified sequence
atggtgctggaaatgctgaaccctattcactacaacatcaccagtatagtcccagaagctatgccagccgccactatgccagttctgctccttacaggtctctttcttttagtttggaactatgagggaacctccagtatccctgggccaggctattgcatgggcattgggcctcttatttcccacggtaggttcctctggatgggaattggttctgcctgtaattattacaaccgtgtatacggcgaattcatgcgagtttggatctcaggcgaggaaactctgattatatctaagtccagctcaatgttccacatcatgaagcacaaccattacagcagcaggttcggaagcaaactcggtctccagtgcatcggaatgcacgaaaaaggaattatttttaataacaacccagagctgtggaagaccacaaggcccttcttcatgaaggcccttagcggtccaggtctggtgcgcatggtaaccgtgtgcgccgagtccctgaagacgcatctcgatagactggaggaagtgacaaatgaaagtggatatgtagatgtgctgactctcctgaggcgggtgatgctcgacacttctaatactttgttcttacggatcccgctggacgagagcgctatcgtagtgaagattcaaggctatttcgatgcgtggcaagccctgttgatcaagccggatatatttttcaagattagctggctgtacaaaaagtacgaaaagagcgtgaaagatctgaaggatgccattgaagttctcatcgccgaaaagaggcggcggattagtaccgaagagaagctggaggaatgtatggacttcgccactgaactgattttggctgagaagcggggggatctgacaagggagaacgtgaatcaatgcatcctggagatgcttattgccgcgcccgataccatgagcgtcagtctcttcttcatgctattcttgatagcaaaacaccccaacgttgaggaagcgatcatcaaagagatacagacggtaatcggggaaagagatattaaaattgacgacatccagaaactgaaggtcatggaaaattttatttatgaatcaatgcgctaccagcccgttgtggatttagtgatgcggaaagccctcgaggatgatgtgattgatggttatccagtcaagaaaggcacgaacattatcttaaacataggaagaatgcacaggcttgagttctttcccaagccgaatgaatttaccctggagaattttgctaagaacgtgccataccgctactttcaaccctttggcttcgggccaaggggctgtgccggcaaatatatagcaatggtgatgatgaaggccatactagtgaccctcttgaggcgtttccacgtgaagacactgcaggggcaatgtgtagagtcaatccagaagatccacgatctatcccttcaccccgatgaaaccaagaacatgcttgaaatgatatttacgccaagaaatagcgatcgctgcctggaacactag

SEQ ID NO: 221212 - DNA, 519 bp, Artificial Sequence
  derived and/or modified sequence
atggtccttgagatgttaaatccaatacattacaacattacttctatcgtgccagaggccatgcctgccgcaaccatgccggttttgctcctcacagggctgttcctgctggtgtggaactacgaaggcacttccagcatacctggccccgggtattgcatggggatcggccctctcatcagtcacggtagatttctgtggatgggcattgggagcgcctgtaactattacaatcgtgtctatggcgagttcatgagagtgtggatatcaggcgaggaaaccctgataatatccaagagctcctcaatgttccacatcatgaagcataatcactactcgagccgtttcggctccaaactgggcctgcaatgcataggcatgcatgaaaaggggattatttttaataacaacccggagctgtggaaaaccactagaccattctttatgaaagctctctcaggaccagggttggtgagaatggtcacagtctgcgctgaatcactcaaaacacacttgtag

SEQ ID NO: 221213 - DNA, 735 bp, Artificial Sequence
  derived and/or modified sequence
atggtgcttgaaatgctgaatcccatacactacaacataaccagcattgtgccggaagcgatgccggcggccacaatgcctgtgctgctgctgaccggcctctttctgttagtgtggaactacgaggggacctcttctattccaggccctggatattgtatgggtattgggcctcttattagccacggtaggttcctgtggatggggataggttccgcctgtaattattataatcgcgtgtacggcgaatttatgagggtttggatatctggcgaagaaactctgattatttctaaatcctcaagcatgttccacattatgaagcacaaccattattctagcaggttcggctctaaactggggctgcaatgcattggtatgcacgagaaaggaattatctttaataataatcccgagctttggaaaacaacacgccccttcttcatgaaggagagcgccatcgtagtaaaaattcagggatattttgacgcctggcaggctcttcttatcaaaccagacattttttttaaaatctcctggctttacaagaagtacgaaaagtccgtgaaggacctgaaggacgcaatcgaagtgctgatagctgagaaaaggagaaggatatccacggaagagaagctcgaggagtgcatggattttgcgactgaactgatcttagctgagaagcgtggtgacttgaccagggagaatgtcaaccaatgtatcctcgaaatgtag

SEQ ID NO: 221214 - DNA, 1512 bp, Artificial Sequence
  derived and/or modified sequence
atggtgctggagatgctgaaccccatccactacaacatcaccagcatcgtgcctgaggccatgcctgctgccaccatgcctgtgctgctgctgaccggcctcttcctgctggtgtggaactatgagggcaccagcagcatccctggccctggctactgcatgggcatcggccccctcatcagccacggccgcttcctgtggatgggcatcggcagcgcctgcaactactacaacagagtgtatggagagttcatgagggtgtggatcagcggggaggagaccctcatcatcagcaagagcagctccatgttccacatcatgaagcacaaccactacagcagccgcttcggcagcaagctgggcctgcagtgcatcggcatgcatgagaagggcatcatcttcaacaacaaccctgagctgtggaagaccacccggcccttcttcatgaaggccctgagcggccctggcctggtgaggatggtgacagtgtgtgccgagagcctgaagacccacctggaccggctggaggaggtgaccaatgaaagtggctacgtggatgtgctgaccctgctgcggcgggtgatgctggacaccagcaacaccctcttcctgcgcatccccctggatgaaagtgccatcgtggtgaagatccagggctactttgatgcctggcaggccctgctgatcaagccagacatcttcttcaagatctcctggctgtacaagaagtatgagaagtctgtgaaggacctgaaggatgccatcgaggtgctgattgctgagaagagaagacgcatcagcacagaggagaagctggaggagtgcatggactttgccacagagctgatcctggccgagaagagaggagacctgacccgggagaatgtgaaccagtgcatcctggagatgctgattgctgccccagacaccatgtctgtgtccctcttcttcatgctgttcctgattgccaagcaccccaacgtggaggaggccatcatcaaggagatccagaccgtcatcggggagcgggacatcaagattgatgacatccagaagctgaaggtgatggagaacttcatctatgaatccatgagataccagcctgtggtggacctggtgatgaggaaggccctggaggatgatgtgattgatggctaccctgtgaagaagggcaccaacatcatcctgaacatcggccgcatgcaccggctggagttcttccccaagcccaatgagttcaccctggagaactttgccaagaatgtgccctaccgctacttccagcccttcggcttcggcccccggggctgtgccggcaagtacatcgccatggtgatgatgaaggccatcctggtgaccctgctgcggcgcttccacgtgaagaccctgcagggccagtgtgtggagagcatccagaagatccatgacctgagcctgcacccagatgagaccaagaacatgctggagatgatcttcaccccaagaaacagcgaccgctgcctggagcactag

SEQ ID NO: 221215 - DNA, 501 bp, Artificial Sequence
  derived and/or modified sequence
atggtgctggagatgctgaaccccatccactacaacatcaccagcatcgtgcctgaggccatgcctgctgccaccatgcctgtgctgctgctgaccggcctcttcctgctggtgtggaactatgagggcaccagcagcatccctggccctggctactgcatgggcatcggccccctcatcagccacggccgcttcctgtggatgggcatcggcagcgcctgcaactactacaacagagtgtatggagagttcatgagggtgtggatcagcggggaggagaccctcatcatcagcaagagcagctccatgttccacatcatgaagcacaaccactacagcagccgcttcggcagcaagctgggcctgcagtgcatcggcatgcatgagaagggcatcatcttcaacaacaaccctgagctgtggaagaccacccggcccttcttcatgaaggccctgagcggccctggcctggtgaggatggtgacagtgtgtgccgagtag

SEQ ID NO: 221216 - DNA, 657 bp, Artificial Sequence
  derived and/or modified sequence
atggtgctggagatgctgaaccccatccactacaacatcaccagcatcgtgcctgaggccatgcctgctgccaccatgcctgtgctgctgctgaccggcctcttcctgctggtgtggaactatgagggcaccagcagcatccctggccctggctactgcatgggcatcggccccctcatcagccacggccgcttcctgtggatgggcatcggcagcgcctgcaactactacaacagagtgtatggagagttcatgagggtgtggatcagcggggaggagaccctcatcatcagcaagagcagctccatgttccacatcatgaagcacaaccactacagcagccgcttcggcagcaagctgggcctgcagtgcatcggcatgcatgagaagggcatcatcttcaacaacaaccctgagctgtggaagaccacccggcccttcttcatgaaggccctgagcggccctggcctggtgaggatggtgacagtgtgtgccgagagcctgaagacccacctggaccggctggaggaggtgaccaatgaaagtggctacgtggatgtgctgaccctgctgcggcgggtgatgctggacaccagcaacaccctcttcctgcgcatccccctggatggaacagagatcttcaccctgaccagctag

SEQ ID NO: 221217 - DNA, 1080 bp, Artificial Sequence
  derived and/or modified sequence
atggtgctggagatgctgaaccccatccactacaacatcaccagcatcgtgcctgaggccatgcctgctgccaccatgcctgtgctgctgctgaccggcctcttcctgctggtgtggaactatgagggcaccagcagcatccctggccctggctactgcatgggcatcggccccctcatcagccacggccgcttcctgtggatgggcatcggcagcgcctgcaactactacaacagagtgtatggagagttcatgagggtgtggatcagcggggaggagaccctcatcatcagcaagagcagctccatgttccacatcatgaagcacaaccactacagcagccgcttcggcagcaagctgggcctgcagtgcatcggcatgcatgagaagggcatcatcttcaacaacaaccctgagctgtggaagaccacccggcccttcttcatgaaggccctgagcggccctggcctggtgaggatggtgacagtgtgtgccgagagcctgaagacccacctggaccggctggaggaggtgaccaatgaaagtggctacgtggatgtgctgaccctgctgcggcgggtgatgctggacaccagcaacaccctcttcctgcgcatccccctggatgaaagtgccatcgtggtgaagatccagggctactttgatgcctggcaggccctgctgatcaagccagacatcttcttcaagatctcctggctgtacaagaagtatgagaagtctgtgaaggacctgaaggatgccatcgaggtgctgattgctgagaagagaagacgcatcagcacagaggagaagctggaggagtgcatggactttgccacagagctgatcctggccgagaagagaggagacctgacccgggagaatgtgaaccagtgcatcctggagatgctgattgctgccccagacaccatgtctgtgtccctcttcttcatgctgttcctgattgccaagcaccccaacgtggaggaggccatcatcaaggagatccagaccgtcatcggggagcgggacatcaagattgatgacatccagaagctgaagaagcatgatgccaagtag

SEQ ID NO: 221218 - DNA, 1059 bp, Artificial Sequence
  derived and/or modified sequence
atggtgctggagatgctgaaccccatccactacaacatcaccagcatcgtgcctgaggccatgcctgctgccaccatgcctgtgctgctgctgaccggcctcttcctgctggtgtggaactatgagggcaccagcagcatccctggccctggctactgcatgggcatcggccccctcatcagccacggccgcttcctgtggatgggcatcggcagcgcctgcaactactacaacagagtgtatggagagttcatgagggtgtggatcagcggggaggagaccctcatcatcagcaagagcagctccatgttccacatcatgaagcacaaccactacagcagccgcttcggcagcaagctgggcctgcagtgcatcggcatgcatgagaagggcatcatcttcaacaacaaccctgagctgtggaagaccacccggcccttcttcatgaaggccctgagcggccctggcctggtgaggatggtgacagtgtgtgccgagagcctgaagacccacctggaccggctggaggaggtgaccaatgaaagtggctacgtggatgtgctgaccctgctgcggcgggtgatgctggacaccagcaacaccctcttcctgcgcatccccctggatgaaagtgccatcgtggtgaagatccagggctactttgatgcctggcaggccctgctgatcaagccagacatcttcttcaagatctcctggctgtacaagaagtatgagaagtctgtgaaggacctgaaggatgccatcgaggtgctgattgctgagaagagaagacgcatcagcacagaggagaagctggaggagtgcatggactttgccacagagctgatcctggccgagaagagaggagacctgacccgggagaatgtgaaccagtgcatcctggagatgctgattgctgccccagacaccatgtctgtgtccctcttcttcatgctgttcctgattgccaagcaccccaacgtggaggaggccatcatcaaggagatccagaccgtcatcggggagcgggacatcaagattgatgacatccagaagtag

SEQ ID NO: 221219 - DNA, 729 bp, Artificial Sequence
  derived and/or modified sequence
atggtgctggagatgctgaaccccatccactacaacatcaccagcatcgtgcctgaggccatgcctgctgccaccatgcctgtgctgctgctgaccggcctcttcctgctggtgtggaactatgagggcaccagcagcatccctggccctggctactgcatgggcatcggccccctcatcagccacggccgcttcctgtggatgggcatcggcagcgcctgcaactactacaacagagtgtatggagagttcatgagggtgtggatcagcggggaggagaccctcatcatcagcaagagcagctccatgttccacatcatgaagcacaaccactacagcagccgcttcggcagcaagctgggcctgcagtgcatcggcatgcatgagaagggcatcatcttcaacaacaaccctgagctgtggaagaccacccggcccttcttcatgaaggccctgagcggccctggcctggtgaggatggtgacagtgtgtgccgagagcctgaagacccacctggaccggctggaggaggtgaccaatgaaagtggctacgtggatgtgctgaccctgctgcggcgggtgatgctggacaccagcaacaccctcttcctgcgcatccccctggatgaaagtgccatcgtggtgaagatccagggctactttgatgcctggcaggccctgctgatcaagccagacatcttcttcaagatctcctggctgtacaagtag

SEQ ID NO: 221220 - DNA, 546 bp, Artificial Sequence
  derived and/or modified sequence
atggtgctggagatgctgaaccccatccactacaacatcaccagcatcgtgcctgaggccatgcctgctgccaccatgcctgtgctgctgctgaccggcctcttcctgctggtgtggaactatgagggcaccagcagcatccctggccctggctactgcatgggcatcggccccctcatcagccacggccgcttcctgtggatgggcatcggcagcgcctgcaactactacaacagagtgtatggagagttcatgagggtgtggatcagcggggaggagaccctcatcatcagcaagagcagctccatgttccacatcatgaagcacaaccactacagcagccgcttcggcagcaagctgggcctgcagtgcatcggcatgcatgagaagggcatcatcttcaacaacaaccctgagctgtggaagaccacccggcccttcttcatgaaggccctgagcggccctggcctggtgaggatggtgacagtgtgtgccgagagcctgaagacccacctgctgctcttcaccccagcctctgtgaactag

SEQ ID NO: 221221 - DNA, 852 bp, Artificial Sequence
  derived and/or modified sequence
atggtgctggagatgctgaaccccatccactacaacatcaccagcatcgtgcctgaggccatgcctgctgccaccatgcctgtgctgctgctgaccggcctcttcctgctggtgtggaactatgagggcaccagcagcatccctggccctggctactgcatgggcatcggccccctcatcagccacggccgcttcctgtggatgggcatcggcagcgcctgcaactactacaacagagtgtatggagagttcatgagggtgtggatcagcggggaggagaccctcatcatcagcaagagcagctccatgttccacatcatgaagcacaaccactacagcagccgcttcggcagcaagctgggcctgcagtgcatcggcatgcatgagaagggcatcatcttcaacaacaaccctgagctgtggaagaccacccggcccttcttcatgaaggccctgagcggccctggcctggtgaggatggtgacagtgtgtgccgagagcctgaagacccacctggaccggctggaggaggtgaccaatgaaagtggctacgtggatgtgctgaccctgctgcggcgggtgatgctggacaccagcaacaccctcttcctgcgcatccccctggatgaaagtgccatcgtggtgaagatccagggctactttgatgcctggcaggccctgctgatcaagccagacatcttcttcaagatctcctggctgtacaagaagtatgagaagtctgtgaaggacctgaaggatgccatcgaggtgctgattgctgagaagagaagacgcatcagcacagaggagaagctggaggagtgcatggactttgccacagagctgatctag

SEQ ID NO: 221222 - DNA, 498 bp, Artificial Sequence
  derived and/or modified sequence
atggtgctggagatgctgaaccccatccactacaacatcaccagcatcgtgcctgaggccatgcctgctgccaccatgcctgtgctgctgctgaccggcctcttcctgctggtgtggaactatgagggcaccagcagcatccctggccctggctactgcatgggcatcggccccctcatcagccacggccgcttcctgtggatgggcatcggcagcgcctgcaactactacaacagagtgtatggagagttcatgagggtgtggatcagcggggaggagaccctcatcatcagcaagagcagctccatgttccacatcatgaagcacaaccactacagcagccgcttcggcagcaagctgggcctgcagtgcatcggcatgcatgagaagggcatcatcttcaacaacaaccctgagctgtggaagaccacccggcccttcttcatgaaggccctgagcggccctggcctggtgaggatggtgacagtgtgtgcctag

SEQ ID NO: 221223 - DNA, 519 bp, Artificial Sequence
  derived and/or modified sequence
atggtgctggagatgctgaaccccatccactacaacatcaccagcatcgtgcctgaggccatgcctgctgccaccatgcctgtgctgctgctgaccggcctcttcctgctggtgtggaactatgagggcaccagcagcatccctggccctggctactgcatgggcatcggccccctcatcagccacggccgcttcctgtggatgggcatcggcagcgcctgcaactactacaacagagtgtatggagagttcatgagggtgtggatcagcggggaggagaccctcatcatcagcaagagcagctccatgttccacatcatgaagcacaaccactacagcagccgcttcggcagcaagctgggcctgcagtgcatcggcatgcatgagaagggcatcatcttcaacaacaaccctgagctgtggaagaccacccggcccttcttcatgaaggccctgagcggccctggcctggtgaggatggtgacagtgtgtgccgagagcctgaagacccacctgtag

SEQ ID NO: 221224 - DNA, 735 bp, Artificial Sequence
  derived and/or modified sequence
atggtgctggagatgctgaaccccatccactacaacatcaccagcatcgtgcctgaggccatgcctgctgccaccatgcctgtgctgctgctgaccggcctcttcctgctggtgtggaactatgagggcaccagcagcatccctggccctggctactgcatgggcatcggccccctcatcagccacggccgcttcctgtggatgggcatcggcagcgcctgcaactactacaacagagtgtatggagagttcatgagggtgtggatcagcggggaggagaccctcatcatcagcaagagcagctccatgttccacatcatgaagcacaaccactacagcagccgcttcggcagcaagctgggcctgcagtgcatcggcatgcatgagaagggcatcatcttcaacaacaaccctgagctgtggaagaccacccggcccttcttcatgaaggagagcgccatcgtggtgaagatccagggctactttgatgcctggcaggccctgctgatcaagccagacatcttcttcaagatctcctggctgtacaagaagtatgagaagtctgtgaaggacctgaaggatgccatcgaggtgctgattgctgagaagagaagacgcatcagcacagaggagaagctggaggagtgcatggactttgccacagagctgatcctggccgagaagagaggagacctgaccagagaaaatgtgaaccagtgcatcctggagatgtag

SEQ ID NO: 221225 - DNA, 1512 bp, Artificial Sequence
  derived and/or modified sequence
atggtgctggagatgctgaaccccatccactacaacatcaccagcattgtgccagaggcaatgcctgcagctactatgccagtactgctgctcaccggcctgttcctgctggtctggaactacgaaggcactagttccatccctgggccagggtactgcatgggtatcggccccctgatcagccacgggaggttcctctggatgggcatagggtccgcatgtaactattataatcgcgtctacggcgagttcatgagagtctggatcagcggggaagagactctaataatcagcaaatcttcttcaatgtttcacattatgaaacacaaccattatagtagcagattcggcagtaaactgggcctgcaatgtatcgggatgcatgagaagggaataatctttaacaataacccagagctctggaaaaccaccaggcccttctttatgaaggcactttccgggccaggattggtaaggatggttacagtttgtgctgaatcacttaagacacatctcgacaggctggaggaggtgaccaacgagagcggatatgtggatgtgctgacactacttcggcgcgttatgctagacacatcaaacactctgtttctgcgaatccccctggacgagtccgccatcgttgtcaaaattcagggctattttgacgcctggcaagcactgcttatcaaacccgatattttctttaagatctcctggctttacaagaagtacgagaaatctgtgaaggaccttaaggatgccatcgaagttcttattgctgagaaaagacgaagaatctctaccgaagagaaactggaggagtgcatggatttcgctaccgagttaattttagccgaaaaacgtggagatctaacacgggagaacgtcaaccagtgcatcttagaaatgcttatagccgctcccgatacgatgagcgtctccttattttttatgctcttcctgatcgcaaaacaccctaacgttgaggaagccattattaaagagattcagacggtgatcggagaacgcgacatcaagatcgatgacatacagaagctgaaggttatggagaatttcatctatgagagtatgcggtatcagcccgtggttgatctcgtaatgcgtaaagcactggaagacgacgttatcgacggctatccagttaaaaaaggcacgaatatcatcctgaacatcggacgtatgcacagactcgagtttttccccaagcctaacgagtttacgttggagaattttgctaagaatgtgccctacagatatttccagccctttgggttcggaccccgtggatgcgcaggtaagtatatcgcaatggttatgatgaaagctatccttgtaacactgttgagacgctttcacgtgaaaactcttcaggggcaatgcgttgagtctatccaaaaaatccacgacctatctttgcatcccgacgagaccaagaacatgctcgagatgatatttacccctcgcaattcagaccgctgtttagagcactag

SEQ ID NO: 221226 - DNA, 1512 bp, Artificial Sequence
  derived and/or modified sequence
atggtgctggagatgctgaaccccatccactacaacatcaccagcattgtgcctgaggctatgccagctgcgacgatgcccgttctgctactcaccggcctgtttctgctcgtgtggaactatgagggcaccagctcgatccccggacccggctattgcatggggattggacccttgatatcccatggaagatttctctggatggggatcggctctgcctgcaactattacaacagagtgtacggggagttcatgagggtctggataagcggggaagaaacactgattatttcaaaatcttctagcatgtttcatattatgaagcacaatcactatagctcacgtttcggaagcaagcttggattgcaatgcattggaatgcacgagaaaggtattatttttaacaacaatcctgagctgtggaagactacaaggcccttctttatgaaggccctttccgggcccggactcgtacgcatggtgacggtctgtgccgaatcgttaaagactcatctggaccggctagaagaagtcacaaatgaaagcggctatgtcgacgttcttactctactccgacgggtgatgctcgacacaagtaacactctgtttctgcgcattcccctggatgaatccgccattgtagtcaagatccaaggttacttcgatgcttggcaggctctcttgattaaaccagatattttctttaagatcagctggctgtacaagaagtacgaaaaatccgtgaaagatctcaaggacgcgatcgaggtgctgatagccgagaagcgccgtaggatatcaaccgaggagaagcttgaggagtgtatggacttcgctacagagctaatcttagccgagaagagaggggatctgactcgagaaaatgtaaaccaatgcatactggagatgttaatagcggctcccgataccatgtcggtctccctgtttttcatgcttttccttattgccaaacaccccaacgtcgaggaggctattataaaggagattcagactgtgattggtgagcgtgatataaaaattgacgatatccagaagttgaaggtaatggaaaattttatctatgaatcgatgcggtaccaaccggtcgtggatctagtcatgagaaaggcactggaggacgatgtaatcgacggctaccccgtaaagaaaggtaccaatatcattcttaacataggtcgtatgcatcgactggagttcttcccaaagccgaacgagttcacactggaaaatttcgctaagaatgtgccataccgttattttcaaccgttcgggtttggtccgcgcggatgcgctggtaagtatatcgcgatggtgatgatgaaggccatcctcgttacgctgttgagacggttccatgtgaaaaccctgcaggggcagtgcgtggagtccatccagaaaatccatgatctgtctcttcaccccgacgagactaagaacatgcttgagatgattttcactccccgtaattcggatcgctgcctggagcactag

SEQ ID NO: 221227 - DNA, 1512 bp, Artificial Sequence
  derived and/or modified sequence
atggtgctggagatgctgaaccccatccactacaacatcaccagcatcgtgccggaggcaatgccggcggccactatgcccgttttgctgctcaccggactatttctgctggtctggaactacgagggcaccagttccatacccggtcctggatattgcatgggaattggacctcttattagccacggccgcttcctctggatgggaatcggcagcgcgtgtaattactacaaccgggtctacggcgagttcatgagggtgtggattagcggcgaagagacactgatcatatctaagagctccagcatgtttcatatcatgaagcacaaccattatagctctaggttcggttctaaattggggcttcagtgcatcggaatgcacgaaaagggtattattttcaacaataacccagagctgtggaagacgacccggccttttttcatgaaagctctcagcggacctgggcttgttcggatggtgacggtctgtgccgaatccctgaagacgcatctggaccgcctggaagaggtaactaacgagagtggttatgtggatgtgctcaccctactgaggagagttatgctagacacctccaatactctatttctgcgtatccctttggacgagagcgcaattgtagtgaaaatccaaggctactttgacgcatggcaggccctgctcatcaagccagatatcttctttaaaatctcgtggttgtacaagaagtacgagaagagtgtaaaggacctcaaagatgccattgaggtgctgattgctgagaaacgtaggcggatctccactgaggagaagctggaggaatgcatggattttgcaactgagctgatcctggccgagaagcgcggagacttgactcgcgagaatgtcaatcagtgtatcctggaaatgctgattgctgcccctgacacgatgtctgtgagcctgttttttatgctttttctgatcgctaagcacccgaacgtcgaggaggccattatcaaagaaattcagactgtaattggcgaacgtgatataaagatcgatgatatccaaaaactcaaagtgatggaaaacttcatctacgagtccatgagataccaacctgtcgttgatctggtcatgcggaaggctctggaggacgatgtgatcgatgggtaccccgtgaagaagggaaccaatataattttaaacataggcaggatgcaccgtctggaatttttcccaaaacctaacgaatttacactggagaatttcgcaaaaaacgtgccatacaggtattttcagcccttcggatttggccctagaggatgcgcaggcaagtatattgcaatggttatgatgaaggctattttagtgaccctcctgcggagatttcacgtcaagactcttcaggggcagtgcgtcgaaagcatccagaaaatccacgacctcagtctgcatccggacgagacgaaaaatatgttggagatgatctttaccccacggaattcggatcgctgtcttgaacactag

SEQ ID NO: 221228 - DNA, 501 bp, Artificial Sequence
  derived and/or modified sequence
atggtgctggagatgctgaaccccatccactacaacatcaccagcatcgtgccggaagcaatgccagccgcaacgatgcctgttttattgcttactggactgttcctgctggtctggaactatgaagggacgtctagcatcccaggacctggttactgtatgggcatagggcctcttatcagtcacggacgcttcctctggatgggaatcggaagcgcttgtaactactacaatagggtgtacggtgaatttatgcgggtgtggatctctggggaggaaacactaattatcagtaagtcgtcaagtatgtttcacataatgaaacacaatcattattctagcagattcgggagcaaactgggtctacagtgtatagggatgcatgaaaaaggcatcatatttaataacaatcccgagctctggaagacaacaagaccgttctttatgaaagctctgagcggtcccggcttggtgcgaatggtgaccgtgtgcgcagagtag

SEQ ID NO: 221229 - DNA, 657 bp, Artificial Sequence
  derived and/or modified sequence
atggtgctggagatgctgaaccccatccactacaacatcaccagcatagtgcccgaggcgatgcccgctgcgacaatgccagttctgctcctaacaggcctcttcctgctagtgtggaattacgaagggacgagcagtatcccaggacctggctattgtatggggatcgggccactgatttctcacggccggttcctttggatggggattggctcagcttgcaactattacaatagggtttacggggagtttatgcgcgtctggatctccggcgaagaaactctcataatcagcaagagcagtagcatgtttcacatcatgaagcacaaccactattcctctagattcggctcgaaactcggtctccagtgcattgggatgcacgaaaaaggaatcatctttaacaataaccctgaactctggaagacgacaaggccctttttcatgaaagccctgagcgggccaggtttggtcagaatggtcacagtctgcgccgagagcttgaagacgcacctggatcggctcgaggaagtgactaatgaatccgggtatgtggatgtgctgacattgttacgcagggttatgctcgacacatccaacaccttatttctaaggattcccctggatggaaccgagatcttcacattgacaagttag

SEQ ID NO: 221230 - DNA, 1080 bp, Artificial Sequence
  derived and/or modified sequence
atggtgctggagatgctgaaccccatccactacaacatcaccagcatcgtgcccgaagcaatgcctgctgcaactatgcccgttttgttactgaccggtctgtttctgctggtgtggaactacgagggcacttcttctataccaggccccggttactgcatgggtataggccccctgattagtcacgggcgattcctgtggatgggcatcgggtccgcatgcaactattacaacagggtttatggagaattcatgcgcgtgtggatctccggtgaggagacgctgattattagcaaatcttcctccatgttccacatcatgaagcacaatcattattcttctcgattcggttctaaactgggactccagtgtatcgggatgcacgagaagggaatcatttttaacaataatccagagctgtggaaaacaacccgcccctttttcatgaaggccctttctggccccggattggtgaggatggtgactgtctgcgccgagtctctgaaaacccacttggacaggctggaagaggtaactaatgagtctggttatgtagatgtcctgacactgctgagaagggtcatgctggacaccagcaataccctgttcctccgcatcccgctcgatgagagcgctatagtcgtgaagatccagggttactttgatgcctggcaagctttgctgatcaaaccagatattttcttcaagatcagctggctgtacaagaaatacgagaagtccgtcaaggatctgaaagacgccattgaggtcctgatagctgagaagagaagacgcatctctaccgaagaaaaactcgaggaatgcatggattttgcgactgaactaatattggcagagaagagaggggatcttacacgggagaacgtgaaccaatgcattttggagatgcttatcgctgcaccagatactatgagcgtatccctgttctttatgttattcctaatcgccaagcaccccaatgttgaggaagctatcatcaaggagatccagaccgtgattggtgagagggacattaagatcgacgatatacaaaaactgaaaaagcatgacgctaagtag

SEQ ID NO: 221231 - DNA, 1059 bp, Artificial Sequence
  derived and/or modified sequence
atggtgctggagatgctgaaccccatccactacaacatcaccagcatcgtgcccgaggccatgccagctgctaccatgcccgtgctcctgctgacagggctatttcttctggtgtggaactacgagggcacatcttcaatccctggccccggctattgcatgggaattggccctctcatcagtcacggacggttcctatggatgggcatcggcagcgcctgtaattactacaatagggtgtacggagagtttatgcgggtgtggatcagcggcgaagaaacattgattatctccaaaagcagctccatgttccacatcatgaagcacaaccattattcctctcgtttcggctctaaactgggactgcagtgtatcggcatgcatgaaaagggtatcatctttaacaacaatcccgagctgtggaagactacacgccctttcttcatgaaagccctctcaggaccagggttagtgagaatggtgactgtgtgcgcggagtcgctaaagactcacctcgaccgcctcgaagaggtgacaaatgagagcggctatgttgacgtactgaccctcctgaggagggtgatgctggacacatctaacacactttttttgagaatacctctcgatgagtccgccattgtggttaaaatccaggggtattttgacgcctggcaggcactattaattaaacctgacattttcttcaagataagctggctgtataagaaatatgagaaatcggtcaaagatttgaaagatgcaatagaagtgcttatcgctgagaagcgcagaagaatctcaactgaggagaagttggaagaatgtatggatttcgcaactgaattgatcctggcagagaaacgtggggacctcacccgggagaatgtcaatcagtgcattctcgagatgctcatagctgctccggacacgatgtcagtatccctctttttcatgctgttcctcattgccaagcaccctaatgtggaggaagctattatcaaggagatccagactgtcatcggggaaagggacatcaagattgatgacatccagaaatag

SEQ ID NO: 221232 - DNA, 729 bp, Artificial Sequence
  derived and/or modified sequence
atggtgctggagatgctgaaccccatccactacaacatcaccagcatcgtacccgaggccatgccagccgcgacaatgccagtcctgctgctgaccggactgttcctgctagtctggaactatgagggcacaagttccatccccgggcccggttactgcatgggaatcggacccctgatctcccacggccgattcttgtggatgggtatcgggagcgcatgcaactattacaatcgggtctacggggagttcatgcgcgtttggataagtggagaggagacacttatcatttccaagagctccagcatgttccatatcatgaagcacaatcattactcaagcaggtttggctccaaactggggctccagtgcatcggcatgcatgagaaggggatcatttttaacaataatcccgagttatggaaaactacaaggccattctttatgaaggccctgagtggcccaggcctggtgcggatggtgaccgtatgtgcagagtccctgaaaacacacctggatagactggaagaagtgacgaatgaaagcggatacgtggatgtccttaccttactgcgtagggtgatgctcgatacttctaatactctgttcctgagaatcccattggacgagagtgccattgtggtcaagatccagggttacttcgacgcctggcaagctttgctgatcaaacctgacatcttctttaagataagttggctctataaatag

SEQ ID NO: 221233 - DNA, 546 bp, Artificial Sequence
  derived and/or modified sequence
atggtgctggagatgctgaaccccatccactacaacatcaccagcattgttcctgaggctatgccggcagcgaccatgcccgtgcttcttctgacggggctgttcctcttggtctggaattacgagggcacatcttctataccaggcccgggctattgcatgggaattggccccctaatttcccacggccgtttcctatggatggggattggctctgcctgtaattactacaacagggtgtatggagagtttatgagagtgtggatctcgggggaggagaccctgattattagcaagtcttctagcatgttccatataatgaaacataaccactacagttcccggttcggaagtaaactggggttgcaatgcatcggcatgcacgaaaagggtattatcttcaataacaaccccgagctgtggaagaccaccagaccctttttcatgaaggcactgtcaggccctggattggtacggatggtcaccgtttgcgcggaatctcttaagacccatcttctgttgtttacgcccgcttccgtgaactag

SEQ ID NO: 221234 - DNA, 657 bp, Artificial Sequence
  derived and/or modified sequence
atggtgctggagatgctgaaccccatccactacaacatcaccagcatcgttccagaagcaatgccagccgccacaatgcccgtgctgcttctcacaggactgtttctgctggtgtggaactacgaggggacttcctccattccaggccctggctattgcatgggcataggacctctgattagccatgggagattcctgtggatgggtattgggtctgcctgtaactactataatcgagtctacggtgaatttatgcgcgtgtggatctcgggggaggaaacgctgatcatatctaagtctagctccatgtttcacatcatgaagcacaatcactatagctcccgcttcggaagcaaactcggtctccagtgtatcggaatgcatgagaaggggatcatctttaacaacaaccctgagctgtggaaaaccacacgcccgtttttcatgaaggcactaagtggtcctgggcttgtaagaatggttaccgtgtgtgcggagagcctgaagactcatttagaccgactggaggaagtcactaatgagtcaggctacgtggacgtgctcactctgctacgacgtgttatgctcgatactagcaacactctgttcctgcgcattcccttagacggcacagaaatattcaccttgactagctag

SEQ ID NO: 221235 - DNA, 1059 bp, Artificial Sequence
  derived and/or modified sequence
atggtgctggagatgctgaaccccatccactacaacatcaccagcatcgtcccagaagctatgcccgccgcaaccatgccggtgctcttgttgactggactgttcctgttggtctggaattatgagggcaccagcagcatccccggacctggctactgcatggggatcggccctttaatcagtcatggacgctttctctggatgggaataggcagcgcctgtaattactacaaccgggtttatggagaattcatgcgcgtgtggatttcgggagaggagacgctcattatttctaaatcgagcagcatgttccacatcatgaaacataatcactactcatctcgatttggctcaaagctcggacttcagtgcatagggatgcacgagaaaggcatcattttcaataataatcctgagctgtggaagaccactcggccgttcttcatgaaggcactgagcggccctgggttggtgcggatggttaccgtgtgtgccgagtccctgaaaacccacctggaccgcctggaagaggtgaccaacgagtccgggtacgtcgacgtcctgacattactccgcagagtgatgctcgacacctcaaataccctattcctccgcattccactggacgaatccgccatagttgtcaagattcaagggtatttcgacgcctggcaagccctcttgatcaagccagatatattttttaagatatcctggctatacaaaaaatatgaaaaaagcgtgaaggacctcaaagacgcaattgaagtgctcatcgctgagaagaggcggcggatcagcaccgaggagaagttggaagagtgtatggactttgccactgaactcatactggcggaaaaacgaggcgatcttactagagaaaatgttaaccagtgtattctcgaaatgttaattgcagcccccgatacaatgtctgtctccctgttctttatgctctttctcattgcaaagcatccgaacgtcgaagaagccattatcaaggagatccaaactgtcatcggagagcgagatatcaagatcgacgatattcagaagtag

SEQ ID NO: 221236 - DNA, 852 bp, Artificial Sequence
  derived and/or modified sequence
atggtgctggagatgctgaaccccatccactacaacatcaccagcatagtgccggaggccatgcctgccgctacaatgcccgttctgctgctcactggtctcttcctgctggtgtggaattacgaaggcacgagttcaatccctgggccaggttactgtatgggaattgggcctctaatctcccacggcaggtttctctggatgggtatcgggtcagcctgtaattactataacagggtctacggggaatttatgcgtgtgtggattagcggtgaggaaactctcatcattagtaagagttcctccatgttccatataatgaagcacaaccattatagctcacgatttgggagcaagctaggacttcaatgcattgggatgcacgaaaagggcattatttttaataacaatcccgaattatggaagacaacgagaccattttttatgaaggctttgtcaggccctggcctggtccgcatggttaccgtgtgcgcagaatctcttaaaacacaccttgatcggctggaagaagtgacaaacgaatcggggtatgtggacgtgttgaccttgttgagacgggtgatgctcgataccagcaacacactattcttgagaataccactcgacgagtctgctatcgtggttaaaatccaaggctattttgacgcatggcaagccctcctcattaaaccggatatcttctttaagatttcgtggctctataagaagtacgaaaaaagcgtgaaagatctcaaggacgctatcgaagtgctgatcgcagaaaagcgcaggcgaatatccaccgaagagaaattagaggagtgcatggactttgctaccgaacttatctag

SEQ ID NO: 221237 - DNA, 498 bp, Artificial Sequence
  derived and/or modified sequence
atggtgctggagatgctgaaccccatccactacaacatcaccagcattgtgccagaagccatgcctgccgctaccatgcccgtgctgctactgaccggcctttttcttctcgtttggaactacgaagggacatctagtattcctggaccggggtactgtatgggcattgggccactgatatctcacggccggtttttatggatggggattggcagcgcatgcaattactataacagggtgtatggagagttcatgagagtttggatttctggcgaggagaccctgatcatctccaagagttcttccatgtttcacatcatgaagcataaccactacagttcaagattcggttctaagttaggtttacagtgcatcgggatgcacgaaaagggaatcattttcaacaataaccccgagttatggaagacaacccgtccgtttttcatgaaggcactgtcagggcctggcctggtgagaatggtgaccgtttgcgcctag

SEQ ID NO: 221238 - DNA, 1512 bp, Artificial Sequence
  derived and/or modified sequence
atggtgctggagatgctgaaccccatccactacaacatcaccagcattgtgcccgaggccatgccggcagctacaatgcctgtgctgctcctcacaggtcttttcctgctggtttggaactacgaggggacctctagcatacctggtcctggttactgtatggggataggacccctcatctcccatgggcggttcctctggatggggattggatccgcttgtaattactataatcgggtgtacggcgagttcatgagggtgtggatctccggagaggagacactgatcatctctaagtcatccagtatgtttcatattatgaagcacaatcattacagtagccgattcggcagtaagctgggcctgcagtgtatcgggatgcatgaaaaggggatcatcttcaacaataatcccgagctttggaagacaactcgtcccttttttatgaaagccttgagcggaccaggattggtccgcatggttaccgtgtgtgcggaatccttaaaaactcacctggaccgtctggaggaggtgacgaatgaaagtgggtatgtcgacgtcctgactttgctgcggagagttatgctggatacttctaacacactattccttcggattcctttggatgaatcagcaatcgtcgtgaagatacagggctacttcgatgcctggcaggcactgttgatcaagcccgacattttttttaaaatcagttggctgtataagaagtatgagaaatctgtgaaggatttaaaggacgcaatcgaggtcctcatcgctgaaaagagaaggcgtatctccactgaggagaaactcgaagagtgcatggatttcgctaccgaactgatactcgcagagaagaggggcgacctgacccgggaaaacgtgaatcaatgtattctggagatgctgatcgctgcccccgacactatgagtgttagtctgtttttcatgctttttctgattgcaaaacacccaaatgtggaagaagcaatcataaaggaaatccagacagttatcggcgaaagagacatcaaaatagacgacattcagaagttgaaagtgatggagaactttatctatgaaagcatgaggtatcagcccgtggtcgacttagtcatgaggaaagcactggaagatgatgtcatcgatgggtaccccgtgaaaaaaggtacaaacataattctcaatatcggccggatgcacagactggagttcttccccaagccgaacgaattcacactggagaatttcgctaaaaatgtcccctaccggtacttccagccattcggattcgggccccggggctgtgcgggtaaatacattgcgatggttatgatgaaagccatcctggtaactctacttaggaggtttcacgtcaaaactctgcaaggtcagtgcgtggagtcgatccagaagatccacgatctctctctgcaccccgatgagaccaagaatatgttggaaatgatcttcaccccaaggaactccgaccgctgtctcgagcactag

SEQ ID NO: 221239 - DNA, 519 bp, Artificial Sequence
  derived and/or modified sequence
atggtgctggagatgctgaaccccatccactacaacatcaccagcattgtgcccgaagccatgccggccgctaccatgcccgtcctgctattgaccggtcttttcctcctggtctggaattacgagggcaccagcagtatcccggggccaggctactgtatgggcatcggcccccttatcagtcacggaaggttcctgtggatgggtatcggttccgcctgtaattattataatcgcgtgtatggagaatttatgcgggtttggatcagcggcgaggaaactttaatcatttctaaatcctcttccatgttccatattatgaagcacaaccattactcatcaagattcggctcaaaactagggctgcagtgcattggaatgcatgaaaagggaatcatcttcaataataatcctgaactttggaagacaacacgaccttttttcatgaaggccttgtctggcccggggttagttcggatggtcactgtgtgcgctgagagtctgaaaactcacctatag

SEQ ID NO: 221240 - DNA, 735 bp, Artificial Sequence
  derived and/or modified sequence
atggtgctggagatgctgaaccccatccactacaacatcaccagcattgtacctgaagccatgccagcggccactatgcctgtcctcctgctgacagggctgtttctgctcgtctggaactatgaggggacatcttccattcctggtccgggctattgtatgggaatcggaccgctaatctctcacggaagattcctgtggatggggatcggatcagcttgcaattactacaatcgcgtctatggcgaatttatgcgggtatggatctctggagaagagacactgattatttctaaatccagttctatgtttcatattatgaagcacaatcattacagctctagattcgggtcaaaacttgggctacaatgtatcggaatgcatgaaaaaggaataattttcaacaataatccagagctttggaagaccacccgacctttttttatgaaagaatcagcaatagtcgtcaaaatacagggatactttgacgcctggcaggctttgctgataaaaccagatatctttttcaagatttcatggctctataagaagtacgaaaagtccgtgaaagacttgaaagacgccatcgaggttctgattgctgagaagcggcgccgaatatctaccgaagaaaagctggaagagtgtatggactttgctacagagttgatactggccgaaaagcggggcgatctcacccgagagaatgttaaccagtgcatcttggagatgtag

SEQ ID NO: 221241 - DNA, 1512 bp, Artificial Sequence
  derived and/or modified sequence
atggtgctcgagatgctcaaccccatccactacaacattaccagtatcgtacccgaagcaatgcctgccgctaccatgccggttctgcttttgaccgggctttttcttctggtctggaattacgaaggaacctcctctatacccggaccgggttactgcatgggtataggtcctcttatttctcatggtaggttcctgtggatgggtattggatccgcctgcaactattacaacagagtgtatggtgaattcatgagggtgtggataagtggcgaagagaccctgatcatctccaaatcaagttcaatgttccatatcatgaagcacaatcattacagtagtcgatttggcagcaaactcggtctgcaatgcataggtatgcatgaaaagggtatcatcttcaataacaatccagaattatggaagacaacccggccattctttatgaaggctctctccggtcctggactggtgcgcatggtcacagtctgcgctgagagcctgaaaactcacctggatcgcctggaagaggttactaacgaaagtgggtacgtggacgtgctgaccctcctgcggagggttatgctggatacgagcaacacactctttttaaggatcccactggacgagtccgccatcgtcgtgaaaatccagggctactttgacgcatggcaggccctgcttataaaacctgacattttttttaagatcagctggttgtataagaaatacgaaaagtcagtgaaggacttgaaagacgccattgaggtgctcatcgccgagaaacgaagaaggatttcaactgaagaaaagctagaagagtgcatggacttcgccacagaacttattctcgccgagaagagaggggatcttaccagggagaacgtcaatcaatgcattctggagatgctgatcgctgccccagacactatgagcgtctccctgtttttcatgctgtttctcatcgctaaacaccctaatgtggaagaggccataatcaaagagattcaaaccgtgatcggcgagcgggacataaagatcgacgacatccaaaaactgaaagtcatggaaaatttcatctatgagtctatgcgctatcagcccgtggtcgacctcgtgatgcgaaaggctctcgaggacgacgttattgacggctacccagtgaagaaagggacaaatatcatattaaatattggtaggatgcatcggctagagttctttccaaagccaaacgaattcacactggaaaacttcgccaagaatgtcccctaccgctatttccagcccttcgggttcgggcctcggggttgcgcagggaagtatattgcaatggtgatgatgaaggccatcttggttacactcctgcggaggtttcatgtgaagactctgcaaggccagtgcgtggagtctatccagaaaattcacgacctatccctacaccccgacgaaacaaagaatatgctcgagatgatcttcactcccagaaattctgacaggtgtctagagcactag

SEQ ID NO: 221242 - DNA, 1512 bp, Artificial Sequence
  derived and/or modified sequence
atggttcttgaaatgctcaaccctatccattacaatatcacaagcatagtgcccgaagccatgccagctgccacaatgccagtgctactactcaccggtctgttccttctggtttggaattacgaaggtacgtcctcaattcccggtcccggatactgtatggggatcgggcctctcatctctcacggtcgcttcctgtggatgggcataggcagcgcctgcaattactataacagagtctacggagagtttatgagagtgtggataagcggggaagagaccttgattatcagtaaatcatccagcatgtttcatataatgaaacataaccactattcaagccggttcgggagtaagctcggtctgcagtgtattgggatgcacgagaagggcattatattcaacaataatccggaactttggaagacaacgcgacctttcttcatgaaggccctgagcggtccaggactggtccgcatggtcacggtgtgtgccgagtccctgaaaacacatttggatcgcctcgaggaagtgacgaatgaaagcgggtacgtggatgtactgaccctccttagacgtgtgatgcttgatactagcaatacactgttcctgcggattcctctggacgagagcgctatcgtggtcaaaatccagggatacttcgacgcttggcaggcgctcctgattaagcctgacatctttttcaagatttcttggttgtacaagaagtatgagaagtcagtgaaggatctcaaagatgctatcgaagtccttattgccgaaaagcgcaggaggattagtactgaagagaagctggaggaatgcatggacttcgccacagagcttatactcgctgaaaaaaggggagatctgaccagggaaaatgtgaaccagtgtatccttgaaatgctcatcgccgcaccagataccatgagcgtgagcttattctttatgctgttcctgatagcaaagcatccgaatgtcgaggaggcgattatcaaggaaatccaaaccgtcatcggagaaagagacatcaagattgatgacattcagaagctgaaggtcatggagaacttcatctatgaatcgatgcggtaccaacccgtcgtcgatctagtgatgcggaaggcacttgaggatgatgtaatcgacggttacccagtgaaaaaaggtacaaacattatactaaatatcgggcgaatgcacaggttggagttctttcctaagcccaatgaattcacacttgaaaactttgcgaagaacgtaccttaccggtactttcagccctttgggtttgggcctcgcggatgcgcaggcaagtacattgcaatggtgatgatgaaggctattctggtcaccctgctgcgaagattccatgtgaagactctgcaggggcaatgtgttgaatctatccagaagatccatgacctgagcctgcaccccgatgaaacgaaaaatatgttggagatgattttcacacctcgtaacagcgacaggtgtctcgaacattag

SEQ ID NO: 221243 - DNA, 1512 bp, Artificial Sequence
  derived and/or modified sequence
atggtcctggaaatgctaaaccccatccattataacatcacaagtatagtgccagaggctatgccggctgctacaatgccagtgctcttgctgacgggtctgttcctgttggtttggaactatgagggcacctctagcattcctgggccaggttactgcatggggattggacctttgatctcccacggacgtttcctgtggatgggaattgggtctgcctgcaactactataacagagtgtatggcgaattcatgcgggtgtggatctccggtgaggagaccttaatcatctccaagtcatcgagcatgttccacattatgaagcacaaccactactcctcacggtttggctcaaaactgggcctgcaatgcatcggtatgcatgagaaaggcatcattttcaacaacaaccctgagctgtggaaaacgacacgccctttctttatgaaggccctgagtgggccaggtttggtgcgtatggtgacagtgtgtgcggagtccctgaaaacgcacttagaccgtctggaagaggtgaccaatgagagcggctatgttgacgtcctcacattgctccggcgagtaatgctggatacgtccaatacactgtttctccggatacctttggatgaaagcgcgattgtagtaaagattcaggggtatttcgatgcctggcaagcacttctcattaagcctgatatctttttcaaaataagctggctctataaaaagtatgagaaaagcgtgaaagacctcaaggatgccattgaggtactgattgcagagaaacgcagaagaatttccaccgaggaaaaactagaggagtgcatggacttcgcaaccgagttaatcttggccgagaagcgcggagatttgacgagagaaaatgtaaaccagtgtatccttgagatgctgatcgcagccccagatactatgagtgtgtcactatttttcatgttatttctgatagcgaaacatccaaatgtggaggaagccataattaaggagattcaaaccgtgatcggcgaacgcgacatcaaaatagacgacatccagaagcttaaggtaatggagaactttatatatgagtccatgcggtatcagcctgtggttgacctggtgatgcgtaaggctctcgaggacgacgttatcgatggatacccagtcaagaaaggaaccaacatcattctgaatatcgggagaatgcacaggctcgagttcttcccaaaaccaaacgaatttactctagagaattttgcaaaaaacgtgccatataggtattttcaaccattcggattcggcccacgtggatgtgccggaaaatacattgctatggttatgatgaaagctatcctcgtcacactacttcggcgtttccacgtcaaaactcttcagggccagtgtgtggagtctattcagaaaattcacgatttgagtctccaccctgatgagacaaaaaacatgctggagatgatttttacgcctcgaaattctgatcgctgtctcgaacactag

SEQ ID NO: 221244 - DNA, 501 bp, Artificial Sequence
  derived and/or modified sequence
atggttcttgaaatgctcaaccctattcattataatattaccagtatcgttcctgaagccatgccggcagctactatgcctgttctcttgttgactgggctcttcctcctagtatggaactatgagggcacaagttccataccaggtccaggatactgtatggggattgggcctttaatatcccacggaaggttcctgtggatgggcattgggagtgcttgcaattactataaccgggtgtacggagagttcatgagggtgtggatttcaggcgaggaaaccctaataatctctaagtccagctccatgttccatataatgaagcataaccattattcttccagattcggttcaaagctcggcttgcaatgcatcggtatgcatgaaaaaggcatcattttcaataacaatcccgagctgtggaagactacccgccctttctttatgaaggccttgagtgggcctggcctggtgcggatggttactgtctgtgctgagtag

SEQ ID NO: 221245 - DNA, 657 bp, Artificial Sequence
  derived and/or modified sequence
atggtcctggaaatgctgaatccaattcattacaacattacaagtatagtaccggaggcaatgcccgcagctaccatgccagtccttctgcttactggcctgtttctgctagtgtggaactatgaaggtacatcaagcatcccgggaccaggctactgtatgggcattggacctctcatcagtcacggccgatttctttggatgggtattggctcggcatgtaactactataatagagtgtacggcgaattcatgagggtctggatcagcggcgaggaaacactgatcatcagcaaaagctccagtatgtttcatatcatgaagcataaccattatagctcacgattcggctcaaagcttggactgcaatgtatcgggatgcatgaaaaaggcataatcttcaacaataaccccgagctgtggaagacaactcggccattttttatgaaggccctgtcaggtccaggcctggttcggatggttactgtctgtgcggagtcacttaagacacatttggatcgcttggaagaggtcaccaacgagtctggttatgtcgatgttttaaccctgcttagacgagtgatgctcgatacatctaataccctttttctgcgcataccgttagacggcactgagatcttcaccctcacatcttag

SEQ ID NO: 221246 - DNA, 1080 bp, Artificial Sequence
  derived and/or modified sequence
atggtactagagatgctgaatcctatccactataatattacttcaatcgtccccgaagctatgccggcagcaacaatgccagttttgctcctcaccggactcttcctgttagtgtggaactacgaagggacaagttccatcccaggccctgggtactgtatggggattggtcctctgattagtcatggtaggtttctgtggatggggattgggtctgcatgtaactactataacagagtgtacggtgagttcatgcgggtctggatttctggtgaagaaacattgatcatcagtaagtcttcctcaatgttccacatcatgaagcataaccactatagtagccgatttgggagtaagctcgggctgcaatgcatcgggatgcacgaaaagggtattattttcaataataaccctgagttatggaaaactacacggccattttttatgaaagctttaagcggtcctgggctggtgcgcatggtgactgtgtgcgccgagagtctcaagactcacttggacagacttgaggaggttacgaatgaatccggatatgtcgatgtcctcactctgctcaggcgcgttatgctggatacgtcaaatacgctctttctgagaattccgctagacgagtccgcgatcgttgtgaaaatacagggctactttgacgcctggcaagcccttctaatcaagccagatatattcttcaaaatctcctggctgtataagaaatatgagaagagcgtgaaagatctgaaggacgcgattgaggttctgattgccgaaaagcgtagacgcatttccacagaggaaaagctggaagagtgcatggatttcgcaaccgagctgatccttgctgagaaacgaggagaccttacccgggaaaacgtgaaccaatgcatcctggaaatgttaatagccgcaccagacactatgtctgtctctttattctttatgctcttcctgatcgctaagcatcctaacgttgaggaagctatcatcaaagagattcaaaccgtgattggggagagagacataaagatcgatgatattcagaagctgaaaaagcacgacgcaaaatag

SEQ ID NO: 221247 - DNA, 1059 bp, Artificial Sequence
  derived and/or modified sequence
atggttctcgaaatgctcaatccaatccattataacatcacaagcatcgtgcctgaggcgatgcccgctgccaccatgcccgtgcttttactgacgggactttttttgctggtgtggaactatgagggaacctcaagtatacctggaccaggttattgtatggggattggtcccctcatcagccacggtagattcctgtggatggggattgggtccgcatgcaactactataacagggtgtatggcgagtttatgagggtgtggatctctggagaggagactttaatcatttcgaaatccagttccatgtttcatatcatgaagcataatcattatagttccagattcggttccaaactggggttgcagtgcataggcatgcatgagaagggcattatttttaataacaatccagaactgtggaagaccactcgaccctttttcatgaaagcactgtccgggcctgggctcgtccggatggtgacagtttgtgctgaatcccttaagacacatttagaccgattagaggaggtcacaaacgagtccggatacgtagatgtgcttaccctcttgcgcagagtgatgctagacactagtaatacacttttcctcaggattccgctcgacgaaagtgctattgtcgttaagatccaggggtacttcgatgcctggcaggccctgctgatcaaaccagatatttttttcaagatctcttggctctataaaaagtacgagaaaagcgtgaaggatctgaaagacgctatcgaggtgctcatcgccgaaaagaggagacggatcagcacagaagaaaaactggaggagtgtatggatttcgcgaccgagctgattttagcggaaaaacgcggtgacctgactagagaaaacgtgaaccagtgtattcttgagatgcttatcgccgcacccgacaccatgagtgtatccctgtttttcatgctattcttaattgccaaacatcctaacgtcgaggaggcaatcatcaaggagatccagacagtgataggagaacgggatatcaagattgatgacatacagaagtag

SEQ ID NO: 221248 - DNA, 729 bp, Artificial Sequence
  derived and/or modified sequence
atggtgctggagatgctgaaccccatacactataatatcacctcgattgtgcctgaggccatgcccgctgccaccatgcctgtgctgctgcttactgggctgtttctgctggtctggaattacgaaggcacctccagcattccaggccctggctactgtatgggcattggccctcttatttcacacggccgattcctgtggatgggtatcggctcagcctgtaattactataacagggtctacggggagttcatgcgggtatggatcagcggggaagagaccttaattatcagtaagagtagctccatgtttcacatcatgaagcacaatcactacagctcccgcttcggcagtaaactcggccttcagtgtatcggaatgcatgaaaaaggtattatctttaacaataatccagagctctggaaaacgaccaggccattctttatgaaggcacttagcgggccaggccttgttcgtatggtcacagtgtgtgccgagtctctcaagacgcatctcgatagactggaagaagtaaccaatgagtctggctacgtggacgtattgacactgctgcgaagagttatgcttgatacctcaaacacactgtttttacgcataccactggacgagtccgccatcgtggtaaagatccagggatacttcgacgcctggcaagccctgttgattaaaccagacatatttttcaagatttcgtggctttacaagtag

SEQ ID NO: 221249 - DNA, 546 bp, Artificial Sequence
  derived and/or modified sequence
atggtgctcgaaatgttaaatccaatacactataacatcacatcaatcgtcccggaagccatgcctgctgcaactatgccggtccttctgctgactggcctcttcctactggtgtggaattacgaaggcacctcttcaatccccggaccgggatactgtatgggtatagggccactgattagtcatggaaggttcttgtggatgggaataggctcggcgtgcaactactataaccgggtgtatggcgaatttatgcgcgtatggatcagtggggaggaaacactgattatctcaaagtcaagcagtatgttccacattatgaaacataaccactacagtagtagattcggatccaaattggggctgcagtgtattggaatgcatgagaagggcatcatttttaacaataaccctgagctttggaaaacaacacgcccatttttcatgaaagctctgtcggggcctggactggtccgaatggtgacagtatgtgccgagagccttaagacgcacctactcctatttacaccagcaagcgttaactag

SEQ ID NO: 221250 - DNA, 657 bp, Artificial Sequence
  derived and/or modified sequence
atggtcttggaaatgctcaaccctatccattacaatataaccagtatagttccagaggccatgcccgcagcaacaatgcctgtgctactgctcacaggcctgttcctgcttgtttggaactacgagggcaccagtagtatccccggtcccggttattgtatggggataggcccactaatatctcacgggaggttcctgtggatggggatcgggtcagcatgcaactactataatcgggtgtatggggaatttatgcgggtgtggatttccggagaagaaactctgataatctcaaagagtagttccatgttccacattatgaagcataatcattactccagcaggttcggatcaaagctgggactgcagtgcattggaatgcatgagaaaggtattatcttcaacaacaaccccgaactgtggaagacgacgcgaccattctttatgaaagccctgtctggcccaggcctcgtccgcatggtcaccgtgtgtgctgaatcgctgaaaactcatttggaccggctggaagaggtgaccaatgagagcgggtatgtcgatgtactgaccctcctgcgacgagtcatgctggatactagcaatacgctgtttttacgtataccgttggatgggaccgagatttttactcttacgagctag

SEQ ID NO: 221251 - DNA, 1059 bp, Artificial Sequence
  derived and/or modified sequence
atggtcctcgagatgctaaacccaattcactataatattacaagcattgttccggaggcaatgcctgccgctactatgccagtccttttgctaactggcctgttcctcctcgtctggaattatgaggggactagctccatccccggtcctggctattgcatgggcattggacccctgatttcccatggtcggtttttgtggatgggaatcggcagcgcctgcaattattataatagggtgtacggcgagttcatgcgggtgtggattagtggtgaggagacactaatcatcagtaaatccagctctatgttccatatcatgaaacacaaccactattcaagcagatttggctctaagctggggctgcagtgtattggaatgcatgagaagggcatcatcttcaataacaatcccgagctgtggaaaaccacgagaccattcttcatgaaagcactttccgggcctggattagtgcgaatggtgaccgtgtgcgcggaaagcctaaagacccatctggatcggctagaagaggttacaaatgaatccgggtatgtggacgtcctgactctcctcaggcgagtaatgcttgatacatctaacactctgttcctccgaattcccttagatgaatctgccatcgttgttaaaatccagggatacttcgatgcttggcaagccttgctaataaagccagatatattttttaaaatctcctggctttataaaaagtacgaaaagtccgtgaaggatctgaaggatgctattgaagtgttgatagctgagaagaggcgcaggatcagtacagaagagaaactggaagagtgtatggacttcgctacggaactgatactcgcggaaaagcgaggcgacctaacacgcgagaacgtcaatcagtgcatcttagaaatgctgatcgctgcccctgacacaatgtccgtctcgctgtttttcatgttatttcttatcgcgaaacacccgaatgtggaagaggctatcatcaaggagatccagaccgtgattggcgaacgcgatataaagatagacgacattcagaaatag

SEQ ID NO: 221252 - DNA, 852 bp, Artificial Sequence
  derived and/or modified sequence
atggtgttagaaatgctcaacccgatacactataacataacatctatcgtgcctgaggcaatgcccgcagcaactatgcccgtgctgctcttaaccgggttgtttctcttggtctggaactacgaggggacctcaagcatccccggtccgggatactgcatgggcataggacccctgatcagtcacgggcgtttcctatggatgggaatcgggtccgcctgcaattattacaatcgagtatacggtgagttcatgcgtgtgtggatctctggcgaggagactttgataatttccaaatcatcatcgatgtttcacattatgaaacacaatcattacagctcacgcttcggaagtaagcttggcctccagtgcatcggtatgcacgagaagggtatcatctttaataacaaccccgaactctggaagacgacacgcccattcttcatgaaagctctctctggtccgggtctagtgagaatggtgaccgtatgcgcagagagtctgaagactcatctggaccgacttgaggaggtcacaaatgagtccgggtacgtggacgtgctgactcttctcagaagagtgatgctcgacacatcaaatacgttattcctgaggattccactggacgagtcggctatcgtagtgaaaatccaggggtatttcgatgcctggcaggctctgcttatcaaaccggacatcttctttaagattagctggctttacaagaagtacgagaagtccgtaaaggatctgaaggatgccattgaggtcctgatcgctgagaaaaggcgccgtatctccacggaggaaaagctcgaggagtgtatggatttcgcaacagagctgatttag

SEQ ID NO: 221253 - DNA, 498 bp, Artificial Sequence
  derived and/or modified sequence
atggtgctcgaaatgcttaatcccatccattacaatatcacctcaatcgtgccagaagcaatgccagcagcgaccatgccagttcttttgctgactggactgttcctgttagtatggaattacgagggaacaagctcaatacccggtccagggtactgtatgggcatcggacccctgatttctcacggccgatttctttggatggggattgggagtgcatgcaactactataaccgggtgtatggggaattcatgcgcgtgtggatctcgggggaggagacattgatcattagtaagagcagttccatgtttcatatcatgaaacataaccactacagcagtagattcggctccaagctggggttacaatgcataggaatgcatgagaagggcatcatcttcaacaacaaccctgaactgtggaagacgactaggcccttcttcatgaaggctctctctggtcccggactggtcagaatggtcactgtgtgtgcctag

SEQ ID NO: 221254 - DNA, 1512 bp, Artificial Sequence
  derived and/or modified sequence
atggtgttagaaatgctcaatccaatccattacaacattaccagcatcgttcctgaagctatgcccgcagccacaatgcctgttctgctcctgactggcttgtttcttctcgtctggaattatgagggcacttcttcaatcccaggccctggatactgcatggggatcgggccactgattagccacgggcgattcctttggatgggcatcggcagcgcgtgtaattattataatcgcgtctatggggagttcatgcgcgtctggatctccggagaagagaccctcattatctccaaatcctccagcatgtttcacatcatgaaacacaaccattactccagccgattcggctcaaaactgggactgcaatgtattggtatgcacgagaaagggatcattttcaataataatccagagttgtggaagaccaccaggcctttttttatgaaggctctgtctggtcccggactcgttagaatggtcaccgtatgcgccgaatcactcaagacccatctggaccgcctggaggaggtcacaaacgaatccggctacgtagacgtgctcaccctcctccgtcgtgtgatgttagatacgagtaataccctcttcctacgcatcccccttgacgaatctgcgatcgtggttaaaatccagggttactttgacgcctggcaagccctgctcattaaaccagacatcttttttaagatttcttggctttacaaaaagtacgagaaatctgttaaggatctgaaggacgccattgaggtgttgattgccgagaagaggcggaggatctctacagaggagaaactggaggaatgcatggacttcgctacagagcttatcctcgcggagaagagaggggacctgactcgtgagaacgtgaatcaatgtatcctagaaatgttgatcgccgcacctgataccatgtctgtgtcactttttttcatgctgtttctgattgccaaacaccctaacgtggaggaggccatcatcaaagagattcagacggtgattggggagcgagacatcaagatcgacgacatccagaaattgaaggtgatggagaatttcatctacgagagcatgcgctatcaacctgtggtcgacctcgtgatgcggaaggcacttgaggacgacgtgattgatggttatccggtgaaaaagggtactaatattatcctgaatattggccgtatgcaccggctggaatttttccccaagccaaacgagttcactctcgaaaactttgctaaaaacgtgccctaccggtattttcagcccttcggatttggaccaaggggctgtgccggaaagtatatagctatggtgatgatgaaagccatcctggtgaccctgctccgaagatttcatgtcaagacactgcagggccagtgcgtggaatccatccagaaaatccatgatctgagcttacaccccgacgagaccaaaaacatgcttgaaatgatattcacccccaggaatagcgaccgatgtttagaacattag

SEQ ID NO: 221255 - DNA, 519 bp, Artificial Sequence
  derived and/or modified sequence
atggtcctcgagatgctgaaccccatccactacaatatcactagcattgtgccagaggctatgccagcagctaccatgcctgttctgctgttaaccggactgttcctgctggtttggaactacgaggggacgagcagtatccctgggcctggctattgtatgggcatagggcctctgattagccacggcagattcctctggatgggaattggatcggcatgcaattactacaacagggtgtatggcgaatttatgagagtgtggattagcggtgaagagaccctcatcatttcgaagagctcatccatgttccacatcatgaagcacaatcactactcatcacggttcggtagcaagttagggctgcagtgcatcggaatgcacgagaaaggaattattttcaacaataaccccgaactttggaagacaaccagaccttttttcatgaaagctttgagcggacctggcttagttaggatggtgaccgtgtgtgctgaaagcctgaagacccacttgtag

SEQ ID NO: 221256 - DNA, 735 bp, Artificial Sequence
  derived and/or modified sequence
atggtacttgaaatgctgaatccaatccactacaatatcacgtccatcgtgccggaagccatgccagctgctactatgccggtgcttcttctcacgggactattcctcttagtttggaactacgaaggcacttcctcaatccctggtcctgggtattgcatgggtattgggcctctcatttcgcatgggagattcctgtggatgggcattggtagcgcttgcaattactacaaccgggtgtatggcgagtttatgcgcgtatggatttcgggagaagagacactgatcatctctaagtccagctcaatgttccacatcatgaagcataaccactactcctccagatttggttctaaactgggcctgcaatgcatcggaatgcacgagaagggaattatctttaacaataatcctgaactctggaaaacaacacgcccttttttcatgaaagagtccgcaatcgtggtcaagattcagggctattttgatgcctggcaggcactcctaattaaacctgacatcttttttaagatcagttggctgtacaagaagtatgagaaatctgtgaaggaccttaaagacgcgatagaggtcttgatcgcagagaagcgcaggcgcatctccaccgaagaaaaacttgaggagtgtatggatttcgccactgaacttatcctggcagagaagcgtggagacttgacacgtgaaaatgtcaaccagtgcatcctggagatgtag

SEQ ID NO: 221257 - DNA, 4409 bp, Artificial Sequence
  derived and/or modified sequence
gcggtgtcagaaaccctgtggtgaaattcagcctgtggattccagaaatttggagtgttcttggggggaaaaatccgcacacacaaagcaacatttggaaatccctgtggactctaaattgccccctctgaggtcaaggaacacaagatggttttggaaatgctgaacccgatacattataacatcaccagcatcgtgcctgaagccatgcctgctgccaccatgccagtcctgctcctcactggcctttttctcttggtgtggaattatgagggcacatcctcaataccaggtcctggctactgcatgggaattggacccctcatctcccacggcagattcctgtggatggggatcggcagtgcctgcaactactacaaccgggtatatggagaattcatgcgagtctggatctctggagaggaaacactcattatcagcaagtcctcaagtatgttccacataatgaagcacaatcattacagctctcgattcggcagcaaacttgggctgcagtgcatcggtatgcatgagaaaggcatcatatttaacaacaatccagagctctggaaaacaactcgacccttctttatgaaagctctgtcaggccccggccttgttcgtatggtcacagtctgtgctgaatccctcaaaacacatctggacaggttggaggaggtgaccaatgaatcgggctatgtggacgtgttgacccttctgcgtcgtgtcatgctggacacctctaacacgctcttcttgaggatccctttggacgaaagtgctatcgtggttaaaatccaaggttattttgatgcatggcaagctctcctcatcaaaccagacatcttctttaagatttcttggctatacaaaaagtatgagaagtctgtcaaggatttgaaagatgccatagaagttctgatagcagaaaaaagacgcaggatttccacagaagagaaactggaagaatgtatggactttgccactgagttgattttagcagagaaacgtggtgacctgacaagagagaatgtgaaccagtgcatattggaaatgctgatcgcagctcctgacaccatgtctgtctctttgttcttcatgctatttctcattgcaaagcaccctaatgttgaagaggcaataataaaggaaatccagactgttattggtgagagagacataaagattgatgatatacaaaaattaaaagtgatggaaaacttcatttatgagagcatgcggtaccagcctgtcgtggacttggtcatgcgcaaagccttagaagatgatgtaatcgatggctacccagtgaaaaaggggacaaacattatcctgaatattggaaggatgcacagactcgagtttttccccaaacccaatgaatttactcttgaaaattttgcaaagaatgttccttataggtactttcagccatttggctttgggccccgtggctgtgcaggaaagtacatcgccatggtgatgatgaaagccatcctcgttacacttctgagacgattccacgtgaagacattgcaaggacagtgtgttgagagcatacagaagatacacgacttgtccttgcacccagatgagactaaaaacatgctggaaatgatctttaccccaagaaactcagacaggtgtctggaacactagagaaggctggtcagtacccactctggagcatttctcatcagtagttcacatacaaatcatccatccttgccaatagtgtcatcctcacagtgaacactcagtggcccatggcattttataggcatacctcctatgggttgtcaccaagctaggtgctatttgtcatctgctcctgttcacaccagagaaccaggctacaagagaaaaagcagaggccaagagtttgagggagaaatagtcggtgaagaaaccgtatccataaagacccgattccaccaaatgtgctttgagaaggataggccttcattaacaaaatgtatgtctggttccccagtagagctctactgcctcaacccaaggggatttttatgtctggggcagaaacactcaagttgattagaaagaccaggccaatgtcagggtacctggggccaaacccacctgctagtgtgaattaaagtactttaattttgttttctgtggaggtggaaaagcaacattcatagtctttggagaaatgcttagaaattcagcatttgacccttgctgtgaattaagcccaattaattcctgtttgtctacatatgatctgtctgtggcaaaagtttaatcagaggaaattctttcccagtctgtcgatttatgcctcagccacttgcctgtgctacaattcattgtgttacctgtagattcaggtaatacaaactatatataatcatcaagtaatacaaactaatttagtaatagcctgggttaagtattattagggccctgtgtctgctgtagaaaaaaaaattcacatgatgcacttcaaattcaaataaaaatccttttggcatgttcccatttttgcttagctcaattagtgtggctaaccaagagataactgtaaatgtgacattgatttgctcttactacagcttcagtgattgggggaggaaaagtcccaacccaatgggctcaaacttctaaggggtactcctctcatccccttatccttctccctcgacattttctccctctttcttcccatgaccccaaagccaagggcaacagatcagtaaagaacgtggtcagagtagaacccctgaagtattttttaatcctacctcaaaatttaacagttacctgagagatttaacattatctagttcattgaatcattgtatgtggtcatggataaattgcacaccttggaattcgctttctaaaggaaatcaaatgaatggaggaactttccaaacaccactttacttgtgttatatagccaatataactatctctactgaatgtcattgaaaaactaaaaaattaaacttatttacaaataggtaaatatttgtcattgaatccattgccatcccatttgactgttcttttcatcctactgtctagtaataagctgagtataagatgacagtgtaatctccctgaaagcaggagctactttctttcttttgtaatctatttccatccccatttccctgtcctgtctccctgtattcactcccaagctcagttctgaatagacattcctgctcagagatactcccaactgatgcagaaaccaaataaagaggtaggtattccaagaattcaagaatggacattagtaaagaataaaacatttatttgagcttggaattatttggatcatctatatggcctaaaaatatatggactatgcctgtgtacctgaatacgtatgtagtcaggtcaagacaatcatccaaataacttagacccctaaaagcaaggccaggatttgcaatttaatgtgtcccaattaattcacttgaaaattagtaacactctgtttacgttgcctctggctggagctgcatggtggaagaagcccaactttggatccatgtacttcacccatccaatactcttgggacatttatgtgtattttatctgtatatatgaagccaatgtctatgtctacacagtcaaagtgaaatgcatgtttgatatagctgtacatagatatctattttgcaggtacaaaaatatcctgggggaaaactgggagtggaagggtggggggtgggagtgagggacatgggggagggacaggaagaggagaagtgttggtttgaacgatccaagcaaactctcccagaatcaaattacctgggtagttgttcaacttttcactctgcttagcctgtatagacaaaccccatatatttgtagaggcttggccttggaattctggaataccattggcttttcagtaggctgatgaacacattttgaaaattctattatcttcagaattttgccccattgttaagtgcttaaccgtcactcttgaatgtgcaatgtgctgtggattccattttcatcagttctgaaagaactgcaatgtgtaaattatcagtgaaatgcatgcatataagggctctatcattatcaaattgtaaggacaattgtacccttctatatctttgggcatgctagacacccccatgccttcattgagatcccattttccccctctcaagtggaaaataatcacatccagcaagctctctcattattgagaaataccatttggaaattgccactttttattcctaagcagcacctttcactgttcatgatgctaatgttccacaaaagcatgtgccattggcccactgaaggatagagggacccttttcaatctatatcagctgggctctgggactgaatctctcacctattcttgcagaaagacatactaattaaaccttgtcaaagt

SEQ ID NO: 221258 - DNA, 4417 bp, Artificial Sequence
  derived and/or modified sequence
ggacagggttcagggagtttctggagggctgaacacgtggaggcaaacaggaaggtgaagaagaacttatcctatcaggacggaaggtcctgtgctcgggatcttccagacgtcgcgactctaaattgccccctctgaggtcaaggaacacaagatggttttggaaatgctgaacccgatacattataacatcaccagcatcgtgcctgaagccatgcctgctgccaccatgccagtcctgctcctcactggcctttttctcttggtgtggaattatgagggcacatcctcaataccaggtcctggctactgcatgggaattggacccctcatctcccacggcagattcctgtggatggggatcggcagtgcctgcaactactacaaccgggtatatggagaattcatgcgagtctggatctctggagaggaaacactcattatcagcaagtcctcaagtatgttccacataatgaagcacaatcattacagctctcgattcggcagcaaacttgggctgcagtgcatcggtatgcatgagaaaggcatcatatttaacaacaatccagagctctggaaaacaactcgacccttctttatgaaagctctgtcaggccccggccttgttcgtatggtcacagtctgtgctgaatccctcaaaacacatctggacaggttggaggaggtgaccaatgaatcgggctatgtggacgtgttgacccttctgcgtcgtgtcatgctggacacctctaacacgctcttcttgaggatccctttggacgaaagtgctatcgtggttaaaatccaaggttattttgatgcatggcaagctctcctcatcaaaccagacatcttctttaagatttcttggctatacaaaaagtatgagaagtctgtcaaggatttgaaagatgccatagaagttctgatagcagaaaaaagacgcaggatttccacagaagagaaactggaagaatgtatggactttgccactgagttgattttagcagagaaacgtggtgacctgacaagagagaatgtgaaccagtgcatattggaaatgctgatcgcagctcctgacaccatgtctgtctctttgttcttcatgctatttctcattgcaaagcaccctaatgttgaagaggcaataataaaggaaatccagactgttattggtgagagagacataaagattgatgatatacaaaaattaaaagtgatggaaaacttcatttatgagagcatgcggtaccagcctgtcgtggacttggtcatgcgcaaagccttagaagatgatgtaatcgatggctacccagtgaaaaaggggacaaacattatcctgaatattggaaggatgcacagactcgagtttttccccaaacccaatgaatttactcttgaaaattttgcaaagaatgttccttataggtactttcagccatttggctttgggccccgtggctgtgcaggaaagtacatcgccatggtgatgatgaaagccatcctcgttacacttctgagacgattccacgtgaagacattgcaaggacagtgtgttgagagcatacagaagatacacgacttgtccttgcacccagatgagactaaaaacatgctggaaatgatctttaccccaagaaactcagacaggtgtctggaacactagagaaggctggtcagtacccactctggagcatttctcatcagtagttcacatacaaatcatccatccttgccaatagtgtcatcctcacagtgaacactcagtggcccatggcattttataggcatacctcctatgggttgtcaccaagctaggtgctatttgtcatctgctcctgttcacaccagagaaccaggctacaagagaaaaagcagaggccaagagtttgagggagaaatagtcggtgaagaaaccgtatccataaagacccgattccaccaaatgtgctttgagaaggataggccttcattaacaaaatgtatgtctggttccccagtagagctctactgcctcaacccaaggggatttttatgtctggggcagaaacactcaagttgattagaaagaccaggccaatgtcagggtacctggggccaaacccacctgctagtgtgaattaaagtactttaattttgttttctgtggaggtggaaaagcaacattcatagtctttggagaaatgcttagaaattcagcatttgacccttgctgtgaattaagcccaattaattcctgtttgtctacatatgatctgtctgtggcaaaagtttaatcagaggaaattctttcccagtctgtcgatttatgcctcagccacttgcctgtgctacaattcattgtgttacctgtagattcaggtaatacaaactatatataatcatcaagtaatacaaactaatttagtaatagcctgggttaagtattattagggccctgtgtctgctgtagaaaaaaaaattcacatgatgcacttcaaattcaaataaaaatccttttggcatgttcccatttttgcttagctcaattagtgtggctaaccaagagataactgtaaatgtgacattgatttgctcttactacagcttcagtgattgggggaggaaaagtcccaacccaatgggctcaaacttctaaggggtactcctctcatccccttatccttctccctcgacattttctccctctttcttcccatgaccccaaagccaagggcaacagatcagtaaagaacgtggtcagagtagaacccctgaagtattttttaatcctacctcaaaatttaacagttacctgagagatttaacattatctagttcattgaatcattgtatgtggtcatggataaattgcacaccttggaattcgctttctaaaggaaatcaaatgaatggaggaactttccaaacaccactttacttgtgttatatagccaatataactatctctactgaatgtcattgaaaaactaaaaaattaaacttatttacaaataggtaaatatttgtcattgaatccattgccatcccatttgactgttcttttcatcctactgtctagtaataagctgagtataagatgacagtgtaatctccctgaaagcaggagctactttctttcttttgtaatctatttccatccccatttccctgtcctgtctccctgtattcactcccaagctcagttctgaatagacattcctgctcagagatactcccaactgatgcagaaaccaaataaagaggtaggtattccaagaattcaagaatggacattagtaaagaataaaacatttatttgagcttggaattatttggatcatctatatggcctaaaaatatatggactatgcctgtgtacctgaatacgtatgtagtcaggtcaagacaatcatccaaataacttagacccctaaaagcaaggccaggatttgcaatttaatgtgtcccaattaattcacttgaaaattagtaacactctgtttacgttgcctctggctggagctgcatggtggaagaagcccaactttggatccatgtacttcacccatccaatactcttgggacatttatgtgtattttatctgtatatatgaagccaatgtctatgtctacacagtcaaagtgaaatgcatgtttgatatagctgtacatagatatctattttgcaggtacaaaaatatcctgggggaaaactgggagtggaagggtggggggtgggagtgagggacatgggggagggacaggaagaggagaagtgttggtttgaacgatccaagcaaactctcccagaatcaaattacctgggtagttgttcaacttttcactctgcttagcctgtatagacaaaccccatatatttgtagaggcttggccttggaattctggaataccattggcttttcagtaggctgatgaacacattttgaaaattctattatcttcagaattttgccccattgttaagtgcttaaccgtcactcttgaatgtgcaatgtgctgtggattccattttcatcagttctgaaagaactgcaatgtgtaaattatcagtgaaatgcatgcatataagggctctatcattatcaaattgtaaggacaattgtacccttctatatctttgggcatgctagacacccccatgccttcattgagatcccattttccccctctcaagtggaaaataatcacatccagcaagctctctcattattgagaaataccatttggaaattgccactttttattcctaagcagcacctttcactgttcatgatgctaatgttccacaaaagcatgtgccattggcccactgaaggatagagggacccttttcaatctatatcagctgggctctgggactgaatctctcacctattcttgcagaaagacatactaattaaaccttgtcaaagta

SEQ ID NO: 221259 - DNA, 2388 bp, Artificial Sequence
  derived and/or modified sequence
gagtttctggagggctgaacacgtggaggcaaacaggaaggtgaagaagaacttatcctatcaggacggaaggtcctgtgctcgggatcttccagacgtcgcgcggtgtcagaaaccctgtggtgaaattcagcctgtggattccagaaatttggagtgttcttggggggaaaaatccgcacacacaaagcaacatttggaaatccctgtggactctaaattgccccctctgaggtcaaggaacacaagatggttttggaaatgctgaacccgatacattataacatcaccagcatcgtgcctgaagccatgcctgctgccaccatgccagtcctgctcctcactggcctttttctcttggtgtggaattatgagggcacatcctcaataccaggtcctggctactgcatgggaattggacccctcatctcccacggcagattcctgtggatggggatcggcagtgcctgcaactactacaaccgggtatatggagaattcatgcgagtctggatctctggagaggaaacactcattatcagcaagtcctcaagtatgttccacataatgaagcacaatcattacagctctcgattcggcagcaaacttgggctgcagtgcatcggtatgcatgagaaaggcatcatatttaacaacaatccagagctctggaaaacaactcgacccttctttatgaaagctctgtcaggccccggccttgttcgtatggtcacagtctgtgctgaatccctcaaaacacatctggacaggttggaggaggtgaccaatgaatcgggctatgtggacgtgttgacccttctgcgtcgtgtcatgctggacacctctaacacgctcttcttgaggatccctttggacgaaagtgctatcgtggttaaaatccaaggttattttgatgcatggcaagctctcctcatcaaaccagacatcttctttaagatttcttggctatacaaaaagtatgagaagtctgtcaaggatttgaaagatgccatagaagttctgatagcagaaaaaagacgcaggatttccacagaagagaaactggaagaatgtatggactttgccactgagttgattttagcagagaaacgtggtgacctgacaagagagaatgtgaaccagtgcatattggaaatgctgatcgcagctcctgacaccatgtctgtctctttgttcttcatgctatttctcattgcaaagcaccctaatgttgaagaggcaataataaaggaaatccagactgttattggtgagagagacataaagattgatgatatacaaaaattaaaagtgatggaaaacttcatttatgagagcatgcggtaccagcctgtcgtggacttggtcatgcgcaaagccttagaagatgatgtaatcgatggctacccagtgaaaaaggggacaaacattatcctgaatattggaaggatgcacagactcgagtttttccccaaacccaatgaatttactcttgaaaattttgcaaagaatgttccttataggtactttcagccatttggctttgggccccgtggctgtgcaggaaagtacatcgccatggtgatgatgaaagccatcctcgttacacttctgagacgattccacgtgaagacattgcaaggacagtgtgttgagagcatacagaagatacacgacttgtccttgcacccagatgagactaaaaacatgctggaaatgatctttaccccaagaaactcagacaggtgtctggaacactagagaaggctggtcagtacccactctggagcatttctcatcagtagttcacatacaaatcatccatccttgccaatagtgtcatcctcacagtgaacactcagtggcccatggcattttataggcatacctcctatgggttgtcaccaagctaggtgctatttgtcatctgctcctgttcacaccagagaaccaggctacaagagaaaaagcagaggccaagagtttgagggagaaatagtcggtgaagaaaccgtatccataaagacccgattccaccaaatgtgctttgagaaggataggccttcattaacaaaatgtatgtctggttccccagtagagctctactgcctcaacccaaggggatttttatgtctggggcagaaacactcaagttgattagaaagaccaggccaatgtcagggtacctggggccaaacccacctgctagtgtgaattaaagtactttaattttgttttctgtggaggtggaaaagcaacattcatagtctttggagaaatgcttagaaattcagcatttgacccttgctgtgaattaagcccaattaattcctgtttgtctacatatgatctgtctgtggcaaaagtttaatcagaggaaattctttc

SEQ ID NO: 221260 - DNA, 794 bp, Artificial Sequence
  derived and/or modified sequence
ggagtttctggagggctgaacacgtggaggcaaacaggaaggtgaagaagaacttatcctatcaggacggaaggtcctgtgctcgggatcttccagacgtcgccaactgatctcttagcaacaagaagcacctttataaaagatggcacacgaagagtgattgccagaaaagccacctggttcttaaacagccgcgcatcattagcaaaactcaccatcttcaagagtccaaaaactagaagtgaccagcagacccaggactctaaattgccccctctgaggtcaaggaacacaagatggttttggaaatgctgaacccgatacattataacatcaccagcatcgtgcctgaagccatgcctgctgccaccatgccagtcctgctcctcactggcctttttctcttggtgtggaattatgagggcacatcctcaataccaggtcctggctactgcatgggaattggacccctcatctcccacggcagattcctgtggatggggatcggcagtgcctgcaactactacaaccgggtatatggagaattcatgcgagtctggatctctggagaggaaacactcattatcagcaagtcctcaagtatgttccacataatgaagcacaatcattacagctctcgattcggcagcaaacttgggctgcagtgcatcggtatgcatgagaaaggcatcatatttaacaacaatccagagctctggaaaacaactcgacccttctttatgaaagctctgtcaggccccggccttgttcgtatggtcacagtctgtgctgaa

SEQ ID NO: 221261 - DNA, 1697 bp, Artificial Sequence
  derived and/or modified sequence
ggagctatagatgaaccttttaggggattctgtaatttttctgtccctttgatttccacaggactctaaattgccccctctgaggtcaaggaacacaagatggttttggaaatgctgaacccgatacattataacatcaccagcatcgtgcctgaagccatgcctgctgccaccatgccagtcctgctcctcactggcctttttctcttggtgtggaattatgagggcacatcctcaataccaggtcctggctactgcatgggaattggacccctcatctcccacggcagattcctgtggatggggatcggcagtgcctgcaactactacaaccgggtatatggagaattcatgcgagtctggatctctggagaggaaacactcattatcagcaagtcctcaagtatgttccacataatgaagcacaatcattacagctctcgattcggcagcaaacttgggctgcagtgcatcggtatgcatgagaaaggcatcatatttaacaacaatccagagctctggaaaacaactcgacccttctttatgaaagctctgtcaggccccggccttgttcgtatggtcacagtctgtgctgaatccctcaaaacacatctggacaggttggaggaggtgaccaatgaatcgggctatgtggacgtgttgacccttctgcgtcgtgtcatgctggacacctctaacacgctcttcttgaggatccctttggacggtactgaaattttcactctcacatcttgaccatctgtcctttactgaacaaggagctaggagggataacagaccaaaggaatcacatgccattttctacattgctcttgtttaaacatttctaagtactcctcgtttttttccctagtgtttctgctttgttcacttataaaatataaatttccataaagtaggggccagcatctactagccttttgtatctttcctcattactctaggaaatagaattctacccacagttgaaacttaacaaatgtgattagttcgtttggttattaacatatcctaccaccaatcaactttatatatttaaccatttccagttgttcttttgggcatgatatatacatacatatatacatacatacccacacatatatacacacactcctccctcaaagctactaaacatgaaaacattgtgcctatatgataaaaatgtcaatattgctggtgatactgatgctgatggaaatgacgatattagctgccattaacgtagtatctaatgtgtgccaaacaatattaaaaattgctgtatatacatgtttgccatttattatttataaccttaacaagatgtctcactcataagactactttccgcactatgatacagaaatgaatattaaaacatgtgcatgctcatgtcaaactcatagaacttgattttattttggcaggattaaaccaatttgcaacttgagtacaaatgccaatatttcagctagttcttgaaaagttgtgccattgtgcaaaagtcattgaattatttgataactttttaacctaatgaccaaacacctgacaggaatggaattcactggacttgtatctaattgttttacactgttttctatgggttacattttttattgccattgtgacctttatccacacactaacctggaaagtataggaataaaagaattggcattctttctgataca

SEQ ID NO: 221262 - DNA, 1179 bp, Artificial Sequence
  derived and/or modified sequence
ggagctatagatgaaccttttaggggattctgtaatttttctgtccctttgatttccacaggactctaaattgccccctctgaggtcaaggaacacaagatggttttggaaatgctgaacccgatacattataacatcaccagcatcgtgcctgaagccatgcctgctgccaccatgccagtcctgctcctcactggcctttttctcttggtgtggaattatgagggcacatcctcaataccaggtcctggctactgcatgggaattggacccctcatctcccacggcagattcctgtggatggggatcggcagtgcctgcaactactacaaccgggtatatggagaattcatgcgagtctggatctctggagaggaaacactcattatcagcaagtcctcaagtatgttccacataatgaagcacaatcattacagctctcgattcggcagcaaacttgggctgcagtgcatcggtatgcatgagaaaggcatcatatttaacaacaatccagagctctggaaaacaactcgacccttctttatgaaagctctgtcaggccccggccttgttcgtatggtcacagtctgtgctgaatccctcaaaacacatctggacaggttggaggaggtgaccaatgaatcgggctatgtggacgtgttgacccttctgcgtcgtgtcatgctggacacctctaacacgctcttcttgaggatccctttggacgaaagtgctatcgtggttaaaatccaaggttattttgatgcatggcaagctctcctcatcaaaccagacatcttctttaagatttcttggctatacaaaaagtatgagaagtctgtcaaggatttgaaagatgccatagaagttctgatagcagaaaaaagacgcaggatttccacagaagagaaactggaagaatgtatggactttgccactgagttgattttagcagagaaacgtggtgacctgacaagagagaatgtgaaccagtgcatattggaaatgctgatcgcagctcctgacaccatgtctgtctctttgttcttcatgctatttctcattgcaaagcaccctaatgttgaagaggcaataataaaggaaatccagactgttattggtgagagagacataaagattgatgatatacaaaaattaaaaaaacatgatgctaaataa

SEQ ID NO: 221263 - DNA, 1442 bp, Artificial Sequence
  derived and/or modified sequence
gggagtttctggagggctgaacacgtggaggcaaacaggaaggtgaagaagaacttatcctatcaggacggaaggtcctgtgctcgggatcttccagacgtcgccatgtggaaaagctccctgagttccccgcctgccccacctgctgatttctcaggaccgctgataacagctttcatgtggaacttgggattaatatcaagcaagccatggattttgtctccactgaacttgggcatcatggacagtttccattccagcagttaagggcttcctgactttcaacagtggtgctgatcccagttctgaagagtggaacatcagagagcctcccctcctcagccacttgactctaaattgccccctctgaggtcaaggaacacaagatggttttggaaatgctgaacccgatacattataacatcaccagcatcgtgcctgaagccatgcctgctgccaccatgccagtcctgctcctcactggcctttttctcttggtgtggaattatgagggcacatcctcaataccaggtcctggctactgcatgggaattggacccctcatctcccacggcagattcctgtggatggggatcggcagtgcctgcaactactacaaccgggtatatggagaattcatgcgagtctggatctctggagaggaaacactcattatcagcaagtcctcaagtatgttccacataatgaagcacaatcattacagctctcgattcggcagcaaacttgggctgcagtgcatcggtatgcatgagaaaggcatcatatttaacaacaatccagagctctggaaaacaactcgacccttctttatgaaagctctgtcaggccccggccttgttcgtatggtcacagtctgtgctgaatccctcaaaacacatctggacaggttggaggaggtgaccaatgaatcgggctatgtggacgtgttgacccttctgcgtcgtgtcatgctggacacctctaacacgctcttcttgaggatccctttggacgaaagtgctatcgtggttaaaatccaaggttattttgatgcatggcaagctctcctcatcaaaccagacatcttctttaagatttcttggctatacaaaaagtatgagaagtctgtcaaggatttgaaagatgccatagaagttctgatagcagaaaaaagacgcaggatttccacagaagagaaactggaagaatgtatggactttgccactgagttgattttagcagagaaacgtggtgacctgacaagagagaatgtgaaccagtgcatattggaaatgctgatcgcagctcctgacaccatgtctgtctctttgttcttcatgctatttctcattgcaaagcaccctaatgttgaagaggcaataataaaggaaatccagactgttattggtgagagagacataaagattgatgatatacaaaaa

SEQ ID NO: 221264 - DNA, 1062 bp, Artificial Sequence
  derived and/or modified sequence
tcagggagtttctggagggctgaacacgtggaggcaaacaggaaggtgaagaagaacttatcctatcaggacggaaggtcctgtgctcgggatcttccagacgtcgcgaccgctgataacagctttcatgtggaacttgggattaatatcaagcaagccatggattttgtctccactgaacttgggcatcatggacagtttccattccagcagttaagggcttcctgactttcaacagtggtgctgatcccagttctgaagagtggaacatcagagagcctcccctcctcagccacttgactctaaattgccccctctgaggtcaaggaacacaagatggttttggaaatgctgaacccgatacattataacatcaccagcatcgtgcctgaagccatgcctgctgccaccatgccagtcctgctcctcactggcctttttctcttggtgtggaattatgagggcacatcctcaataccaggtcctggctactgcatgggaattggacccctcatctcccacggcagattcctgtggatggggatcggcagtgcctgcaactactacaaccgggtatatggagaattcatgcgagtctggatctctggagaggaaacactcattatcagcaagtcctcaagtatgttccacataatgaagcacaatcattacagctctcgattcggcagcaaacttgggctgcagtgcatcggtatgcatgagaaaggcatcatatttaacaacaatccagagctctggaaaacaactcgacccttctttatgaaagctctgtcaggccccggccttgttcgtatggtcacagtctgtgctgaatccctcaaaacacatctggacaggttggaggaggtgaccaatgaatcgggctatgtggacgtgttgacccttctgcgtcgtgtcatgctggacacctctaacacgctcttcttgaggatccctttggacgaaagtgctatcgtggttaaaatccaaggttattttgatgcatggcaagctctcctcatcaaaccagacatcttctttaagatttcttggctatacaaa

SEQ ID NO: 221265 - DNA, 1793 bp, Artificial Sequence
  derived and/or modified sequence
actccactgtcagatccctctccaactcttcctgtgtgggatgatggcatttttcacagaagaagggggacatgttgatatggcctacaagcatgtggaaaagctccctgagttccccgcctgccccacctgctgatttctcaggaccgctgataacagctttcatgtggaacttgggattaatatcaagcaagccatggattttgtctccactgaacttgggcatcatggacagtttccattccagcagttaagggcttcctgactttcaacagtggtgctgatcccagttctgaagagtggaacatcagagagcctcccctcctcagccacttgactctaaattgccccctctgaggtcaaggaacacaagatggttttggaaatgctgaacccgatacattataacatcaccagcatcgtgcctgaagccatgcctgctgccaccatgccagtcctgctcctcactggcctttttctcttggtgtggaattatgagggcacatcctcaataccaggtcctggctactgcatgggaattggacccctcatctcccacggcagattcctgtggatggggatcggcagtgcctgcaactactacaaccgggtatatggagaattcatgcgagtctggatctctggagaggaaacactcattatcagcaagtcctcaagtatgttccacataatgaagcacaatcattacagctctcgattcggcagcaaacttgggctgcagtgcatcggtatgcatgagaaaggcatcatatttaacaacaatccagagctctggaaaacaactcgacccttctttatgaaagctctgtcaggccccggccttgttcgtatggtcacagtctgtgctgaatccctcaaaacacatctgctcctgttcacacctgctagtgtgaattaaagtactttaattttgttttctgtggaggtggaaaagcaacattcatagtctttggagaaatgcttagaaattcagcatttgacccttgctgtgaattaagcccaattaattcctgtttgtctacatatgatctgtctgtggcaaaagtttaatcagaggaaattctttcccagtctgtcgatttatgcctcagccacttgcctgtgctacaattcattgtgttacctgtagattcaggtaatacaaactatatataatcatcaagtaatacaaactaatttagtaatagcctgggttaagtattattagggccctgtgtctgctgtagaaaaaaaaattcacatgatgcacttcaaattcaaataaaaatccttttggcatgttcccatttttgcttagctcaattagtgtggctaaccaagagataactgtaaatgtgacattgatttgctcttactacagcttcagtgattgggggaggaaaagtcccaacccaatgggctcaaacttctaaggggtactcctctcatccccttatccttctccctcgacattttctccctctttcttcccatgaccccaaagccaagggcaacagatcagtaaagaacgtggtcagagtagaacccctgaagtattttttaatcctacctcaaaatttaacagttacctgagagatttaacattatctagttcattgaatcattgtatgtggtcatggataaattgcacaccttggaattcgctttctaaaggaaatcaaatgaatggaggaactttccaaacaccactttacttgtgttatatagccaatataactatctctactgaatgtcattgaaaaactaaaaaattaaacttatttacaaatagg

SEQ ID NO: 221266 - DNA, 832 bp, Artificial Sequence
  derived and/or modified sequence
cgtggaggcaaacaggaaggtgaagaagaacttatcctatcaggacggaaggtcctgtgctcgggatcttccagacgtcgcgactctaaattgccccctctgaggtcaaggaacacaagatggttttggaaatgctgaacccgatacattataacatcaccagcatcgtgcctgaagccatgcctgctgccaccatgccagtcctgctcctcactggcctttttctcttggtgtggaattatgagggcacatcctcaataccaggtcctggctactgcatgggaattggacccctcatctcccacggcagattcctgtggatggggatcggcagtgcctgcaactactacaaccgggtatatggagaattcatgcgagtctggatctctggagaggaaacactcattatcagcaagtcctcaagtatgttccacataatgaagcacaatcattacagctctcgattcggcagcaaacttgggctgcagtgcatcggtatgcatgagaaaggcatcatatttaacaacaatccagagctctggaaaacaactcgacccttctttatgaaagctctgtcaggccccggccttgttcgtatggtcacagtctgtgctgaatccctcaaaacacatctggacaggttggaggaggtgaccaatgaatcgggctatgtggacgtgttgacccttctgcgtcgtgtcatgctggacacctctaacacgctcttcttgaggatccctttggacggtactgaaattttcactctcacatcttgaccatctgtcctttactgaacaaggagctaggagggataacagaccaaaggaatcac

SEQ ID NO: 221267 - DNA, 1196 bp, Artificial Sequence
  derived and/or modified sequence
gagtttctggagggctgaacacgtggaggcaaacaggaaggtgaagaagaacttatcctatcaggacggaaggtcctgtgctcgggatcttccagacgtcgcgactctaaattgccccctctgaggtcaaggaacacaagatggttttggaaatgctgaacccgatacattataacatcaccagcatcgtgcctgaagccatgcctgctgccaccatgccagtcctgctcctcactggcctttttctcttggtgtggaattatgagggcacatcctcaataccaggtcctggctactgcatgggaattggacccctcatctcccacggcagattcctgtggatggggatcggcagtgcctgcaactactacaaccgggtatatggagaattcatgcgagtctggatctctggagaggaaacactcattatcagcaagtcctcaagtatgttccacataatgaagcacaatcattacagctctcgattcggcagcaaacttgggctgcagtgcatcggtatgcatgagaaaggcatcatatttaacaacaatccagagctctggaaaacaactcgacccttctttatgaaagctctgtcaggccccggccttgttcgtatggtcacagtctgtgctgaatccctcaaaacacatctggacaggttggaggaggtgaccaatgaatcgggctatgtggacgtgttgacccttctgcgtcgtgtcatgctggacacctctaacacgctcttcttgaggatccctttggacgaaagtgctatcgtggttaaaatccaaggttattttgatgcatggcaagctctcctcatcaaaccagacatcttctttaagatttcttggctatacaaaaagtatgagaagtctgtcaaggatttgaaagatgccatagaagttctgatagcagaaaaaagacgcaggatttccacagaagagaaactggaagaatgtatggactttgccactgagttgattttagcagagaaacgtggtgacctgacaagagagaatgtgaaccagtgcatattggaaatgctgatcgcagctcctgacaccatgtctgtctctttgttcttcatgctatttctcattgcaaagcaccctaatgttgaagaggcaataataaaggaaatccagactgttattggtgagagagacataaagattgatgatatacaaaaa

SEQ ID NO: 221268 - DNA, 1032 bp, Artificial Sequence
  derived and/or modified sequence
gaacacgtggaggcaaacaggaaggtgaagaagaacttatcctatcaggacggaaggtcctgtgctcgggatcttccagacgtcgcgtatgtatctcttaatctgactgagccctcaacctgtgggatcagacactctttccaggactctaaattgccccctctgaggtcaaggaacacaagatggttttggaaatgctgaacccgatacattataacatcaccagcatcgtgcctgaagccatgcctgctgccaccatgccagtcctgctcctcactggcctttttctcttggtgtggaattatgagggcacatcctcaataccaggtcctggctactgcatgggaattggacccctcatctcccacggcagattcctgtggatggggatcggcagtgcctgcaactactacaaccgggtatatggagaattcatgcgagtctggatctctggagaggaaacactcattatcagcaagtcctcaagtatgttccacataatgaagcacaatcattacagctctcgattcggcagcaaacttgggctgcagtgcatcggtatgcatgagaaaggcatcatatttaacaacaatccagagctctggaaaacaactcgacccttctttatgaaagctctgtcaggccccggccttgttcgtatggtcacagtctgtgctgaatccctcaaaacacatctggacaggttggaggaggtgaccaatgaatcgggctatgtggacgtgttgacccttctgcgtcgtgtcatgctggacacctctaacacgctcttcttgaggatccctttggacgaaagtgctatcgtggttaaaatccaaggttattttgatgcatggcaagctctcctcatcaaaccagacatcttctttaagatttcttggctatacaaaaagtatgagaagtctgtcaaggatttgaaagatgccatagaagttctgatagcagaaaaaagacgcaggatttccacagaagagaaactggaagaatgtatggactttgccactgagttgattt

SEQ ID NO: 221269 - DNA, 592 bp, Artificial Sequence
  derived and/or modified sequence
gaacgtgaccaactggagcctgacaggaggtccctggcactggtcagcccatcaaaccaggactctaaattgccccctctgaggtcaaggaacacaagatggttttggaaatgctgaacccgatacattataacatcaccagcatcgtgcctgaagccatgcctgctgccaccatgccagtcctgctcctcactggcctttttctcttggtgtggaattatgagggcacatcctcaataccaggtcctggctactgcatgggaattggacccctcatctcccacggcagattcctgtggatggggatcggcagtgcctgcaactactacaaccgggtatatggagaattcatgcgagtctggatctctggagaggaaacactcattatcagcaagtcctcaagtatgttccacataatgaagcacaatcattacagctctcgattcggcagcaaacttgggctgcagtgcatcggtatgcatgagaaaggcatcatatttaacaacaatccagagctctggaaaacaactcgacccttctttatgaaagctctgtcaggccccggccttgttcgtatggtcacagtctgtgc

SEQ ID NO: 221270 - DNA, 1958 bp, Artificial Sequence
  derived and/or modified sequence
acattataaaacagtaagtgaatctgtactgtacagcaccctctgaagcaacaggagctatagatgaaccttttaggggattctgtaatttttctgtccctttgatttccacaggactctaaattgccccctctgaggtcaaggaacacaagatggttttggaaatgctgaacccgatacattataacatcaccagcatcgtgcctgaagccatgcctgctgccaccatgccagtcctgctcctcactggcctttttctcttggtgtggaattatgagggcacatcctcaataccaggtcctggctactgcatgggaattggacccctcatctcccacggcagattcctgtggatggggatcggcagtgcctgcaactactacaaccgggtatatggagaattcatgcgagtctggatctctggagaggaaacactcattatcagcaagtcctcaagtatgttccacataatgaagcacaatcattacagctctcgattcggcagcaaacttgggctgcagtgcatcggtatgcatgagaaaggcatcatatttaacaacaatccagagctctggaaaacaactcgacccttctttatgaaagctctgtcaggccccggccttgttcgtatggtcacagtctgtgctgaatccctcaaaacacatctggacaggttggaggaggtgaccaatgaatcgggctatgtggacgtgttgacccttctgcgtcgtgtcatgctggacacctctaacacgctcttcttgaggatccctttggacgaaagtgctatcgtggttaaaatccaaggttattttgatgcatggcaagctctcctcatcaaaccagacatcttctttaagatttcttggctatacaaaaagtatgagaagtctgtcaaggatttgaaagatgccatagaagttctgatagcagaaaaaagacgcaggatttccacagaagagaaactggaagaatgtatggactttgccactgagttgattttagcagagaaacgtggtgacctgacaagagagaatgtgaaccagtgcatattggaaatgctgatcgcagctcctgacaccatgtctgtctctttgttcttcatgctatttctcattgcaaagcaccctaatgttgaagaggcaataataaaggaaatccagactgttattggtgagagagacataaagattgatgatatacaaaaattaaaagtgatggaaaacttcatttatgagagcatgcggtaccagcctgtcgtggacttggtcatgcgcaaagccttagaagatgatgtaatcgatggctacccagtgaaaaaggggacaaacattatcctgaatattggaaggatgcacagactcgagtttttccccaaacccaatgaatttactcttgaaaattttgcaaagaatgttccttataggtactttcagccatttggctttgggccccgtggctgtgcaggaaagtacatcgccatggtgatgatgaaagccatcctcgttacacttctgagacgattccacgtgaagacattgcaaggacagtgtgttgagagcatacagaagatacacgacttgtccttgcacccagatgagactaaaaacatgctggaaatgatctttaccccaagaaactcagacaggtgtctggaacactagagaaggctggtcagtacccactctggagcatttctcatcagtagttcacatacaaatcatccatccttgccaatagtgtcatcctcacagtgaacactcagtggcccatggcattttataggcatacctcctatgggttgtcaccaagctaggtgctatttgtcatctgctcctgttcacaccagagaaccaggctacaagagaaaaagcagaggccaagagtttgagggagaaatagtcggtgaagaaaccgtatccataaagacccgattccaccaaatgtgctttgagaag

SEQ ID NO: 221271 - DNA, 993 bp, Artificial Sequence
  derived and/or modified sequence
gggagtttctggagggctgaacacgtggaggcaaacaggaaggtgaagaagaacttatcctatcaggacggaaggtcctgtgctcgggatcttccagacgtcgcactccactgtcagatccctctccaactcttcctgtgtgggatgatggcatttttcacagaagaagggggacatgttgatatggcctacaagcatgtggaaaagctccctgagttccccgcctgccccacctgctgatttctcaggaccgctgataacagctttcatgtggaacttgggattaatatcaagcaagccatggattttgtctccactgaacttgggcatcatggacagtttccattccagcagttaagggcttcctgactttcaacagtggtgctgatcccagttctgaagagtggaacatcagagagcctcccctcctcagccacttgactctaaattgccccctctgaggtcaaggaacacaagatggttttggaaatgctgaacccgatacattataacatcaccagcatcgtgcctgaagccatgcctgctgccaccatgccagtcctgctcctcactggcctttttctcttggtgtggaattatgagggcacatcctcaataccaggtcctggctactgcatgggaattggacccctcatctcccacggcagattcctgtggatggggatcggcagtgcctgcaactactacaaccgggtatatggagaattcatgcgagtctggatctctggagaggaaacactcattatcagcaagtcctcaagtatgttccacataatgaagcacaatcattacagctctcgattcggcagcaaacttgggctgcagtgcatcggtatgcatgagaaaggcatcatatttaacaacaatccagagctctggaaaacaactcgacccttctttatgaaagctctgtcaggccccggccttgttcgtatggtcacagtctgtgctgaatccctcaaaacacatctg

SEQ ID NO: 221272 - DNA, 872 bp, Artificial Sequence
  derived and/or modified sequence
gagtttctggagggctgaacacgtggaggcaaacaggaaggtgaagaagaacttatcctatcaggacggaaggtcctgtgctcgggatcttccagacgtcgcgactctaaattgccccctctgaggtcaaggaacacaagatggttttggaaatgctgaacccgatacattataacatcaccagcatcgtgcctgaagccatgcctgctgccaccatgccagtcctgctcctcactggcctttttctcttggtgtggaattatgagggcacatcctcaataccaggtcctggctactgcatgggaattggacccctcatctcccacggcagattcctgtggatggggatcggcagtgcctgcaactactacaaccgggtatatggagaattcatgcgagtctggatctctggagaggaaacactcattatcagcaagtcctcaagtatgttccacataatgaagcacaatcattacagctctcgattcggcagcaaacttgggctgcagtgcatcggtatgcatgagaaaggcatcatatttaacaacaatccagagctctggaaaacaactcgacccttctttatgaaagaaagtgctatcgtggttaaaatccaaggttattttgatgcatggcaagctctcctcatcaaaccagacatcttctttaagatttcttggctatacaaaaagtatgagaagtctgtcaaggatttgaaagatgccatagaagttctgatagcagaaaaaagacgcaggatttccacagaagagaaactggaagaatgtatggactttgccactgagttgattttagcagagaaacgtggtgacctgacaagagagaatgtgaaccagtgcatattggaaatg

SEQ ID NO: 221273 - DNA, 1512 bp, Artificial Sequence
  derived and/or modified sequence
atggtgctggagatgctgaaccccatccactacaacatcaccagcatcgtgcccgaggccatgcccgccgccaccatgcccgtgctgctgctgaccggcctgttcctgctggtgtggaactacgagggcaccagcagcatccccggccccggctactgcatgggcatcggccccctgatcagccacggcagattcctgtggatgggcatcggcagcgcctgcaactactacaacagagtgtacggcgagttcatgagagtgtggatcagcggcgaggagaccctgatcatcagcaagagcagcagcatgttccacatcatgaagcacaaccactacagcagcagattcggcagcaagctgggcctgcagtgcatcggcatgcacgagaagggcatcatcttcaacaacaaccccgagctgtggaagaccaccagacccttcttcatgaaggccctgagcggccccggcctggtgagaatggtgaccgtgtgcgccgagagcctgaagacccacctggacagactggaggaggtgaccaacgagagcggctacgtggacgtgctgaccctgctgagaagagtgatgctggacaccagcaacaccctgttcctgagaatccccctggacgagagcgccatcgtggtgaagatccagggctacttcgacgcctggcaggccctgctgatcaagcccgacatcttcttcaagatcagctggctgtacaagaagtacgagaagagcgtgaaggacctgaaggacgccatcgaggtgctgatcgccgagaagagaagaagaatcagcaccgaggagaagctggaggagtgcatggacttcgccaccgagctgatcctggccgagaagagaggcgacctgaccagagagaacgtgaaccagtgcatcctggagatgctgatcgccgcccccgacaccatgagcgtgagcctgttcttcatgctgttcctgatcgccaagcaccccaacgtggaggaggccatcatcaaggagatccagaccgtgatcggcgagagagacatcaagatcgacgacatccagaagctgaaggtgatggagaacttcatctacgagagcatgagataccagcccgtggtggacctggtgatgagaaaggccctggaggacgacgtgatcgacggctaccccgtgaagaagggcaccaacatcatcctgaacatcggcagaatgcacagactggagttcttccccaagcccaacgagttcaccctggagaacttcgccaagaacgtgccctacagatacttccagcccttcggcttcggccccagaggctgcgccggcaagtacatcgccatggtgatgatgaaggccatcctggtgaccctgctgagaagattccacgtgaagaccctgcagggccagtgcgtggagagcatccagaagatccacgacctgagcctgcaccccgacgagaccaagaacatgctggagatgatcttcacccccagaaacagcgacagatgcctggagcactag

SEQ ID NO: 221274 - DNA, 501 bp, Artificial Sequence
  derived and/or modified sequence
atggtgctggagatgctgaaccccatccactacaacatcaccagcatcgtgcccgaggccatgcccgccgccaccatgcccgtgctgctgctgaccggcctgttcctgctggtgtggaactacgagggcaccagcagcatccccggccccggctactgcatgggcatcggccccctgatcagccacggcagattcctgtggatgggcatcggcagcgcctgcaactactacaacagagtgtacggcgagttcatgagagtgtggatcagcggcgaggagaccctgatcatcagcaagagcagcagcatgttccacatcatgaagcacaaccactacagcagcagattcggcagcaagctgggcctgcagtgcatcggcatgcacgagaagggcatcatcttcaacaacaaccccgagctgtggaagaccaccagacccttcttcatgaaggccctgagcggccccggcctggtgagaatggtgaccgtgtgcgccgagtag

SEQ ID NO: 221275 - DNA, 657 bp, Artificial Sequence
  derived and/or modified sequence
atggtgctggagatgctgaaccccatccactacaacatcaccagcatcgtgcccgaggccatgcccgccgccaccatgcccgtgctgctgctgaccggcctgttcctgctggtgtggaactacgagggcaccagcagcatccccggccccggctactgcatgggcatcggccccctgatcagccacggcagattcctgtggatgggcatcggcagcgcctgcaactactacaacagagtgtacggcgagttcatgagagtgtggatcagcggcgaggagaccctgatcatcagcaagagcagcagcatgttccacatcatgaagcacaaccactacagcagcagattcggcagcaagctgggcctgcagtgcatcggcatgcacgagaagggcatcatcttcaacaacaaccccgagctgtggaagaccaccagacccttcttcatgaaggccctgagcggccccggcctggtgagaatggtgaccgtgtgcgccgagagcctgaagacccacctggacagactggaggaggtgaccaacgagagcggctacgtggacgtgctgaccctgctgagaagagtgatgctggacaccagcaacaccctgttcctgagaatccccctggacggcaccgagatcttcaccctgaccagctag

SEQ ID NO: 221276 - DNA, 1080 bp, Artificial Sequence
  derived and/or modified sequence
atggtgctggagatgctgaaccccatccactacaacatcaccagcatcgtgcccgaggccatgcccgccgccaccatgcccgtgctgctgctgaccggcctgttcctgctggtgtggaactacgagggcaccagcagcatccccggccccggctactgcatgggcatcggccccctgatcagccacggcagattcctgtggatgggcatcggcagcgcctgcaactactacaacagagtgtacggcgagttcatgagagtgtggatcagcggcgaggagaccctgatcatcagcaagagcagcagcatgttccacatcatgaagcacaaccactacagcagcagattcggcagcaagctgggcctgcagtgcatcggcatgcacgagaagggcatcatcttcaacaacaaccccgagctgtggaagaccaccagacccttcttcatgaaggccctgagcggccccggcctggtgagaatggtgaccgtgtgcgccgagagcctgaagacccacctggacagactggaggaggtgaccaacgagagcggctacgtggacgtgctgaccctgctgagaagagtgatgctggacaccagcaacaccctgttcctgagaatccccctggacgagagcgccatcgtggtgaagatccagggctacttcgacgcctggcaggccctgctgatcaagcccgacatcttcttcaagatcagctggctgtacaagaagtacgagaagagcgtgaaggacctgaaggacgccatcgaggtgctgatcgccgagaagagaagaagaatcagcaccgaggagaagctggaggagtgcatggacttcgccaccgagctgatcctggccgagaagagaggcgacctgaccagagagaacgtgaaccagtgcatcctggagatgctgatcgccgcccccgacaccatgagcgtgagcctgttcttcatgctgttcctgatcgccaagcaccccaacgtggaggaggccatcatcaaggagatccagaccgtgatcggcgagagagacatcaagatcgacgacatccagaagctgaagaagcacgacgccaagtag

SEQ ID NO: 221277 - DNA, 1059 bp, Artificial Sequence
  derived and/or modified sequence
atggtgctggagatgctgaaccccatccactacaacatcaccagcatcgtgcccgaggccatgcccgccgccaccatgcccgtgctgctgctgaccggcctgttcctgctggtgtggaactacgagggcaccagcagcatccccggccccggctactgcatgggcatcggccccctgatcagccacggcagattcctgtggatgggcatcggcagcgcctgcaactactacaacagagtgtacggcgagttcatgagagtgtggatcagcggcgaggagaccctgatcatcagcaagagcagcagcatgttccacatcatgaagcacaaccactacagcagcagattcggcagcaagctgggcctgcagtgcatcggcatgcacgagaagggcatcatcttcaacaacaaccccgagctgtggaagaccaccagacccttcttcatgaaggccctgagcggccccggcctggtgagaatggtgaccgtgtgcgccgagagcctgaagacccacctggacagactggaggaggtgaccaacgagagcggctacgtggacgtgctgaccctgctgagaagagtgatgctggacaccagcaacaccctgttcctgagaatccccctggacgagagcgccatcgtggtgaagatccagggctacttcgacgcctggcaggccctgctgatcaagcccgacatcttcttcaagatcagctggctgtacaagaagtacgagaagagcgtgaaggacctgaaggacgccatcgaggtgctgatcgccgagaagagaagaagaatcagcaccgaggagaagctggaggagtgcatggacttcgccaccgagctgatcctggccgagaagagaggcgacctgaccagagagaacgtgaaccagtgcatcctggagatgctgatcgccgcccccgacaccatgagcgtgagcctgttcttcatgctgttcctgatcgccaagcaccccaacgtggaggaggccatcatcaaggagatccagaccgtgatcggcgagagagacatcaagatcgacgacatccagaagtag

SEQ ID NO: 221278 - DNA, 729 bp, Artificial Sequence
  derived and/or modified sequence
atggtgctggagatgctgaaccccatccactacaacatcaccagcatcgtgcccgaggccatgcccgccgccaccatgcccgtgctgctgctgaccggcctgttcctgctggtgtggaactacgagggcaccagcagcatccccggccccggctactgcatgggcatcggccccctgatcagccacggcagattcctgtggatgggcatcggcagcgcctgcaactactacaacagagtgtacggcgagttcatgagagtgtggatcagcggcgaggagaccctgatcatcagcaagagcagcagcatgttccacatcatgaagcacaaccactacagcagcagattcggcagcaagctgggcctgcagtgcatcggcatgcacgagaagggcatcatcttcaacaacaaccccgagctgtggaagaccaccagacccttcttcatgaaggccctgagcggccccggcctggtgagaatggtgaccgtgtgcgccgagagcctgaagacccacctggacagactggaggaggtgaccaacgagagcggctacgtggacgtgctgaccctgctgagaagagtgatgctggacaccagcaacaccctgttcctgagaatccccctggacgagagcgccatcgtggtgaagatccagggctacttcgacgcctggcaggccctgctgatcaagcccgacatcttcttcaagatcagctggctgtacaagtag

SEQ ID NO: 221279 - DNA, 546 bp, Artificial Sequence
  derived and/or modified sequence
atggtgctggagatgctgaaccccatccactacaacatcaccagcatcgtgcccgaggccatgcccgccgccaccatgcccgtgctgctgctgaccggcctgttcctgctggtgtggaactacgagggcaccagcagcatccccggccccggctactgcatgggcatcggccccctgatcagccacggcagattcctgtggatgggcatcggcagcgcctgcaactactacaacagagtgtacggcgagttcatgagagtgtggatcagcggcgaggagaccctgatcatcagcaagagcagcagcatgttccacatcatgaagcacaaccactacagcagcagattcggcagcaagctgggcctgcagtgcatcggcatgcacgagaagggcatcatcttcaacaacaaccccgagctgtggaagaccaccagacccttcttcatgaaggccctgagcggccccggcctggtgagaatggtgaccgtgtgcgccgagagcctgaagacccacctgctgctgttcacccccgccagcgtgaactag

SEQ ID NO: 221280 - DNA, 852 bp, Artificial Sequence
  derived and/or modified sequence
atggtgctggagatgctgaaccccatccactacaacatcaccagcatcgtgcccgaggccatgcccgccgccaccatgcccgtgctgctgctgaccggcctgttcctgctggtgtggaactacgagggcaccagcagcatccccggccccggctactgcatgggcatcggccccctgatcagccacggcagattcctgtggatgggcatcggcagcgcctgcaactactacaacagagtgtacggcgagttcatgagagtgtggatcagcggcgaggagaccctgatcatcagcaagagcagcagcatgttccacatcatgaagcacaaccactacagcagcagattcggcagcaagctgggcctgcagtgcatcggcatgcacgagaagggcatcatcttcaacaacaaccccgagctgtggaagaccaccagacccttcttcatgaaggccctgagcggccccggcctggtgagaatggtgaccgtgtgcgccgagagcctgaagacccacctggacagactggaggaggtgaccaacgagagcggctacgtggacgtgctgaccctgctgagaagagtgatgctggacaccagcaacaccctgttcctgagaatccccctggacgagagcgccatcgtggtgaagatccagggctacttcgacgcctggcaggccctgctgatcaagcccgacatcttcttcaagatcagctggctgtacaagaagtacgagaagagcgtgaaggacctgaaggacgccatcgaggtgctgatcgccgagaagagaagaagaatcagcaccgaggagaagctggaggagtgcatggacttcgccaccgagctgatctag

SEQ ID NO: 221281 - DNA, 498 bp, Artificial Sequence
  derived and/or modified sequence
atggtgctggagatgctgaaccccatccactacaacatcaccagcatcgtgcccgaggccatgcccgccgccaccatgcccgtgctgctgctgaccggcctgttcctgctggtgtggaactacgagggcaccagcagcatccccggccccggctactgcatgggcatcggccccctgatcagccacggcagattcctgtggatgggcatcggcagcgcctgcaactactacaacagagtgtacggcgagttcatgagagtgtggatcagcggcgaggagaccctgatcatcagcaagagcagcagcatgttccacatcatgaagcacaaccactacagcagcagattcggcagcaagctgggcctgcagtgcatcggcatgcacgagaagggcatcatcttcaacaacaaccccgagctgtggaagaccaccagacccttcttcatgaaggccctgagcggccccggcctggtgagaatggtgaccgtgtgcgcctag

SEQ ID NO: 221282 - DNA, 519 bp, Artificial Sequence
  derived and/or modified sequence
atggtgctggagatgctgaaccccatccactacaacatcaccagcatcgtgcccgaggccatgcccgccgccaccatgcccgtgctgctgctgaccggcctgttcctgctggtgtggaactacgagggcaccagcagcatccccggccccggctactgcatgggcatcggccccctgatcagccacggcagattcctgtggatgggcatcggcagcgcctgcaactactacaacagagtgtacggcgagttcatgagagtgtggatcagcggcgaggagaccctgatcatcagcaagagcagcagcatgttccacatcatgaagcacaaccactacagcagcagattcggcagcaagctgggcctgcagtgcatcggcatgcacgagaagggcatcatcttcaacaacaaccccgagctgtggaagaccaccagacccttcttcatgaaggccctgagcggccccggcctggtgagaatggtgaccgtgtgcgccgagagcctgaagacccacctgtag

SEQ ID NO: 221283 - DNA, 735 bp, Artificial Sequence
  derived and/or modified sequence
atggtgctggagatgctgaaccccatccactacaacatcaccagcatcgtgcccgaggccatgcccgccgccaccatgcccgtgctgctgctgaccggcctgttcctgctggtgtggaactacgagggcaccagcagcatccccggccccggctactgcatgggcatcggccccctgatcagccacggcagattcctgtggatgggcatcggcagcgcctgcaactactacaacagagtgtacggcgagttcatgagagtgtggatcagcggcgaggagaccctgatcatcagcaagagcagcagcatgttccacatcatgaagcacaaccactacagcagcagattcggcagcaagctgggcctgcagtgcatcggcatgcacgagaagggcatcatcttcaacaacaaccccgagctgtggaagaccaccagacccttcttcatgaaggagagcgccatcgtggtgaagatccagggctacttcgacgcctggcaggccctgctgatcaagcccgacatcttcttcaagatcagctggctgtacaagaagtacgagaagagcgtgaaggacctgaaggacgccatcgaggtgctgatcgccgagaagagaagaagaatcagcaccgaggagaagctggaggagtgcatggacttcgccaccgagctgatcctggccgagaagagaggcgacctgaccagagagaacgtgaaccagtgcatcctggagatgtag

SEQ ID NO: 221284 - protein, 510 aa, Artificial Sequence
  derived and/or modified sequence
MDEKTKKAEEMALSLTRAVAGGDEQVAMKCAIWLAEQRVPLSVQLKPEVSPTQDIRLWVSVEDAQMHTVTIWLTVRPDMTVASLKDMVFLDYGFPPVLQQWVIGQRLARDQETLHSHGVRQNGDSAYLYLLSARNTSLNPQELQRERQLRMLEDLGFKDLTLQPRGPLEPGPPKPGVPQEPGRGQPDAVPEPPPVGWQCPGCTFINKPTRPGCEMCCRARPEAYQVPASYQPDEEERARLAGEEEALRQYQQRKQQQQEGNYLQHVQLDQRSLVLNTEPAECPVCYSVLAPGEAVVLRECLHTFCRECLQGTIRNSQEAEVSCPFIDNTYSCSGKLLEREIKALLTPEDYQRFLDLGISIAENRSAFSYHCKTPDCKGWCFFEDDVNEFTCPVCFHVNCLLCKAIHEQMNCKEYQEDLALRAQNDVAARQTTEMLKVMLQQGEAMRCPQCQIVVQKKDGCDWIRCTVCHTEICWVTKGPRWGPGGPGDTSGGCRCRVNGIPCHPSCQNCH

SEQ ID NO: 221285 - protein, 336 aa, Artificial Sequence
  derived and/or modified sequence
MDEKTKKAEEMALSLTRAVAGGDEQVAMKCAIWLAEQRVPLSVQLKPEVSPTQDIRLWVSVEDAQMHTVTIWLTVRPDMTVASLKDMVFLDYGFPPVLQQWVIGQRLARDQETLHSHGVRQNGDSAYLYLLSARNTSLNPQELQRERQLRMLEDLGFKDLTLQPRGPLEPGPPKPGVPQEPGRGQPDAVPEPPPVGWQCPGCTFINKPTRPGCEMCCRARPEAYQVPASYQPDEEERARLAGEEEALRQYQQRKQQQQEGNYLQHVQLDQRSLVLNTEPAECPVCYSVLAPGEAVVLRSACRAPSATARRRRSPAPSLTTPTRARASCWRGRSRRS

SEQ ID NO: 221286 - protein, 272 aa, Artificial Sequence
  derived and/or modified sequence
MDEKTKKAEEMALSLTRAVAGGDEQVAMKCAIWLAEQRVPLSVQLKPEVSPTQDIRLWVSVEDAQMHTVTIWLTVRPDMTVASLKDMVFLDYGFPPVLQQWVIGQRLARDQETLHSHGVRQNGDSAYLYLLSARNTSLNPQELQRERQLRMLEDLGFKDLTLQPRGPLEPGPPKPGVPQEPGRGQPDAVPEPPPVGWQCPGCTFINKPTRPGCEMCCRARPEAYQVPASYQPDEEERARLAGEEEALRQYQQGVPAGHHPQQPGGGGLLPLH

SEQ ID NO: 221287 - protein, 117 aa, Artificial Sequence
  derived and/or modified sequence
MDEKTKKAEEMALSLTRAVAGGDEQVAMKCAIWLAEQRVPLSVQLKPEVSPTQDIRLWVSVEDAQMHTVTIWLTVRPDMTVASLKDMVFLDYGFPPVLQQWVIGQRLARDQETLHSH

SEQ ID NO: 221288 - DNA, 1533 bp, Artificial Sequence
  derived and/or modified sequence
atggatgaaaaaacgaaaaaggccgaagagatggcactctcactgaccagggcagtagccggcggcgacgagcaggtcgcaatgaagtgtgcgatatggcttgccgaacagagagtcccactgagcgtgcagctgaagcccgaggtgagccccacacaggatattcgattgtgggtgtccgtagaagacgctcaaatgcacactgttaccatctggcttacggtgaggcccgatatgaccgtcgctagcttaaaggacatggttttcctggattacggattccctccagtactgcaacagtgggtgatcggtcagcgcttggcaagagatcaagagactctccacagccatggggtgagacagaacggcgactccgcttatttataccttctgtccgcacggaatactagtctgaatcctcaggaacttcagcgtgagcgtcagctcagaatgctcgaagaccttggatttaaggacctcaccctgcagccgagggggcccctggagccgggtcctcctaagccgggggtccctcaggagcctggaagagggcagcccgatgctgttcccgagcctcccccggtggggtggcaatgtccagggtgtacctttattaacaagccaactcgccccggttgtgagatgtgctgtcgggctcgtccggaagcctaccaggtgcccgcaagctaccagcctgatgaagaagagcgggcacggttggcgggcgaggaagaggcgctgcggcagtatcagcagcgtaaacagcagcagcaggagggcaactatctccagcacgtacagctggatcagagatccctcgttctcaatacagaacctgcggaatgcccggtttgttactcagtgctggcgcctggcgaagccgtggttcttagggaatgcttacacacattttgtagggagtgtctccaaggaacaattcggaacagtcaggaagctgaagtcagctgcccattcattgacaacacctactcatgcagtggtaagctgctggagcgggaaataaaggccctcctcacacccgaggattaccagagatttctggatcttggcatatcaatcgcagagaacaggagcgctttcagttaccactgcaagaccccagattgtaaggggtggtgcttttttgaggacgacgttaacgaatttacttgcccggtgtgttttcatgtcaactgtctgctctgtaaggcaatccacgaacagatgaattgtaaagaatatcaagaggacttggccctgagggcccaaaacgatgtggctgcccggcagaccacagagatgctaaaagtgatgctacagcagggagaagcaatgagatgtccacagtgccagattgtggtgcagaagaaggacgggtgtgactggatcaggtgcaccgtgtgtcatactgagatttgctgggtgaccaaggggccgagatgggggcctggtggacccggggacacatcaggaggctgcagatgtagagtgaatggcattccgtgccatcccagctgtcagaactgtcattag

SEQ ID NO: 221289 - DNA, 1011 bp, Artificial Sequence
  derived and/or modified sequence
atggacgaaaaaacaaagaaggcggaggaaatggccctgtcactgactcgagcagtggctggcggggatgagcaggtggccatgaagtgcgccatatggctcgctgaacaaagagtgccactcagtgttcagttgaagcctgaggtgtctcccacccaagatatccgcctttgggtgtccgtggaagacgctcagatgcatacggtcaccatctggttgaccgtcaggcccgacatgaccgtcgcttcgctgaaggatatggtcttcttagattatggcttcccgcccgtccttcagcagtgggtcatcgggcaacggctcgcacgggatcaggagactcttcattcccatggagttaggcagaacggtgattcagcttatctgtacttgctttccgctaggaacacctctctgaacccccaagaactacaacgggagagacagcttaggatgctcgaggatctgggattcaaagatctgacgctgcagccccggggccctctcgagcccggtccgcccaaacccggcgtgcctcaagaacctggaaggggccagcccgacgcagtcccggaacctccacctgtagggtggcaatgtcccggctgtacattcattaacaagcctaccagacccggctgtgaaatgtgttgtcgggctagacccgaggcttaccaggtccccgcttcttatcaacctgatgaggaggaacgagcaagactggccggggaggaagaggctctccgtcagtaccagcagcgcaagcagcagcagcaggagggaaattaccttcagcacgtccagttagaccagaggtcactggtgctgaatactgaacctgccgaatgtcccgtgtgttattcagtcctcgccccgggcgaggctgtggtccttcggtccgcctgtagggcaccatcagccaccgctagacgaaggcggagcccagctccctcactcacaacccccacgcgggcaagggctagctgctggaggggaagaagccgaaggtcctag

SEQ ID NO: 221290 - DNA, 819 bp, Artificial Sequence
  derived and/or modified sequence
atggacgagaagacaaagaaggccgaagagatggccctgagccttactagggctgttgctggtggggatgagcaggtcgccatgaagtgtgcaatctggctcgccgagcagcgggtgcctcttagtgtgcagcttaagcccgaagtgagccccacacaggatatcaggctctgggttagtgtagaggacgcacagatgcatactgtgacgatctggctgaccgtgcgacccgacatgacagttgcatcgcttaaggacatggtcttcctcgattatgggtttccacccgtgctacaacaatgggtaatcgggcagcgtctcgcacgcgaccaggaaaccttgcattctcacggggtcagacaaaatggagacagtgcttatctttacctgctgtcggcaaggaatacaagccttaatcctcaagagctgcagcgggaaagacagcttcggatgttagaggatctcgggtttaaggatctcacactgcagccaaggggacctctggagccaggaccccccaaaccaggcgtgcctcaggaaccggggcgtggccaacctgacgcagttccagagccgcccccagtaggctggcagtgtccaggatgcacttttatcaacaaacccacacggccagggtgcgagatgtgctgtagggcccgccccgaggcttaccaagttcccgcctcatatcagcccgatgaggaggaaagagcacgccttgctggagaagaagaggcactgcgacagtatcagcagggcgttcccgccgggcatcatcctcaacagcctgggggcggcggcctcctccccctgcactag

SEQ ID NO: 221291 - DNA, 354 bp, Artificial Sequence
  derived and/or modified sequence
atggacgagaaaaccaaaaaggccgaagagatggctctcagtctgaccagggctgtcgcggggggagatgagcaggttgccatgaaatgcgcgatttggttggccgagcaaagggtcccattgagcgttcagctcaagccggaggtgagtcctacacaagatatcagattgtgggtcagcgtcgaagatgcccagatgcataccgtgaccatctggctgacggtgcgcccagacatgacagtcgcatcactcaaggacatggtttttcttgactacgggtttccacccgtcctccagcaatgggtgatcgggcaacgtttagctcgtgaccaagaaaccctgcattcacattag

SEQ ID NO: 221292 - DNA, 819 bp, Artificial Sequence
  derived and/or modified sequence
atggatgaaaagacaaaaaaagccgaggagatggctctcagcctgacaagggctgttgcaggcggcgatgagcaggtcgccatgaagtgtgctatttggctggccgaacagagagtccccctctctgtgcaattaaagccggaagtcagcccaacccaggacatacgcctctgggtgtcagtcgaggacgcacaaatgcacactgttactatctggttaactgtgcggcccgacatgactgtggcatctcttaaggacatggtcttcctggactatggttttccccccgtgctgcaacagtgggtcatcggtcagagattggcgcgcgaccaggagaccctgcactcccatggcgttcggcagaatggtgactcagcttacctgtatctcctctcagccaggaatacctccctgaatccccaggaactgcagagggagcgtcagctccgaatgttggaggacctggggttcaaggacctgacactgcaaccacgcggcccgttggaacccggcccacccaaacctggggtgccacaagaacccggaagggggcagccggatgccgtacccgagccgccccctgttgggtggcagtgcccaggctgcacttttatcaataagccgacgcggccggggtgtgagatgtgttgccgcgcaagacctgaagcataccaggtgcctgcttcttatcagccagacgaagaagaaagagcccggctggctggggaggaagaggccttgagacagtatcagcagggggtccctgctggccatcacccacaacagccaggcggcgggggcctgctgcctctgcattag

SEQ ID NO: 221293 - DNA, 1533 bp, Artificial Sequence
  derived and/or modified sequence
atggatgagaagaccaagaaggccgaggagatggccctgagcctgaccagggctgtggccggaggagatgagcaggtggccatgaagtgtgccatctggctggccgagcagagggtgcccctgtctgtgcagctgaagccagaggtgagccccacccaggacatccggctgtgggtgtctgtggaggatgcccagatgcacacagtgaccatctggctgactgtgcggccagacatgacagtggccagcctgaaggacatggtgttcctggactatggcttcccccctgtgctgcagcagtgggtgattggccagaggctggcccgggaccaggagaccctgcacagccatggagtgcggcagaatggagacagcgcctacctgtacctgctgagcgccaggaacaccagcctgaacccccaggagctgcagcgggagcggcagctgaggatgctggaggacctgggcttcaaggacctgaccctgcagccccggggccccctggagcccggcccccccaagccaggagtgccccaggagcccggccggggccagccagatgctgtgcctgagcccccacctgtgggctggcagtgccccggctgcaccttcatcaacaagcccaccaggcctggctgtgagatgtgctgccgggcccggcctgaggcctaccaggtgcctgccagctaccagccagatgaggaggagcgggcccggctggccggggaggaggaggccctgcggcagtaccagcagaggaagcagcagcagcaggagggcaactacctgcagcacgtgcagctggaccagaggagcctggtgctgaacacagagccagcagaatgtcctgtgtgctacagcgtgctggcccctggagaggccgtggtgctgagagaatgtctgcacaccttctgcagagaatgtctgcagggcaccatccggaacagccaggaggccgaggtgtcctgccccttcatcgacaacacctacagctgcagcggcaagctgctggagcgggagatcaaggccctgctgaccccagaggactaccagcgcttcctggacctgggcatcagcattgctgagaacagaagtgccttctcctaccactgcaagaccccagactgcaagggctggtgcttctttgaagatgatgtgaatgagttcacctgccctgtgtgcttccacgtgaactgcctgctgtgcaaggccatccacgagcagatgaactgcaaggagtaccaggaggacctggccctgcgggcccagaatgatgtggccgcccggcagaccacagagatgctgaaggtgatgctgcagcagggcgaggccatgcgctgcccccagtgccagatcgtggtgcagaagaaggatggctgtgactggatccgctgcaccgtgtgccacacagagatctgctgggtgaccaagggcccccgctggggccctgggggccctggggacaccagcggcggctgccgctgccgggtgaatggcatcccctgccaccccagctgccagaactgccactag

SEQ ID NO: 221294 - DNA, 1011 bp, Artificial Sequence
  derived and/or modified sequence
atggatgagaagaccaagaaggccgaggagatggccctgagcctgaccagggctgtggccggaggagatgagcaggtggccatgaagtgtgccatctggctggccgagcagagggtgcccctgtctgtgcagctgaagccagaggtgagccccacccaggacatccggctgtgggtgtctgtggaggatgcccagatgcacacagtgaccatctggctgactgtgcggccagacatgacagtggccagcctgaaggacatggtgttcctggactatggcttcccccctgtgctgcagcagtgggtgattggccagaggctggcccgggaccaggagaccctgcacagccatggagtgcggcagaatggagacagcgcctacctgtacctgctgagcgccaggaacaccagcctgaacccccaggagctgcagcgggagcggcagctgaggatgctggaggacctgggcttcaaggacctgaccctgcagccccggggccccctggagcccggcccccccaagccaggagtgccccaggagcccggccggggccagccagatgctgtgcctgagcccccacctgtgggctggcagtgccccggctgcaccttcatcaacaagcccaccaggcctggctgtgagatgtgctgccgggcccggcctgaggcctaccaggtgcctgccagctaccagccagatgaggaggagcgggcccggctggccggggaggaggaggccctgcggcagtaccagcagaggaagcagcagcagcaggagggcaactacctgcagcacgtgcagctggaccagaggagcctggtgctgaacacagagccagcagaatgtcctgtgtgctacagcgtgctggcccctggagaggccgtggtgctgcggagcgcctgccgggcccccagcgccacagccaggagaagaagaagccctgcccccagcctgaccacccccacccgggcccgggccagctgctggaggggccgcagccgccgctcctag

SEQ ID NO: 221295 - DNA, 819 bp, Artificial Sequence
  derived and/or modified sequence
atggatgagaagaccaagaaggccgaggagatggccctgagcctgaccagggctgtggccggaggagatgagcaggtggccatgaagtgtgccatctggctggccgagcagagggtgcccctgtctgtgcagctgaagccagaggtgagccccacccaggacatccggctgtgggtgtctgtggaggatgcccagatgcacacagtgaccatctggctgactgtgcggccagacatgacagtggccagcctgaaggacatggtgttcctggactatggcttcccccctgtgctgcagcagtgggtgattggccagaggctggcccgggaccaggagaccctgcacagccatggagtgcggcagaatggagacagcgcctacctgtacctgctgagcgccaggaacaccagcctgaacccccaggagctgcagcgggagcggcagctgaggatgctggaggacctgggcttcaaggacctgaccctgcagccccggggccccctggagcccggcccccccaagccaggagtgccccaggagcccggccggggccagccagatgctgtgcctgagcccccacctgtgggctggcagtgccccggctgcaccttcatcaacaagcccaccaggcctggctgtgagatgtgctgccgggcccggcctgaggcctaccaggtgcctgccagctaccagccagatgaggaggagcgggcccggctggccggggaggaggaggccctgcggcagtaccagcagggcgtgcctgctggccaccacccccagcagcccggcggcggcggcctgctgcccctgcactag

SEQ ID NO: 221296 - DNA, 354 bp, Artificial Sequence
  derived and/or modified sequence
atggatgagaagaccaagaaggccgaggagatggccctgagcctgaccagggctgtggccggaggagatgagcaggtggccatgaagtgtgccatctggctggccgagcagagggtgcccctgtctgtgcagctgaagccagaggtgagccccacccaggacatccggctgtgggtgtctgtggaggatgcccagatgcacacagtgaccatctggctgactgtgcggccagacatgacagtggccagcctgaaggacatggtgttcctggactatggcttcccccctgtgctgcagcagtgggtgattggccagaggctggcccgggaccaggagaccctgcacagccactag

SEQ ID NO: 221297 - DNA, 1533 bp, Artificial Sequence
  derived and/or modified sequence
atggacgagaagaccaagaaggccgaggagatggccctgagcctgaccagggcagtggccgggggcgatgagcaggttgccatgaaatgcgcaatctggctggccgaacagcgcgtgccattgagcgtccagttgaagcctgaagtatcccctacccaggatataagactgtgggtctcagtcgaggatgcccagatgcacactgtcactatatggctgaccgtgcggcccgacatgacagtggccagcctgaaggacatggttttcttggattatggttttcctcccgtgcttcagcaatgggtcatcggacaacggctggcgagggaccaagagacccttcacagccatggagtcaggcaaaacggagatagcgcttatctctatctgttgtccgcacgtaatacatcactgaatccccaggagctccaacgcgagcggcaattgcgtatgctagaggacctggggtttaaggacctaactctgcagccacgaggaccactggagccaggtccacctaaaccaggggtaccacaggagcctggacgtggccagcctgatgctgtacctgagcctccaccagtcggttggcagtgcccaggttgtactttcataaataagccaacgagacccggatgtgaaatgtgttgccgcgcccggccagaagcttatcaggtgcctgcctcttatcagccagatgaggaggaacgtgccaggcttgcaggtgaagaggaagctttaaggcaataccaacagcgaaaacaacagcaacaggagggaaattacctgcaacatgtgcaattggatcaacgctctctggttctgaatactgaaccggctgagtgtcccgtttgttatagtgtattggcccccggtgaggccgttgtcctgagagagtgcttgcatacattttgccgcgagtgtctgcaagggactattcggaactcacaggaggcggaggtgagttgtcccttcatcgacaacacatacagttgtagcggcaagctgcttgagagggagataaaagcgcttctgacaccagaggattaccagcggttcctggacctgggtatatccatcgccgaaaatagaagcgcattttcctaccattgcaagacccccgattgcaaaggctggtgcttcttcgaagacgatgtgaacgaattcacttgtcccgtgtgctttcacgtcaactgtcttctttgtaaagctattcacgagcaaatgaactgtaaggaatatcaggaagacctggcacttcgcgcccaaaacgatgtggcagccagacagactacagagatgctgaaagttatgctccaacaaggggaggctatgcgctgcccccagtgccagattgtggttcagaagaaagatggatgtgactggataaggtgtactgtgtgtcacacagagatatgttgggttacgaagggcccacgctggggccctggcggtccaggggacacatcgggggggtgtaggtgtcgagtcaatggtataccctgccacccatcatgtcagaactgccactag

SEQ ID NO: 221298 - DNA, 1011 bp, Artificial Sequence
  derived and/or modified sequence
atggacgagaagaccaagaaggccgaggagatggccctgagcctgacacgagctgtcgctggcggggacgagcaggtggccatgaaatgtgcaatctggcttgccgagcagcgcgtgcctctgagcgttcagctgaagcccgaagtctcccctacacaggatattagactgtgggtgagtgtggaagatgcccagatgcacaccgtgactatatggctgacggttcgccccgacatgactgtggcctccctgaaagatatggtctttctagactatggattcccgcctgttcttcaacagtgggtaattggacagagattagccagagatcaagaaacgctccactcacatggcgtgcggcagaatggagactccgcttacctctatctcctgagcgcgcgtaacacttccctgaatcctcaggagctgcagcgggagcgacagctcagaatgctcgaggacctgggattcaaggacttgaccctgcagccgaggggtcctctggaacccggcccccccaagcccggggtgccacaggagcctgggagaggacaacctgatgctgtccctgagccaccaccggttggctggcagtgccccggatgtacattcattaataaaccaacacgtcccggatgcgaaatgtgctgccgggctaggcccgaagcctatcaagtgccggctagttaccagcccgacgaggaggagcgggcacgtcttgccggtgaagaggaggccctccgccagtatcagcagcgcaagcaacaacagcaggaagggaactacctccagcatgttcagctggaccagaggtctttagtgctgaacactgaacctgccgaatgtcctgtatgctattccgtcctggcccccggagaagccgtcgtgcttcgtagtgcttgtagggctccttccgctactgcacgcagacgcagaagcccagcaccaagtctcactacaccgacccgcgccagggcaagttgttggcgcgggcgctcccgcagaagctag

SEQ ID NO: 221299 - DNA, 819 bp, Artificial Sequence
  derived and/or modified sequence
atggacgagaagaccaagaaggccgaggagatggccctgagcctgacccgcgcagtcgcaggaggtgacgagcaggtggccatgaaatgtgcaatttggttagccgaacagagggtgcccctctcagtccaactaaagcctgaggtgtcgcctacacaggatatccgcctctgggtgtcagtggaggacgcgcagatgcacactgttacgatctggctgacggtgcggccggacatgaccgtggcttccttgaaggacatggtttttctcgactacggctttccgccagtactccagcagtgggtgatcggccagcggctggcccgagatcaggaaaccctgcactcacacggcgtgagacagaacggcgatagtgcatatctctatctgctgtctgcgaggaatacctcactcaacccccaggaactccaaagggaaagacagttgcgaatgctagaagacctgggctttaaggatctcactctgcagccccggggcccgttggaacccgggccaccaaaaccgggcgtgcctcaggaacctgggagaggtcaaccggacgccgtacctgaacctcctcctgtcggctggcagtgccccggttgtacattcatcaacaaacccaccaggcccggctgcgaaatgtgttgccgtgccaggcccgaggcttaccaggttcctgcctcgtaccagcctgatgaggaagagcgggcccgcttagcaggagaagaagaggctctgcggcagtatcagcagggggtcccagccggacatcacccacaacagcctggcggcggcgggctccttccattgcactag

SEQ ID NO: 221300 - DNA, 354 bp, Artificial Sequence
  derived and/or modified sequence
atggacgagaagaccaagaaggccgaggagatggccctgagcctgacaagagctgtggctggaggcgatgagcaagtagcaatgaagtgtgccatctggctggcggagcagcgggtacccctgtcagtacagctcaagcctgaagtaagccccactcaggatattcgcctctgggtgagcgtggaggacgctcaaatgcacaccgtgacaatctggctcactgtgcgccctgatatgacagtggcttccctgaaggatatggtgttcctggactatggctttccccctgtgctgcagcagtgggtaataggccagagactcgcacgggatcaggagacacttcattcccattag

SEQ ID NO: 221301 - DNA, 819 bp, Artificial Sequence
  derived and/or modified sequence
atggacgagaagaccaagaaggccgaggagatggccctgagcctgacacgcgccgtggcagggggagatgaacaggtcgccatgaagtgcgcgatttggctagcggagcagagggtccccctgtccgtgcagctgaagcccgaagtgagccctacccaggacatcaggttgtgggtgtcagtagaggatgcacaaatgcacactgtgacaatatggctgacagtgaggcccgatatgaccgtcgcttcattgaaagatatggttttcctggactacggatttccgccagtattgcagcaatgggtgatcggccagcggctagcccgcgaccaggagaccttgcatagccacggcgtgcgtcagaacggcgatagcgcttatttgtatcttctaagcgcccgaaacacctcgttgaacccccaggagctccaacgagaaaggcagctgagaatgcttgaagatctgggatttaaagacttgacactccagccgcggggccctttagagcctggtccccccaagccgggggtaccccaggagccaggccgcgggcaaccagatgctgtacctgagccaccaccagtaggatggcagtgtcctggctgcactttcattaataaacctacaagaccaggatgcgagatgtgctgtcgggcaagacccgaagcctatcaagtgcccgcctcctaccagcccgacgaggaggagcgtgctagactggctggggaggaagaggccctccgccagtatcagcagggggtgcctgctgggcaccatcctcagcagcccggcgggggcggacttttgccactgcactag

SEQ ID NO: 221302 - DNA, 1533 bp, Artificial Sequence
  derived and/or modified sequence
atggacgagaaaacaaaaaaagctgaagagatggccctgtcactgacccgcgctgtggcaggcggagatgaacaggttgctatgaagtgcgcaatatggcttgcggagcagcgagtccccctgtcggtgcagctgaaacctgaggtatcgccgacacaggacattaggctgtgggtgtcagtggaagatgcccagatgcataccgttaccatatggctcacggtgcgtccggacatgactgtcgccagcctgaaagatatggtgttcttggactacgggtttcccccagtcctgcaacagtgggtgataggccaacggttagctagagatcaagaaaccctgcactctcatggagtgcgccaaaatggagactctgcatacctatacttattatctgctcggaatacttccttaaatccccaggagctccagcgtgagcggcagcttcggatgctggaggatctgggtttcaaggaccttactctgcagccaagagggcctcttgagcccggacccccaaaacccggagtgcctcaggagcccggaagagggcagccagacgcagtcccggaaccccctccggtgggatggcagtgtcctggatgtacattcatcaacaaacctactcgacccggatgtgaaatgtgttgccgggcacggccagaagcctaccaggtgcctgcttcctaccagcccgatgaagaagaaagggcacgcttggctggagaagaagaggcacttagacagtatcaacagcgtaagcagcaacagcaggaaggcaattatcttcagcacgttcagcttgaccagcgttctctcgttctgaacactgaaccagcagaatgcccagtttgctattccgttctggcgccaggagaggccgtggttttgcgcgagtgcttgcacacattttgccgggaatgcctccagggtacaattcggaattctcaagaagccgaagtaagctgccctttcatcgataatacctatagctgcagcggtaagctcttagaacgcgaaataaaggccctgctcactcccgaggattaccaacgattcctcgatctaggcattagtattgccgagaaccgatcagcctttagctaccattgtaagacccctgattgtaaggggtggtgcttcttcgaggatgatgtgaacgagtttacctgtccagtgtgtttccacgtcaactgtctgctatgcaaagcaatccatgagcagatgaactgtaaagagtaccaagaggacttagcgctcagggcgcaaaacgacgtggcggctcggcagaccaccgagatgctgaaggtaatgctccaacagggcgaggccatgagatgtcctcagtgccaaatagtggtgcagaagaaagatggttgcgactggattcgatgcacggtgtgtcacacagaaatctgttgggtgaccaagggcccacgttggggcccagggggacccggtgacacctccggtggctgtaggtgtcgcgtcaacgggataccgtgtcatcccagctgccagaattgtcactag

SEQ ID NO: 221303 - DNA, 1011 bp, Artificial Sequence
  derived and/or modified sequence
atggatgaaaagacaaaaaaggccgaggaaatggcgctgagtctcacccgggcagttgctggaggtgacgagcaggtggccatgaaatgcgcaatttggctggcggagcagagggtccccctgtctgtccaattgaaacctgaagtaagtcccactcaggatatcagattatgggtttcggtagaggacgctcagatgcacaccgtcactatttggcttaccgtaagacccgatatgaccgtggcaagcctgaaggacatggtcttcttagactacggcttccctcctgtcctgcagcaatgggtcattggccagcgcctcgcccgagaccaggaaaccctccatagtcacggcgtgcggcaaaatggggactccgcttatctgtacctgttatcagcccgaaatacctcccttaacccacaggagttacagagagagaggcaacttagaatgctggaggatctcggctttaaggatctgaccctgcaaccacgagggcctctggagccaggcccacccaaacccggagtccctcaggagcccggtcggggtcagccagacgcagtgcctgagccgcctcccgtggggtggcagtgtcctggctgtaccttcatcaacaagccaacgcgaccgggatgtgaaatgtgctgccgggctagaccagaggcctaccaggtaccagcttcataccagcctgacgaggaagagagggccagattagccggtgaggaagaggccctgcgccagtaccagcaaagaaaacagcaacagcaggaaggcaactatttgcagcacgtacaattggatcagcgcagtctcgttctcaatacagaacctgccgagtgcccagtctgttacagtgttctggcgccaggtgaggcagttgtgttgcgctctgcctgcagggctccgtccgccaccgccaggcgccgacggtcacccgctccaagcctgaccactccaacccgggctagggccagctgttggcgcggaaggtccaggagaagctag

SEQ ID NO: 221304 - DNA, 819 bp, Artificial Sequence
  derived and/or modified sequence
atggacgagaagacaaaaaaggccgaggagatggccctttctcttactcgcgctgtggcgggaggagatgaacaagtggccatgaagtgtgccatttggttggcagaacaacgggtgcccctttcagtgcaattgaagccggaggtctctccaactcaagatattaggctgtgggttagcgtcgaagacgcccagatgcacaccgtcactatctggctgaccgtgcgacccgacatgaccgtcgccagcttgaaggatatggtgtttctcgattatggtttcccccctgtccttcaacagtgggtgataggtcagcggcttgcgagggatcaggagacactgcatagccacggagtgaggcagaatggggatagtgcgtacctctaccttctttctgcacggaatacatctctaaaccctcaggagttgcaacgagaaaggcagttgagaatgctggaagatctgggatttaaggacttaaccctgcagcctaggggtcctctggaacctggaccacctaaacccggagttccacaggagccaggcagaggacaacctgacgcagtgcccgagccaccccctgtgggttggcagtgtcctggctgcaccttcattaacaagcctacgaggccaggctgtgagatgtgttgtcgggcacgcccagaagcctatcaggtgcctgcttcctaccagcctgatgaagaggagcgagcgcgactggcaggcgaagaggaagccttgaggcagtaccagcagggggtgccagcgggacaccatccccagcagcccggtggcggtggcttgctccctctgcactag

SEQ ID NO: 221305 - DNA, 354 bp, Artificial Sequence
  derived and/or modified sequence
atggacgagaagaccaaaaaagctgaagagatggccctgagtctcacaagagcggtggcgggtggcgatgaacaggtggccatgaagtgcgctatctggctggccgagcagagagtgccactgtccgttcagttaaagccagaggtctctccaactcaggatatccgcctgtgggttagcgttgaggatgcacagatgcatacagtgactatctggcttacagtgcgcccagatatgacagtggcctctctgaaggatatggtgttcctcgattacggattcccccctgttcttcagcagtgggtaatcggacagagactggctagagaccaggagacattgcactctcattag

SEQ ID NO: 221306 - DNA, 819 bp, Artificial Sequence
  derived and/or modified sequence
atggatgagaaaaccaagaaggccgaggaaatggctctctcccttaccagggccgtggcagggggagatgaacaagtggcaatgaagtgtgccatttggcttgctgagcagcgagtgcccctttcagtgcagttgaaacccgaggtttcccctacgcaggacattaggctgtgggtaagcgtggaagatgctcagatgcataccgtcaccatttggcttaccgtgcgcccagacatgacagttgccagcctgaaggatatggtgtttctggattacgggttcccgcctgtgctacagcagtgggttattgggcaaaggctggccagggaccaagaaactctgcacagccacggtgttagacagaatggcgactccgcctatctttatttgctgagcgctcggaacaccagtctgaatcctcaggagctccagcgcgaacgacagctccgcatgctggaagaccttggctttaaggaccttacgctgcagcccaggggtcccttggagccaggccctcctaaacccggtgtgccacaggagccaggcaggggtcagcccgacgctgtaccagaacctccgcctgtgggctggcagtgtcccggatgcaccttcattaataaaccaaccagacccggttgtgagatgtgctgtcgagcgaggccagaagcgtaccaggtccctgcctcttaccagccggacgaggaggaaagggccaggctggccggtgaggaggaagcactccggcagtaccagcaaggcgttcctgccggacatcacccacaacagccaggagggggtggcctgctgcctctccattag

SEQ ID NO: 221307 - DNA, 2774 bp, Artificial Sequence
  derived and/or modified sequence
cgcctgcggcccagctccttcccgcggctctgcgatgcggcccgcagggtgacccgggcgggagtccggggacccgcgatcagccccggaggacggggtggggtcgccccaaacaggagcgccgggaccgctgggaccccgcactcggcgtccgccgccgccgggtagccgggcagtggaggtcccggatgaggcgacaatttttccggccccccctcccagtcccgccccacttccggggccgccactttcactttctcttccgccgaagccgctccccttgcgaagaactggggcctcccgggaggagagagggctttgccttgaaacccgggacgccaggggcgctcccgcaagtgggggtcctccgggacttggaacgccccggctgggtggtgtccgggcgtcctttccccgcttcttcccacctcggctggtcccgtttcctcctgcgcccagtgcggacctgtctcggcgcccgctgccctctcaccgccccacgcaggatcccggcctggtcaccgggcagtgtgatgcttcccgactgccgcggggacagcgaggcacacacagggcttgggccgcgccggaggccacacggcctggctgagttgctcctggtctcccgcctctcccaggcgacccggaggtagcatttcccaggaggcacggtcccccccagggggatgggcacagccacgccagatggacgagaagaccaagaaagcagaggaaatggccctgagcctcacccgagcagtggcgggcggggatgaacaggtggcaatgaagtgtgccatctggctggcagagcaacgggtgcccctgagtgtgcaactgaagcctgaggtctccccaacgcaggacatcaggctgtgggtgagcgtggaggatgctcagatgcacaccgtcaccatctggctcacagtgcgccctgatatgacagtggcgtctctcaaggacatggtttttctggactatggcttcccaccagtcttgcagcagtgggtgattgggcagcggctggcacgagaccaggagaccctgcactcccatggggtgcggcagaatggggacagtgcctacctctatctgctgtcagcccgcaacacctccctcaaccctcaggagctgcagcgggagcggcagctgcggatgctggaagatctgggcttcaaggacctcacgctgcagccgcggggccctctggagccaggccccccaaagcccggggtcccccaggaacccggacgggggcagccagatgcagtgcctgagcccccaccggtgggctggcagtgccccgggtgcaccttcatcaacaagcccacgcggcctggctgtgagatgtgctgccgggcgcgccccgaggcctaccaggtccccgcctcataccagcccgacgaggaggagcgagcgcgcctggcgggcgaggaggaggcgctgcgtcagtaccagcagcggaagcagcagcagcaggaggggaactacctgcagcacgtccagctggaccagaggagcctggtgctgaacacggagcccgccgagtgccccgtgtgctactcggtgctggcgcccggcgaggccgtggtgctgcgtgagtgtctgcacaccttctgcagggagtgcctgcagggcaccatccgcaacagccaggaggcggaggtctcctgccccttcattgacaacacctactcgtgctcgggcaagctgctggagagggagatcaaggcgctcctgacccctgaggattaccagcgatttctagacctgggcatctccattgctgaaaaccgcagtgccttcagctaccattgcaagaccccagattgcaagggatggtgcttctttgaggatgatgtcaatgagttcacctgccctgtgtgtttccacgtcaactgcctgctctgcaaggccatccatgagcagatgaactgcaaggagtatcaggaggacctggccctgcgggctcagaacgatgtggctgcccggcagacgacagagatgctgaaggtgatgctgcagcagggcgaggccatgcgctgcccccagtgccagatcgtggtacagaagaaggacggctgcgactggatccgctgcaccgtctgccacaccgagatctgctgggtcaccaagggcccacgctggggccctgggggcccaggagacaccagcgggggctgccgctgcagggtaaatgggattccttgccacccaagctgtcagaactgccactgagctaaagatggtggggccacatgctgacccagccccacatccacattctgttagaatgtagctcagggagcttcgtggacggccttgcttgctgtagcgttgtaggggccctgcctgcactgcggttgtccacggtcacatctgccccagtgcctttgtccttcccttggggcttgccggccagacttctctcccctgcggctcccacctctgcctgaccccagccttaaacatagcccctggccagaggccttgctgggtggagcctctgtgtgactccatactcctcccaccacaacactcatctgtcaaacaccaagcactctcagcctccccgccttcagctgtcagctttctggggctaacttctctgcctttgtggttggaggcctgaggcctcttggaactcttgctaacctgttcagagccaggaaggagactgcacagttttgaaagcacagcccgtcaggtccggctctgcgtctccctctctgcagcctgtgtaagctattataattaaaatggttttccgggaa

SEQ ID NO: 221308 - DNA, 2752 bp, Artificial Sequence
  derived and/or modified sequence
ccccgcctgcggcccagctccttcccgcggctctgcgatgcggcccgcagggtgacccgggcgggagtccggggacccgcgatcagccccggaggacggggtggggtcgccccaaacaggagcgccgggaccgctgggaccccgcactcggcgtccgccgccgccgggtagccgggcagtggaggtcccggatgaggcgacaatttttccggccccccctcccagtcccgccccacttccggggccgccactttcactttctcttccgccgaagccgctccccttgcgaagaactggggcctcccgggaggagagagggctttgccttgaaacccgggacgccaggggcgctcccgcaagtgggggtcctccgggacttggaacgccccggctgggtggtgtccgggcgtcctttccccgcttcttcccacctcggctggtcccgtttcctcctgcgcccagtgcggacctgtctcggcgcccgctgccctctcaccgccccacgcaggatcccggcctggtcaccgggcagtgtgatgcttcccgactgccgcggggacagcgaggcacacacagggcttgggccgcgccggaggccacacggcctggctgagttgctcctggtctcccgcctctcccaggcgacccggaggtagcatttcccaggaggcacggtcccccccagggggatgggcacagccacgccagatggacgagaagaccaagaaagcagaggaaatggccctgagcctcacccgagcagtggcgggcggggatgaacaggtggcaatgaagtgtgccatctggctggcagagcaacgggtgcccctgagtgtgcaactgaagcctgaggtctccccaacgcaggacatcaggctgtgggtgagcgtggaggatgctcagatgcacaccgtcaccatctggctcacagtgcgccctgatatgacagtggcgtctctcaaggacatggtttttctggactatggcttcccaccagtcttgcagcagtgggtgattgggcagcggctggcacgagaccaggagaccctgcactcccatggggtgcggcagaatggggacagtgcctacctctatctgctgtcagcccgcaacacctccctcaaccctcaggagctgcagcgggagcggcagctgcggatgctggaagatctgggcttcaaggacctcacgctgcagccgcggggccctctggagccaggccccccaaagcccggggtcccccaggaacccggacgggggcagccagatgcagtgcctgagcccccaccggtgggctggcagtgccccgggtgcaccttcatcaacaagcccacgcggcctggctgtgagatgtgctgccgggcgcgccccgaggcctaccaggtccccgcctcataccagcccgacgaggaggagcgagcgcgcctggcgggcgaggaggaggcgctgcgtcagtaccagcagcggaagcagcagcagcaggaggggaactacctgcagcacgtccagctggaccagaggagcctggtgctgaacacggagcccgccgagtgccccgtgtgctactcggtgctggcgcccggcgaggccgtggtgctgcggagtgcctgcagggcaccatccgcaacagccaggaggcggaggtctcctgccccttcattgacaacacctactcgtgctcgggcaagctgctggagagggagatcaaggcgctcctgacccctgaggattaccagcgatttctagacctgggcatctccattgctgaaaaccgcagtgccttcagctaccattgcaagaccccagattgcaagggatggtgcttctttgaggatgatgtcaatgagttcacctgccctgtgtgtttccacgtcaactgcctgctctgcaaggccatccatgagcagatgaactgcaaggagtatcaggaggacctggccctgcgggctcagaacgatgtggctgcccggcagacgacagagatgctgaaggtgatgctgcagcagggcgaggccatgcgctgcccccagtgccagatcgtggtacagaagaaggacggctgcgactggatccgctgcaccgtctgccacaccgagatctgctgggtcaccaagggcccacgctggggccctgggggcccaggagacaccagcgggggctgccgctgcagggtaaatgggattccttgccacccaagctgtcagaactgccactgagctaaagatggtggggccacatgctgacccagccccacatccacattctgttagaatgtagctcagggagcttcgtggacggccttgcttgctgtagcgttgtaggggccctgcctgcactgcggttgtccacggtcacatctgccccagtgcctttgtccttcccttggggcttgccggccagacttctctcccctgcggctcccacctctgcctgaccccagccttaaacatagcccctggccagaggccttgctgggtggagcctctgtgtgactccatactcctcccaccacaacactcatctgtcaaacaccaagcactctcagcctccccgccttcagctgtcagctttctggggctaacttctctgcctttgtggttggaggcctgaggcctcttggaactcttgctaacctgttcagagccaggaaggagactgcacagttttgaaagcacagcccgtcaggtccggctctgcgtctccctctctgcagcctgtgtaagctattataattaaaatggttttccgggaa

SEQ ID NO: 221309 - DNA, 1653 bp, Artificial Sequence
  derived and/or modified sequence
cactttctcttccgccgaagccgctccccttgcgaagaactggggcctcccgggaggagagagggctttgccttgaaacccgggacgccaggggcgctcccgcaagtgggggtcctccgggacttggaacgccccggctgggtggtgtccgggcgtcctttccccgcttcttcccacctcggctggtcccgtttcctcctgcgcccagtgcggacctgtctcggcgcccgctgccctctcaccgccccacgcaggatcccggcctggtcaccgggcagtgtgatgcttcccgactgccgcggggacagcgaggcacacacagggcttgggccgcgccggaggccacacggcctggctgagttgctcctggtctcccgcctctcccaggcgacccggaggtagcatttcccaggaggcacggtcccccccagggggatgggcacagccacgccagatggacgagaagaccaagaaagcagaggaaatggccctgagcctcacccgagcagtggcgggcggggatgaacaggtggcaatgaagtgtgccatctggctggcagagcaacgggtgcccctgagtgtgcaactgaagcctgaggtctccccaacgcaggacatcaggctgtgggtgagcgtggaggatgctcagatgcacaccgtcaccatctggctcacagtgcgccctgatatgacagtggcgtctctcaaggacatggtttttctggactatggcttcccaccagtcttgcagcagtgggtgattgggcagcggctggcacgagaccaggagaccctgcactcccatggggtgcggcagaatggggacagtgcctacctctatctgctgtcagcccgcaacacctccctcaaccctcaggagctgcagcgggagcggcagctgcggatgctggaagatctgggcttcaaggacctcacgctgcagccgcggggccctctggagccaggccccccaaagcccggggtcccccaggaacccggacgggggcagccagatgcagtgcctgagcccccaccggtgggctggcagtgccccgggtgcaccttcatcaacaagcccacgcggcctggctgtgagatgtgctgccgggcgcgccccgaggcctaccaggtccccgcctcataccagcccgacgaggaggagcgagcgcgcctggcgggcgaggaggaggcgctgcgtcagtaccagcagggagtgcctgcagggcaccatccgcaacagccaggaggcggaggtctcctgccccttcattgacaacacctactcgtgctcgggcaagctgctggagagggagatcaaggcgctcctgacccctgaggattaccagcgatttctagacctgggcatctccattgctgaaaaccgcagtgccttcagctaccattgcaagaccccagattgcaagggatggtgcttctttgaggatgatgtcaatgagttcacctgccctgtgtgtttccacgtcaactgcctgctctgcaaggccatccatgagcagatgaactgcaaggagtatcaggagacaccagcgggggctgccgctgcagggtaaatgggattccttgccacccaagctgtcagaactgccactgagctaaagatggtggggccacatgctgacccagccccacatc

SEQ ID NO: 221310 - DNA, 593 bp, Artificial Sequence
  derived and/or modified sequence
gccggaggaggtgagggatgagattctgcaagtggagcccgcaggatctgctgatcgatgggacgaggaacgggagaaaaattaaagcggcgcatgaggcagacgaatgcaaacttcaccaatagctcaacgaaaagacagacggtgaccgctgagaggcagcgtcggatctgggcgacccggaggtagcatttcccaggaggcacggtcccccccagggggatgggcacagccacgccagatggacgagaagaccaagaaagcagaggaaatggccctgagcctcacccgagcagtggcgggcggggatgaacaggtggcaatgaagtgtgccatctggctggcagagcaacgggtgcccctgagtgtgcaactgaagcctgaggtctccccaacgcaggacatcaggctgtgggtgagcgtggaggatgctcagatgcacaccgtcaccatctggctcacagtgcgccctgatatgacagtggcgtctctcaaggacatggtttttctggactatggcttcccaccagtcttgcagcagtgggtgattgggcagcggctggcacgagaccaggagaccctgcactcccatg

SEQ ID NO: 221311 - DNA, 2613 bp, Artificial Sequence
  derived and/or modified sequence
cgcctgcggcccagctccttcccgcggctctgcgatgcggcccgcagggtgacccgggcgggagtccggggacccgcgatcagccccggaggacggggtggggtcgccccaaacaggagcgccgggaccgctgggaccccgcactcggcgtccgccgccgccgggtagccgggcagtggaggtcccggatgaggcgacaatttttccggccccccctcccagtcccgccccacttccggggccgccactttcactttctcttccgccgaagccgctccccttgcgaagaactggggcctcccgggaggagagagggctttgccttgaaacccgggacgccaggggcgctcccgcaagtgggggtcctccgggacttggaacgccccggctgggtggtgtccgggcgtcctttccccgcttcttcccacctcggctggtcccgtttcctcctgcgcccagtgcggacctgtctcggcgcccgctgccctctcaccgccccacgcaggatcccggcctggtcaccgggcagtgtgatgcttcccgactgccgcggggacagcgaggcacacacagggcttgggccgcgccggaggccacacggcctggctgagttgctcctggtctcccgcctctcccaggcgacccggaggtagcatttcccaggaggcacggtcccccccagggggatgggcacagccacgccagatggacgagaagaccaagaaagcagaggaaatggccctgagcctcacccgagcagtggcgggcggggatgaacaggtggcaatgaagtgtgccatctggctggcagagcaacgggtgcccctgagtgtgcaactgaagcctgaggtctccccaacgcaggacatcaggctgtgggtgagcgtggaggatgctcagatgcacaccgtcaccatctggctcacagtgcgccctgatatgacagtggcgtctctcaaggacatggtttttctggactatggcttcccaccagtcttgcagcagtgggtgattgggcagcggctggcacgagaccaggagaccctgcactcccatggggtgcggcagaatggggacagtgcctacctctatctgctgtcagcccgcaacacctccctcaaccctcaggagctgcagcgggagcggcagctgcggatgctggaagatctgggcttcaaggacctcacgctgcagccgcggggccctctggagccaggccccccaaagcccggggtcccccaggaacccggacgggggcagccagatgcagtgcctgagcccccaccggtgggctggcagtgccccgggtgcaccttcatcaacaagcccacgcggcctggctgtgagatgtgctgccgggcgcgccccgaggcctaccaggtccccgcctcataccagcccgacgaggaggagcgagcgcgcctggcgggcgaggaggaggcgctgcgtcagtaccagcagggagtgcctgcagggcaccatccgcaacagccaggaggcggaggtctcctgccccttcattgacaacacctactcgtgctcgggcaagctgctggagagggagatcaaggcgctcctgacccctgaggattaccagcgatttctagacctgggcatctccattgctgaaaaccgcagtgccttcagctaccattgcaagaccccagattgcaagggatggtgcttctttgaggatgatgtcaatgagttcacctgccctgtgtgtttccacgtcaactgcctgctctgcaaggccatccatgagcagatgaactgcaaggagtatcaggaggacctggccctgcgggctcagaacgatgtggctgcccggcagacgacagagatgctgaaggtgatgctgcagcagggcgaggccatgcgctgcccccagtgccagatcgtggtacagaagaaggacggctgcgactggatccgctgcaccgtctgccacaccgagatctgctgggtcaccaagggcccacgctggggccctgggggcccaggagacaccagcgggggctgccgctgcagggtaaatgggattccttgccacccaagctgtcagaactgccactgagctaaagatggtggggccacatgctgacccagccccacatccacattctgttagaatgtagctcagggagcttcgtggacggccttgcttgctgtagcgttgtaggggccctgcctgcactgcggttgtccacggtcacatctgccccagtgcctttgtccttcccttggggcttgccggccagacttctctcccctgcggctcccacctctgcctgaccccagccttaaacatagcccctggccagaggccttgctgggtggagcctctgtgtgactccatactcctcccaccacaacactcatctgtcaaacaccaagcactctcagcctccccgccttcagctgtcagctttctggggctaacttctctgcctttgtggttggaggcctgaggcctcttggaactcttgctaacctgttcagagccaggaaggagactgcacagttttgaaagcacagcccgtcaggtccggctctgcgtctccctctctgcagcctgtgtaagctattataattaaaatggttttccgggaa

SEQ ID NO: 221312 - DNA, 1533 bp, Artificial Sequence
  derived and/or modified sequence
atggacgagaagaccaagaaggccgaggagatggccctgagcctgaccagagccgtggccggcggcgacgagcaggtggccatgaagtgcgccatctggctggccgagcagagagtgcccctgagcgtgcagctgaagcccgaggtgagccccacccaggacatcagactgtgggtgagcgtggaggacgcccagatgcacaccgtgaccatctggctgaccgtgagacccgacatgaccgtggccagcctgaaggacatggtgttcctggactacggcttcccccccgtgctgcagcagtgggtgatcggccagagactggccagagaccaggagaccctgcacagccacggcgtgagacagaacggcgacagcgcctacctgtacctgctgagcgccagaaacaccagcctgaacccccaggagctgcagagagagagacagctgagaatgctggaggacctgggcttcaaggacctgaccctgcagcccagaggccccctggagcccggcccccccaagcccggcgtgccccaggagcccggcagaggccagcccgacgccgtgcccgagcccccccccgtgggctggcagtgccccggctgcaccttcatcaacaagcccaccagacccggctgcgagatgtgctgcagagccagacccgaggcctaccaggtgcccgccagctaccagcccgacgaggaggagagagccagactggccggcgaggaggaggccctgagacagtaccagcagagaaagcagcagcagcaggagggcaactacctgcagcacgtgcagctggaccagagaagcctggtgctgaacaccgagcccgccgagtgccccgtgtgctacagcgtgctggcccccggcgaggccgtggtgctgagagagtgcctgcacaccttctgcagagagtgcctgcagggcaccatcagaaacagccaggaggccgaggtgagctgccccttcatcgacaacacctacagctgcagcggcaagctgctggagagagagatcaaggccctgctgacccccgaggactaccagagattcctggacctgggcatcagcatcgccgagaacagaagcgccttcagctaccactgcaagacccccgactgcaagggctggtgcttcttcgaggacgacgtgaacgagttcacctgccccgtgtgcttccacgtgaactgcctgctgtgcaaggccatccacgagcagatgaactgcaaggagtaccaggaggacctggccctgagagcccagaacgacgtggccgccagacagaccaccgagatgctgaaggtgatgctgcagcagggcgaggccatgagatgcccccagtgccagatcgtggtgcagaagaaggacggctgcgactggatcagatgcaccgtgtgccacaccgagatctgctgggtgaccaagggccccagatggggccccggcggccccggcgacaccagcggcggctgcagatgcagagtgaacggcatcccctgccaccccagctgccagaactgccactag

SEQ ID NO: 221313 - DNA, 1011 bp, Artificial Sequence
  derived and/or modified sequence
atggacgagaagaccaagaaggccgaggagatggccctgagcctgaccagagccgtggccggcggcgacgagcaggtggccatgaagtgcgccatctggctggccgagcagagagtgcccctgagcgtgcagctgaagcccgaggtgagccccacccaggacatcagactgtgggtgagcgtggaggacgcccagatgcacaccgtgaccatctggctgaccgtgagacccgacatgaccgtggccagcctgaaggacatggtgttcctggactacggcttcccccccgtgctgcagcagtgggtgatcggccagagactggccagagaccaggagaccctgcacagccacggcgtgagacagaacggcgacagcgcctacctgtacctgctgagcgccagaaacaccagcctgaacccccaggagctgcagagagagagacagctgagaatgctggaggacctgggcttcaaggacctgaccctgcagcccagaggccccctggagcccggcccccccaagcccggcgtgccccaggagcccggcagaggccagcccgacgccgtgcccgagcccccccccgtgggctggcagtgccccggctgcaccttcatcaacaagcccaccagacccggctgcgagatgtgctgcagagccagacccgaggcctaccaggtgcccgccagctaccagcccgacgaggaggagagagccagactggccggcgaggaggaggccctgagacagtaccagcagagaaagcagcagcagcaggagggcaactacctgcagcacgtgcagctggaccagagaagcctggtgctgaacaccgagcccgccgagtgccccgtgtgctacagcgtgctggcccccggcgaggccgtggtgctgagaagcgcctgcagagcccccagcgccaccgccagaagaagaagaagccccgcccccagcctgaccacccccaccagagccagagccagctgctggagaggcagaagcagaagaagctag

SEQ ID NO: 221314 - DNA, 819 bp, Artificial Sequence
  derived and/or modified sequence
atggacgagaagaccaagaaggccgaggagatggccctgagcctgaccagagccgtggccggcggcgacgagcaggtggccatgaagtgcgccatctggctggccgagcagagagtgcccctgagcgtgcagctgaagcccgaggtgagccccacccaggacatcagactgtgggtgagcgtggaggacgcccagatgcacaccgtgaccatctggctgaccgtgagacccgacatgaccgtggccagcctgaaggacatggtgttcctggactacggcttcccccccgtgctgcagcagtgggtgatcggccagagactggccagagaccaggagaccctgcacagccacggcgtgagacagaacggcgacagcgcctacctgtacctgctgagcgccagaaacaccagcctgaacccccaggagctgcagagagagagacagctgagaatgctggaggacctgggcttcaaggacctgaccctgcagcccagaggccccctggagcccggcccccccaagcccggcgtgccccaggagcccggcagaggccagcccgacgccgtgcccgagcccccccccgtgggctggcagtgccccggctgcaccttcatcaacaagcccaccagacccggctgcgagatgtgctgcagagccagacccgaggcctaccaggtgcccgccagctaccagcccgacgaggaggagagagccagactggccggcgaggaggaggccctgagacagtaccagcagggcgtgcccgccggccaccacccccagcagcccggcggcggcggcctgctgcccctgcactag

SEQ ID NO: 221315 - DNA, 354 bp, Artificial Sequence
  derived and/or modified sequence
atggacgagaagaccaagaaggccgaggagatggccctgagcctgaccagagccgtggccggcggcgacgagcaggtggccatgaagtgcgccatctggctggccgagcagagagtgcccctgagcgtgcagctgaagcccgaggtgagccccacccaggacatcagactgtgggtgagcgtggaggacgcccagatgcacaccgtgaccatctggctgaccgtgagacccgacatgaccgtggccagcctgaaggacatggtgttcctggactacggcttcccccccgtgctgcagcagtgggtgatcggccagagactggccagagaccaggagaccctgcacagccactag

SEQ ID NO: 221316 - protein, 362 aa, Artificial Sequence
  derived and/or modified sequence
MACAGLLTVCLLRPPAPQPQPQTPRHPQLAPDPGPAGHTLFQDVFRRADKNDDGKLSFEEFQNYFADGVLSLGELQELFSGIDGHLTDNLETEKLCDYFSEHLGVYRPVLAALESLNRAVLAAMDATKLEYERASKVDQFVTRFLLRETVSQLQALQSSLEGASDTLEAQAHGWRSDAESVEAQSRLCGSRRAGRRALRSVSRSSTWSPGSSDTGRSSEAEMQWRLQVNRLQELIDQLECKAPRLEPLREEDLAKGPDLHILMAQRQVQVAEEGLQDFHRALRCYVDFTGAQSHCLHVSAQKMLDGASFTLYEFWQDEASWRRHQQSPGSKAFQRILIDHLRAPDTLTTVFFPASWWIMNNN

SEQ ID NO: 221317 - DNA, 1089 bp, Artificial Sequence
  derived and/or modified sequence
atggcctgcgctggtcttctgaccgtgtgtctgctcaggccacccgcccctcaacctcagccgcaaacacctcgccatccccagctcgctcccgaccccggtcccgccggtcataccctgttccaggacgtcttccggcgagcggacaaaaacgatgatgggaagctctcattcgaggagtttcaaaactactttgctgacggcgtgctcagtttaggcgaattgcaagagctgttctccggcatcgatgggcacctaactgacaacctagagaccgaaaagctatgcgattacttctctgagcacctaggagtttataggcctgtgctggccgccttggagagcctcaatagagctgtgctggccgccatggatgcgaccaagctggagtacgaacgggcctccaaagtggatcaatttgttacgcggtttctcttacgggaaacggtgtcccaactgcaggccttgcaaagtagtctggagggggcctccgatacactcgaagcacaggctcatggatggaggtccgacgctgaatccgtggaggcccaatccagactgtgcggctctcgtagagccggccgtagagctctgcgctccgtgagtaggtcttctacctggtcacctggttcttccgacacgggtcgaagcagcgaggcagagatgcagtggcggttacaagtgaaccggctccaggagctaattgatcagttggagtgtaaggccccgcggctggaacccctgagagaagaagatttggctaagggacccgacttacacatcttgatggcgcagcgacaggtgcaggtggctgaggaaggacttcaggattttcacagggcactgaggtgctatgtggactttacaggcgcccagtctcattgtttgcacgtctcggcccaaaagatgctggacggtgccagtttcaccctttatgaattttggcaggacgaggcctcatggaggcggcaccagcaaagccctggcagtaaggcattccagagaatcctgatagaccatctccgcgcccccgatactctgacgaccgttttcttccccgccagctggtggatcatgaacaacaactag

SEQ ID NO: 221318 - DNA, 1089 bp, Artificial Sequence
  derived and/or modified sequence
atggcctgtgccggcctgctgactgtgtgcctgctgcggcccccagccccccagccccagccccagacccccaggcacccccagctggccccagaccccggccctgctggccacaccctcttccaggatgtgttccggcgggctgacaagaatgatgatggcaagctgagctttgaggagttccagaactactttgctgatggagtgctgagcctgggggagctgcaggagctgttcagcggcattgatggccacctgacagacaacctggagacagagaagctgtgtgactacttcagcgagcacctgggcgtgtacagacctgtgctggccgccctggagagcctgaacagagctgtgctggccgccatggatgccaccaagctggagtatgagcgggccagcaaggtggaccagtttgtgacccgcttcctgctgcgggagaccgtgtcccagctgcaggccctgcagagcagcctggagggcgccagtgacaccctggaggcccaggcccacggctggaggagtgatgctgagagcgtggaggcccagagccggctgtgtggcagcagaagagctggaagaagagccctgcggtctgtgagccgcagcagcacctggagccctggcagcagtgacaccggccgcagcagcgaggccgagatgcagtggaggctgcaggtgaaccggctgcaggagctgattgaccagctggagtgcaaggccccccggctggagcccctgcgggaggaggacctggccaagggccctgacctgcacatcctgatggcccagaggcaggtgcaggtggccgaggagggcctgcaggacttccaccgggccctgcgctgctacgtggacttcaccggggcccagagccactgcctgcacgtgtctgcccagaagatgctggatggagccagcttcaccctgtatgagttctggcaggatgaggcctcctggaggaggcaccagcagagccctggcagcaaggccttccagaggatcctgattgaccacctgcgggccccagacaccctgaccaccgtcttcttccctgcctcctggtggatcatgaacaacaactag

SEQ ID NO: 221319 - DNA, 1089 bp, Artificial Sequence
  derived and/or modified sequence
atggcctgcgccggcctgctgaccgtgtgcctgctgcggccccccgctcctcagcctcagcctcaaactccccgtcacccacagcttgcacccgacccagggcccgccggccacaccctttttcaagacgtgtttaggcgggcagacaagaatgatgatggcaagctgagctttgaggagtttcagaattacttcgccgacggggtactctccctgggtgaactccaggaactgttttccggaattgatgggcacctcacagacaacctggaaacagagaagttgtgtgattacttttctgagcatctcggcgtgtacagaccagttctggccgcgctggagtccttgaatcgggcagtgctcgctgccatggacgcaacgaaactggaatacgagcgtgcctctaaagtggaccagtttgtgacccgattcctgctgagagaaacagtgtcacagttgcaagccctgcaaagttctttggagggagcatctgataccctggaagctcaagcccacggctggcggtccgatgctgaaagcgttgaagcccaatctaggctctgcggctcccggagggccggcagaagagctctgaggagcgtatctcgctcttcaacctggtctccaggctccagtgataccggccgaagttctgaggccgaaatgcagtggaggctgcaggttaacaggcttcaagagctgatcgaccaactggagtgcaaggctccccggctcgagcccctcagggaggaggatttagcaaagggaccagacctccatatcctgatggcccagcgccaagtacaggtggccgaggaaggcctccaggactttcaccgggcactgcgttgctatgtggactttacaggtgcccagtctcattgcctgcacgtgtcagcgcagaaaatgctcgatggggcctcattcactctctacgaattttggcaggacgaagcgagctggaggcgacaccagcagtctcccggatccaaagcgtttcagcgcatcctgattgatcacctgagagctcctgacaccctaacaactgtcttttttccagcaagttggtggatcatgaataacaattag

SEQ ID NO: 221320 - DNA, 1942 bp, Artificial Sequence
  derived and/or modified sequence
gagcccgcgcgtcggcgccggcgccaaggggcggcctctagccacaccgagtccgccgcggcgtccagggtcggcagcaaccgcagccgagcccgagcgggtggcggcgccatggcgtgcgcggggctgctcaccgtgtgcctgctccggccgcccgcgccccagccccagccccagaccccgcggcacccccagctcgcgcccgacccggggcccgccggacacacgctcttccaggacgttttccgcagagcagacaagaatgatgatgggaagctctcatttgaggaattccagaattactttgccgatggggttctcagcctgggggagctgcaggaactgttcagcggcattgatgggcatctcaccgacaatttagaaacagaaaaactgtgtgactacttctcagagcacctgggtgtctaccggccggtgctggctgcattggaatcgctgaaccgtgcagtgctcgctgccatggatgccaccaagctggagtacgagagggcctccaaagtggaccagtttgtgacgcgcttcctgctgcgggagacggtgagccagctgcaagcccttcagagctcgctggagggggcgtcagataccctggaggcccaggcccatggctggcggtcagatgcagagagcgtggaggcgcagagcaggctctgcggcagccggcgggcaggacgccgagccctgaggagtgtcagccggtcatccacctggtcccccggctcttctgacacagggcgcagctcagaggccgagatgcagtggcggctccaggtgaaccgcctccaggagctcatcgaccagctcgagtgcaaggccccccggctggaacccctgcgtgaagaggacctggccaaggggcctgacttgcacatcctcatggcccagaggcaggtccaggtggcagaggaaggcctgcaggacttccaccgagccctgcgctgctatgtggacttcacaggggcccagagccattgtctgcatgtgtccgcccagaagatgctggacggtgcctccttcaccctgtatgagttctggcaggatgaggcctcctggagaaggcaccagcagtcgcctggcagcaaggccttccagcgcatcctcatcgaccacctgcgggccccggacaccctcaccactgtgttcttcccagcctcctggtggataatgaataacaactgagccagacctgcacacgccgagggccccgggaccctgcctgcctccctctggagccttctggactggccagcccagcgcaaagaccaggacttgtctcctcctggacttgggcctggtggaagggctctcagcccagggatcagggactgggctgcttgctttctatttattattgatttatttatccctgtattttattgtttgtcacttcagcctccaagctactttggcttctgcctggctcaggagacctggattctggtccctgctgtccctgcctggctgagcgacccagggcaggtcccgtccctgtctgggtgggcctcaggccatctggccgcctagcgagggtcctgctttcttcctgctgtcttgggaccaggcttctgctcctcctcagccagcggcagaagcagggctgatgctcagggaccccccaaccctcaaaccttgcctccgaggctgggcctgagctgggtgccccgtcgccctcccaggccactaggctctgactcttccagcacccatggatgtgccagaggcctctgggttggtttgcatgtcatttgcatatcgtttgcatgccctcatcccacccattctcagggcagtatgggaagccccaaggtgacctggccaagtagcaataatttgggtccagggtcacctattgcccccagaggcctctgaaccccaggctgggaccccagcacagaggcaataaaggcagtggtcccttcca

SEQ ID NO: 221321 - DNA, 1089 bp, Artificial Sequence
  derived and/or modified sequence
atggcctgcgccggattgctcactgtttgccttctgagacctcctgctccccaacctcagccgcagactccgcgtcatcctcagcttgcaccggatccgggtcctgcagggcacaccctgtttcaggatgtcttccgaagagcggataaaaacgatgacggaaaactcagctttgaggaatttcagaactacttcgccgacggcgtgctgagcctgggggagttacaggaactgttcagcgggattgacggccacctgacagacaatttggaaacggagaagctctgtgactatttctctgaacatctgggagtgtacagaccggtgctggcagcccttgagtctctaaaccgagccgttcttgccgctatggatgcaaccaagctggaatatgagcgggcaagcaaggtggaccaattcgtgacgagatttctgctgcgcgagaccgtaagccaattacaagccctacaatctagtcttgagggagccagtgacaccctcgaggcacaggcacacgggtggcgaagcgatgcagaaagcgtggaggctcagtctcgcttgtgtgggtctagacgggctggcagaagggcacttaggtccgtttcaagaagtagcacttggtctcccggtagttctgacacaggcagatcttcagaggctgagatgcagtggcggctgcaggtcaacaggttacaagagctgattgaccaactcgaatgtaaagctccccgtctggagcccttacgcgaggaggatctggctaagggacccgatctgcacattctgatggctcagaggcaggttcaggtggcagaggaaggactgcaggactttcatcgtgcgttgcgctgctacgtcgactttacaggtgcacagagccattgcctgcacgtctctgcacagaagatgctggacggcgcttctttcacactgtatgagttctggcaagacgaagcatcttggagaagacaccagcagagccccggtagcaaggcattccagaggatcctgatcgaccatcttagggcccctgataccctcaccacagttttttttcccgcttcttggtggattatgaacaacaactag

SEQ ID NO: 221322 - DNA, 1089 bp, Artificial Sequence
  derived and/or modified sequence
atggcctgcgccggcctgctgaccgtgtgcctgctgagaccccccgccccccagccccagccccagacccccagacacccccagctggcccccgaccccggccccgccggccacaccctgttccaggacgtgttcagaagagccgacaagaacgacgacggcaagctgagcttcgaggagttccagaactacttcgccgacggcgtgctgagcctgggcgagctgcaggagctgttcagcggcatcgacggccacctgaccgacaacctggagaccgagaagctgtgcgactacttcagcgagcacctgggcgtgtacagacccgtgctggccgccctggagagcctgaacagagccgtgctggccgccatggacgccaccaagctggagtacgagagagccagcaaggtggaccagttcgtgaccagattcctgctgagagagaccgtgagccagctgcaggccctgcagagcagcctggagggcgccagcgacaccctggaggcccaggcccacggctggagaagcgacgccgagagcgtggaggcccagagcagactgtgcggcagcagaagagccggcagaagagccctgagaagcgtgagcagaagcagcacctggagccccggcagcagcgacaccggcagaagcagcgaggccgagatgcagtggagactgcaggtgaacagactgcaggagctgatcgaccagctggagtgcaaggcccccagactggagcccctgagagaggaggacctggccaagggccccgacctgcacatcctgatggcccagagacaggtgcaggtggccgaggagggcctgcaggacttccacagagccctgagatgctacgtggacttcaccggcgcccagagccactgcctgcacgtgagcgcccagaagatgctggacggcgccagcttcaccctgtacgagttctggcaggacgaggccagctggagaagacaccagcagagccccggcagcaaggccttccagagaatcctgatcgaccacctgagagcccccgacaccctgaccaccgtgttcttccccgccagctggtggatcatgaacaacaactag

SEQ ID NO: 221323 - protein, 396 aa, Artificial Sequence
  derived and/or modified sequence
MACAGLLTVCLLRPPAPQPQPQTPRHPQLAPDPGPAGHTLFQDVFRRADKNDDGKLSFEEFQNYFADGVLSLGELQELFSGIDGHLTDNLETEKLCDYFSEHLGVYRPVLAALESLNRAVLAAMDATKLEYERASKVDQFVTRFLLRETVSQLQALQSSLEGASDTLEAQAHGWRSDAESVEAQSRLCGSRRAGRRALRSVSRSSTWSPGSSDTGRSSEAEMQWRLQVNRLQELIDQLECKVRAVGPGPHKGGPSWYPPEPGPCWRPGPHSVPSQAPRLEPLREEDLAKGPDLHILMAQRQVQVAEEGLQDFHRALRCYVDFTGAQSHCLHVSAQKMLDGASFTLYEFWQDEASWRRHQQSPGSKAFQRILIDHLRAPDTLTTVFFPASWWIMNNN

SEQ ID NO: 221324 - DNA, 1191 bp, Artificial Sequence
  derived and/or modified sequence
atggcgtgtgcggggcttctcaccgtttgcctgcttcgtccccccgccccccagcctcaaccccaaactccacggcacccacagcttgcgcccgaccccggccccgctggccacaccctttttcaggacgtgtttagaagagcggacaagaatgacgatggaaaactgtcgttcgaggagtttcaaaattatttcgctgacggtgtgttgagcttgggggagttgcaggagctcttctctggaatcgacggccatctcaccgacaacttggagaccgaaaagttatgtgactatttttccgagcacctgggggtttacagacctgtcctggccgcactcgagagtctcaatcgggctgtgcttgccgccatggatgcaactaaattggagtacgagcgagcatccaaagtcgatcaattcgtcactcggtttctactcagagagaccgtctcccagctgcaggccctccagagctctctggaaggggccagcgatactctggaagcccaggcccacggatggcggtcagatgcggaaagtgtggaggctcagagccggctgtgtggaagccgccgggcaggccggcgcgcccttcgcagtgtgagcagatcctccacttggagccctggatcgtccgataccggccggtcaagcgaggcggaaatgcagtggcgcctgcaggtcaatcgtttacaggagcttattgatcagctcgagtgtaaagttcgggccgtgggtccagggccccacaagggagggccctcttggtatccccccgaaccaggaccatgttggcgcccagggccacacagcgtgcccagtcaggccccaaggttggagcccctgcgtgaggaagatttggctaagggccccgacctgcacatcctgatggcacagaggcaggtgcaagtggcggaggaagggttacaagactttcaccgggcgctacggtgttatgtggatttcacaggcgctcagtctcactgtttgcacgtgtctgcccagaagatgcttgacggcgcatccttcaccctttacgaattttggcaagatgaggctagctggcgccgtcaccagcagtcccccggttctaaggcgtttcagagaattctgattgaccaccttcgcgctcctgataccctgaccactgtctttttccccgcctcctggtggattatgaataacaactag

SEQ ID NO: 221325 - DNA, 1191 bp, Artificial Sequence
  derived and/or modified sequence
atggcctgtgccggcctgctgactgtgtgcctgctgcggcccccagccccccagccccagccccagacccccaggcacccccagctggccccagaccccggccctgctggccacaccctcttccaggatgtgttccggcgggctgacaagaatgatgatggcaagctgagctttgaggagttccagaactactttgctgatggagtgctgagcctgggggagctgcaggagctgttcagcggcattgatggccacctgacagacaacctggagacagagaagctgtgtgactacttcagcgagcacctgggcgtgtacagacctgtgctggccgccctggagagcctgaacagagctgtgctggccgccatggatgccaccaagctggagtatgagcgggccagcaaggtggaccagtttgtgacccgcttcctgctgcgggagaccgtgtcccagctgcaggccctgcagagcagcctggagggcgccagtgacaccctggaggcccaggcccacggctggaggagtgatgctgagagcgtggaggcccagagccggctgtgtggcagcagaagagctggaagaagagccctgcggtctgtgagccgcagcagcacctggagccctggcagcagtgacaccggccgcagcagcgaggccgagatgcagtggaggctgcaggtgaaccggctgcaggagctgattgaccagctggagtgcaaggtgcgggctgtgggccctggcccccacaagggcggccccagctggtacccacctgagcccggcccctgctggaggcctggcccccacagcgtgcccagccaggccccccggctggagcccctgcgggaggaggacctggccaagggccctgacctgcacatcctgatggcccagaggcaggtgcaggtggccgaggagggcctgcaggacttccaccgggccctgcgctgctacgtggacttcaccggggcccagagccactgcctgcacgtgtctgcccagaagatgctggatggagccagcttcaccctgtatgagttctggcaggatgaggcctcctggaggaggcaccagcagagccctggcagcaaggccttccagaggatcctgattgaccacctgcgggccccagacaccctgaccaccgtcttcttccctgcctcctggtggatcatgaacaacaactag

SEQ ID NO: 221326 - DNA, 1191 bp, Artificial Sequence
  derived and/or modified sequence
atggcctgcgccggcctgctgaccgtgtgcctgctgcggccccccgctcctcagccacaaccgcaaacaccacgccatcctcagctggctcctgatcctggtcccgctggccacactctcttccaggatgtattccgccgtgctgacaagaacgatgatgggaagttaagttttgaggagttccagaattatttcgccgacggcgtattgtctctgggtgagctgcaggaactgttttctggtatagatggtcacttgacagataacctcgagacagagaagctatgcgattacttctctgagcacttgggcgtctatcgccccgtcctggctgccctggaatcactgaacagggctgtgctggctgcaatggacgccaccaagttggaatacgaacgcgcgagcaaggtggaccagttcgtcacccggttcctgcttcgggagaccgtgagccagctccaggctcttcaaagtagcttggaaggggcttccgacaccctggaagctcaggcccatggttggcgatccgacgctgagtctgtcgaagctcagagcagattatgcggaagccggcgtgccggacggcgcgccctcaggagcgtgtcgcgctcaagtacctggagtccagggagctctgacacaggaagatcttccgaagcggaaatgcagtggaggctgcaggttaaccgcctgcaggagctaatcgatcagctggagtgcaaggtgagggcggtcgggcctggtccacacaagggagggccctcctggtacccacccgagcccggcccttgttggagaccgggcccgcactccgtcccctcgcaggcacccagattagagcctctgagggaggaagatctagctaaagggccggatctacacatccttatggcccagaggcaggttcaagtggcagaagaaggcctgcaggattttcaccgcgctctgaggtgctacgtggactttacgggcgcacaatcacactgtttacatgtttcagctcagaaaatgttggacggagcctcctttacactttacgagttttggcaagatgaggcttcatggagacgacaccaacagtctccaggcagtaaagctttccagcgcatcctgatcgaccatcttagagctccagacactctgacgacggttttttttccagcctcatggtggataatgaacaataattag

SEQ ID NO: 221327 - DNA, 1989 bp, Artificial Sequence
  derived and/or modified sequence
ccgcggcgtccagggtcggcagcaaccgcagccgagcccgagcgggtggcggcgccatggcgtgcgcggggctgctcaccgtgtgcctgctccggccgcccgcgccccagccccagccccagaccccgcggcacccccagctcgcgcccgacccggggcccgccggacacacgctcttccaggacgttttccgcagagcagacaagaatgatgatgggaagctctcatttgaggaattccagaattactttgccgatggggttctcagcctgggggagctgcaggaactgttcagcggcattgatgggcatctcaccgacaatttagaaacagaaaaactgtgtgactacttctcagagcacctgggtgtctaccggccggtgctggctgcattggaatcgctgaaccgtgcagtgctcgctgccatggatgccaccaagctggagtacgagagggcctccaaagtggaccagtttgtgacgcgcttcctgctgcgggagacggtgagccagctgcaagcccttcagagctcgctggagggggcgtcagataccctggaggcccaggcccatggctggcggtcagatgcagagagcgtggaggcgcagagcaggctctgcggcagccggcgggcaggacgccgagccctgaggagtgtcagccggtcatccacctggtcccccggctcttctgacacagggcgcagctcagaggccgagatgcagtggcggctccaggtgaaccgcctccaggagctcatcgaccagctcgagtgcaaggtgagggccgtggggccagggccccacaagggaggaccctcctggtatccaccagagccaggcccatgctggaggcccggcccacactctgtgccctcacaggccccccggctggaacccctgcgtgaagaggacctggccaaggggcctgacttgcacatcctcatggcccagaggcaggtccaggtggcagaggaaggcctgcaggacttccaccgagccctgcgctgctatgtggacttcacaggggcccagagccattgtctgcatgtgtccgcccagaagatgctggacggtgcctccttcaccctgtatgagttctggcaggatgaggcctcctggagaaggcaccagcagtcgcctggcagcaaggccttccagcgcatcctcatcgaccacctgcgggccccggacaccctcaccactgtgttcttcccagcctcctggtggataatgaataacaactgagccagacctgcacacgccgagggccccgggaccctgcctgcctccctctggagccttctggactggccagcccagcgcaaagaccaggacttgtctcctcctggacttgggcctggtggaagggctctcagcccagggatcagggactgggctgcttgctttctatttattattgatttatttatccctgtattttattgtttgtcacttcagcctccaagctactttggcttctgcctggctcaggagacctggattctggtccctgctgtccctgcctggctgagcgacccagggcaggtcccgtccctgtctgggtgggcctcaggccatctggccgcctagcgagggtcctgctttcttcctgctgtcttgggaccaggcttctgctcctcctcagccagcggcagaagcagggctgatgctcagggaccccccaaccctcaaaccttgcctccgaggctgggcctgagctgggtgccccgtcgccctcccaggccactaggctctgactcttccagcacccatggatgtgccagaggcctctgggttggtttgcatgtcatttgcatatcgtttgcatgccctcatcccacccattctcagggcagtatgggaagccccaaggtgacctggccaagtagcaataatttgggtccagggtcacctattgcccccagaggcctctgaaccccaggctgggaccccagcacagaggcaataaaggcagtggtcccttcca

SEQ ID NO: 221328 - DNA, 1191 bp, Artificial Sequence
  derived and/or modified sequence
atggcctgcgctggcttgcttaccgtttgcctgctcaggcctcccgctccccagccccagcctcagacccctaggcaccctcagttggcccctgatcccggacctgcaggacataccctctttcaggacgtttttcgtagagccgacaaaaacgacgacggtaaactctctttcgaggagtttcagaattacttcgccgacggcgtcttaagtctgggagaattgcaagaactgttctctggtatcgatgggcaccttacggataacctcgagacagagaaactatgcgactattttagcgaacacctcggggtgtatcgtccagtgctggccgcacttgaaagcctgaatcgcgctgtgctggccgctatggatgcaaccaagttagaatacgagagggcatctaaggtggatcagtttgttacgcgctttctgttgagggagaccgtgagccagctgcaagccctgcagagctccttggaaggcgcttctgatactctcgaggcccaggcacatggctggaggtccgatgctgagtccgtagaggcccagtcccgtctgtgcggcagcaggcgcgcaggcaggagagctctgcggtccgtctcgcgctcctctacatggtctcccggatcatccgataccggtagaagtagcgaagccgagatgcagtggcgccttcaggtgaacaggctgcaggaactcatcgatcagctagagtgcaaggtgcgagctgtgggtccgggtcctcacaaaggcggtcctagttggtatcccccagagcccggaccatgttggcgcccaggcccacacagtgtacctagtcaggccccacggctcgaacccctccgagaggaggatctggcgaaagggcctgacctgcatatccttatggcccagcgccaggttcaggttgccgaggaggggcttcaggacttccatcgcgcacttaggtgttacgtggattttaccggcgcacagtctcactgtcttcacgttagtgctcagaaaatgcttgacggggcttccttcactctctatgaattttggcaagacgaggcatcatggcgcagacaccagcagtctcccggttccaaggcatttcagagaatcttgattgaccatttgagggccccagataccctgaccactgttttcttccctgcatcttggtggattatgaataataactag

SEQ ID NO: 221329 - DNA, 1191 bp, Artificial Sequence
  derived and/or modified sequence
atggcctgcgccggcctgctgaccgtgtgcctgctgagaccccccgccccccagccccagccccagacccccagacacccccagctggcccccgaccccggccccgccggccacaccctgttccaggacgtgttcagaagagccgacaagaacgacgacggcaagctgagcttcgaggagttccagaactacttcgccgacggcgtgctgagcctgggcgagctgcaggagctgttcagcggcatcgacggccacctgaccgacaacctggagaccgagaagctgtgcgactacttcagcgagcacctgggcgtgtacagacccgtgctggccgccctggagagcctgaacagagccgtgctggccgccatggacgccaccaagctggagtacgagagagccagcaaggtggaccagttcgtgaccagattcctgctgagagagaccgtgagccagctgcaggccctgcagagcagcctggagggcgccagcgacaccctggaggcccaggcccacggctggagaagcgacgccgagagcgtggaggcccagagcagactgtgcggcagcagaagagccggcagaagagccctgagaagcgtgagcagaagcagcacctggagccccggcagcagcgacaccggcagaagcagcgaggccgagatgcagtggagactgcaggtgaacagactgcaggagctgatcgaccagctggagtgcaaggtgagagccgtgggccccggcccccacaagggcggccccagctggtacccccccgagcccggcccctgctggagacccggcccccacagcgtgcccagccaggcccccagactggagcccctgagagaggaggacctggccaagggccccgacctgcacatcctgatggcccagagacaggtgcaggtggccgaggagggcctgcaggacttccacagagccctgagatgctacgtggacttcaccggcgcccagagccactgcctgcacgtgagcgcccagaagatgctggacggcgccagcttcaccctgtacgagttctggcaggacgaggccagctggagaagacaccagcagagccccggcagcaaggccttccagagaatcctgatcgaccacctgagagcccccgacaccctgaccaccgtgttcttccccgccagctggtggatcatgaacaacaactag

SEQ ID NO: 221330 - protein, 299 aa, Artificial Sequence
  derived and/or modified sequence
MRPLQIVPSRLISQLYCGLKPPASTRNQICLKMARPSSSMADFRKFFAKAKHIVIISGAGVSAESGVPTFRGAGGYWRKWQAQDLATPLAFAHNPSRVWEFYHYRREVMGSKEPNAGHRAIAECETRLGKQGRRVVVITQNIDELHRKAGTKNLLEIHGSLFKTRCTSCGVVAENYKSPICPALSGKGAPEPGTQDASIPVEKLPRCEEAGCGGLLRPHVVWFGENLDPAILEEVDRELAHCDLCLVVGTSSVVYPAAMFAPQVAARGVPVAEFNTETTPATNRFSHLISISSLIIIKN

SEQ ID NO: 221331 - DNA, 900 bp, Artificial Sequence
  derived and/or modified sequence
atgaggccgctgcagatagtcccgtcaagactcatctcccaactctattgtggcttaaaaccacccgcctctactcgtaatcaaatttgcctgaaaatggcgcggcctagctctagtatggccgacttcaggaagttctttgctaaagcaaaacacatcgtgatcatatctggagcaggcgtctcggccgaatccggcgtccccaccttcagaggagccgggggctattggcggaagtggcaggcccaggatctcgcaacccctttagcgttcgcccacaatccatctcgcgtctgggaattttaccattatcgccgggaggtcatgggctccaaagaacctaacgcagggcatcgtgcaattgccgaatgtgagactcgtctcggaaaacagggcagaagagtggtggtcatcacccagaatatcgacgaactacaccgcaaagcaggcaccaaaaacttactagagatacatggatctctgtttaagacccggtgcacctcctgcggtgtggtggcagaaaactacaagtctccgatttgccctgcactgagcgggaagggcgcgccagagcccggaacacaagacgcgagcattccagtcgagaagctacccaggtgtgaagaggcaggctgtggggggctgttgagacctcacgtcgtgtggttcggggagaacttggaccctgcaatccttgaggaggtcgaccgagagctggcccattgtgatttatgcctagtggtcgggacttcttctgtcgtatatcccgccgccatgttcgcccctcaggttgcagcaagaggggtcccagtagcagagtttaacaccgagaccacacccgcaacgaatcgcttcagtcacctcatttccatatcctccttgataattattaaaaactag

SEQ ID NO: 221332 - DNA, 900 bp, Artificial Sequence
  derived and/or modified sequence
atgaggcccctgcagatcgtgcccagccgcctcatcagccagctgtactgcggcctgaagcccccagccagcaccaggaaccagatctgcctgaagatggcccggcccagcagctccatggctgacttcaggaagttctttgccaaggccaagcacatcgtcatcatctctggagctggggtgtctgctgagagcggcgtgcccaccttcagaggagctgggggctactggaggaagtggcaggcccaggacctggccacccccctggcctttgcccacaaccccagccgggtgtgggagttctaccactacagaagagaggtgatgggcagcaaggagcccaatgccggccaccgggccatcgcagaatgtgagacccggctgggcaagcagggcagaagagtggtggtgatcacccagaacattgatgagctgcacaggaaggccggcaccaagaacctgctggagatccacggcagcctcttcaagacccgctgcaccagctgtggggtggtggccgagaactacaagagccccatctgcccagccctgtctggaaaaggagcccctgagcccggcacccaggatgccagcatccctgtggagaagctgccccgctgtgaggaggccggctgcggcggcctgctgcggccccacgtggtgtggtttggagagaacctggaccctgccatcctggaggaggtggaccgggagctggcccactgtgacctgtgcctggtggtgggcaccagctctgtggtgtacccagctgccatgtttgccccccaggtggccgcccggggcgtgcctgtggccgagttcaacacagagaccaccccagccaccaaccgcttcagccacctgatcagcatcagcagcctcatcatcatcaagaactag

SEQ ID NO: 221333 - DNA, 900 bp, Artificial Sequence
  derived and/or modified sequence
atgcggcccctgcagatcgtgcccagccggctgatcagccagctgtactgtgggctgaaaccccccgctagtactaggaaccagatctgtctgaaaatggcccggccatcaagcagtatggccgatttccgcaaatttttcgcaaaggccaagcatatcgtgattattagcggcgccggggtatcagccgagtcgggggtgccgacttttcgcggggccggcgggtattggcggaagtggcaagcccaggatctggcaacccctctagcattcgcccataacccgtctcgtgtttgggaattttatcactaccggcgggaggtcatgggaagtaaagagcctaatgctgggcatcgggctatcgctgaatgtgagactagacttggtaagcagggcaggcgcgttgtggttatcacccagaacattgacgaattgcaccgtaaagccggaacaaagaatttattggaaatccatggctctctgttcaagaccaggtgtaccagttgtggcgttgtcgctgaaaattataaatcccctatatgccctgccctttcagggaagggagccccagaaccggggacacaggatgccagtatccccgtggagaagctgccccgctgcgaggaggctggctgtgggggcctgctccgcccccatgtggtgtggtttggcgaaaatctcgatccagcaatactcgaagaagtggatcgcgagctggcccattgtgacctgtgtctggtggtgggcacctcgtcagtggtgtatcccgcagccatgttcgcaccacaagtggcagcgcggggggtgcccgttgctgagttcaatactgaaaccacccctgctacaaatagattctcacatctcattagtatttctagtctgatcatcatcaaaaactag

SEQ ID NO: 221334 - DNA, 900 bp, Artificial Sequence
  derived and/or modified sequence
atgcggccactgcagatcgtgccatccaggctgatcagccagctatattgtggtctgaagcctccagcaagtactagaaatcagatctgtctgaagatggcccgaccatcatcatcaatggctgacttccgaaaattcttcgccaaagccaaacatattgtaattatttccggggctggcgtgagtgccgagtccggcgtaccgacgttccggggagctggtggatattggagaaagtggcaagcccaggaccttgccacaccacttgccttcgcccacaatccctctcgggtctgggaattctaccattatcgcagggaagtaatgggtagcaaggagcccaatgccggtcatagagcaatcgcggaatgtgagacacggctgggtaaacaaggcagacgggtggtggtcatcacccaaaatattgatgaattacataggaaggcaggaacaaagaatctattggagattcacggatccctgttcaagacgcggtgcacatcttgtggggtggtggctgagaattacaaatctccaatctgccctgcactatccggaaagggggctccagagcctgggacacaagatgctagcatcccagtggaaaaactgcccagatgtgaggaagccggatgcggcggattgctcaggcctcacgtagtgtggttcggagagaacctggatcccgcaatcctagaagaagtggaccgtgaactggcccactgtgacctctgtctcgtcgtggggacttccagcgtggtgtaccctgcagccatgttcgcaccccaagtggccgcacggggagtgcccgtagccgagttcaatactgagaccacccctgctacaaacaggttcagccatctgatctctataagctccctgatcattatcaaaaattag

SEQ ID NO: 221335 - DNA, 2339 bp, Artificial Sequence
  derived and/or modified sequence
attcgggggcgcgagctgccccagtaaatggaaatgttttctaacatataaaaacctacagaagaagaaaataattttctggatcaaattagaagtctgtattatattgatgtctccagattcaaatatattagaaagcagccgtggagacaaccatcttcattttgggagaaataactaaagcccgcctcaagcattagaactacagacaaaccctgatgcgacctctccagattgtcccaagtcgattgatttcccagctatattgtggcctgaagcctccagcgtccacacgaaaccagatttgcctgaaaatggctcggccaagttcaagtatggcagattttcgaaagttttttgcaaaagcaaagcacatagtcatcatctcaggagctggtgttagtgcagaaagtggtgttccgaccttcagaggagctggaggttattggagaaaatggcaagcccaggacctggcgactcccctggcctttgcccacaacccgtcccgggtgtgggagttctaccactaccggcgggaggtcatggggagcaaggagcccaacgccgggcaccgcgccatagccgagtgtgagacccggctgggcaagcagggccggcgagtcgtggtcatcacccagaacatcgatgagctgcaccgcaaggctggcaccaagaaccttctggagatccatggtagcttatttaaaactcgatgtacctcttgtggagttgtggctgagaattacaagagtccaatttgtccagctttatcaggaaaaggtgctccagaacctggaactcaagatgccagcatcccagttgagaaacttccccggtgtgaagaggcaggctgcgggggcttgctgcgacctcacgtcgtgtggtttggagaaaacctggatcctgccattctggaggaggttgacagagagctcgcccactgtgatttatgtctagtggtgggcacttcctctgtggtgtacccagcagccatgtttgccccccaggtggctgccaggggcgtgccagtggctgaatttaacacggagaccaccccagctacgaacagattcagtcatttgatctccatctcatctctaattattataaagaattaaaacaagtcatcattgtagaaaagcaagaaaatgcagatagagaaaaagaagaaaataaaactggagtatttccacaacccaagtttagagttggcccccacctcccatgccatggactgagcagcaggggcccagcatcccttggatatggtggctgtgtcttcatgtgaaagaaactgaacttggtggtttttcctgccagttcaggagagattcttggcatgtaatatatatcactgctcaagtcaagcctcctaaaaccacagacctgtttcagctgctacttcagccaaaattcttcagcttcatattgtcttgaaaacctatgattgtctctaacaaacaggctacttgctagttagaaattcttatcaatttggcaagctacttatcaaccagactgaccacaagaactgtcatctcatcaatgaaggagtaactgatcaatgaagccagcaatgcttttttcttggcatcatcaaagctgacatttagaagagatgctggtgatagtcatctcatcctactcaatttttcaaaggcagaaaccaaccctggagcaattgagaggactgtttaaacacagagcttaacaatggcagaattgtatatctcgtgcttaacagattttggttgaactttaccctaggtcaggggtcagcaaactactgcctgtgggccaaatttgcccaccacctgtatctgtaaataaggtttcattggaacacagctgtggccatatgtttgtatattgtgtgtggctgcttttgcattaggatgacagaggtgaatagttgcaacagagactggctggtctgcaaagcctaaaatatgtcctgtgtggccctttacagaaaaagttttctaacccctgctctaggttacggagaaaaaaaaaatggaataatgttctctgctacttttaacctgattttctttgttacctaaataggcagctagaatgctgcctatattttaataaggatttggatctcacaagacaccttaggccttacacaagttgttcagattctttgccccagttctaatctagtgacaaaggcatagaattctcctcccacaggaatgtatttctattttcaaggtgttaattagttccagttttggttttgtcgttttccccatgtccgatgcttatattggatgatttctgataaaccctgactattccaataaaccctaggcatttttgaatttaaa

SEQ ID NO: 221336 - DNA, 900 bp, Artificial Sequence
  derived and/or modified sequence
atgagacccctgcagatcgtgcccagcagactgatcagccagctgtactgcggcctgaagccccccgccagcaccagaaaccagatctgcctgaagatggccagacccagcagcagcatggccgacttcagaaagttcttcgccaaggccaagcacatcgtgatcatcagcggcgccggcgtgagcgccgagagcggcgtgcccaccttcagaggcgccggcggctactggagaaagtggcaggcccaggacctggccacccccctggccttcgcccacaaccccagcagagtgtgggagttctaccactacagaagagaggtgatgggcagcaaggagcccaacgccggccacagagccatcgccgagtgcgagaccagactgggcaagcagggcagaagagtggtggtgatcacccagaacatcgacgagctgcacagaaaggccggcaccaagaacctgctggagatccacggcagcctgttcaagaccagatgcaccagctgcggcgtggtggccgagaactacaagagccccatctgccccgccctgagcggcaagggcgcccccgagcccggcacccaggacgccagcatccccgtggagaagctgcccagatgcgaggaggccggctgcggcggcctgctgagaccccacgtggtgtggttcggcgagaacctggaccccgccatcctggaggaggtggacagagagctggcccactgcgacctgtgcctggtggtgggcaccagcagcgtggtgtaccccgccgccatgttcgccccccaggtggccgccagaggcgtgcccgtggccgagttcaacaccgagaccacccccgccaccaacagattcagccacctgatcagcatcagcagcctgatcatcatcaagaactag

SEQ ID NO: 221337 - protein, 335 aa, Artificial Sequence
  derived and/or modified sequence
MGPLSAPPCTEHIKWKGLLVTASLLNFWNLPTTAQVTIEAQPPKVSEGKDVLLLVHNLPQNLTGYIWYKGQIRDLYHYITSYVVDGQIIIYGPAYSGRETAYSNASLLIQNVTREDAGSYTLHIIKRGDGTRGVTGYFTFTLYLETPKPSISSSNLNPREAMETVILTCDPETPDTSYQWWMNGQSLPMTHRFQLSETNRTLFLFGVTKYTAGPYECEIRNSGSASRSDPVTLNLLHGPDLPRIHPSYTNYRSGDNLYLSCFANSNPPAQYSWTINGKFQQSGQNLFIPQITTKHSGLYVCSVRNSATGEESSTSLTVKVSASTRIGLLPLLNPT

SEQ ID NO: 221338 - DNA, 1008 bp, Artificial Sequence
  derived and/or modified sequence
atgggacctctttccgctcctccttgcaccgaacacattaaatggaaaggcttgctggtgacagcttcgttgctgaatttttggaatctgccgactaccgcgcaggtaaccatcgaggctcagccccctaaagtaagcgagggcaaagacgtcctgctccttgttcataatctgccacagaatctgactggttatatctggtataagggccagattagagatctatatcattacatcacatcctatgtggtggacggccagattatcatttatgggcctgcctattctgggagagagacagcttattctaacgccagcttgcttatccaaaatgtgactagggaagacgcgggctcttacaccctccatattatcaaaagaggggacggtacccggggggtgacaggatacttcacattcaccctatacctggagactcctaagccgtccatctctagctctaacctaaacccaagagaggctatggaaactgtcatcttgacatgcgaccccgagaccccagacacatcttaccagtggtggatgaatgggcaaagccttccaatgacgcaccgcttccagttatcagagaccaaccggacactttttctgttcggtgtgacaaagtatacggctggcccatatgagtgcgaaataaggaacagtgggtccgcctcgaggtccgatccggtaacactaaatctgcttcatgggcccgatttaccacgaatccaccctagctacaccaattaccgttctggagacaacctgtatctgtcatgctttgccaactccaacccgccagcacagtactcttggacgattaacgggaagttccagcagagcggacagaatctcttcatcccccagatcactactaagcattccggtctgtacgtctgcagtgttcgaaactccgctactggcgaggaatccagcaccagcctgactgtgaaggtaagtgcaagcactcggatcggtctgctgccactgttgaacccaacttag

SEQ ID NO: 221339 - DNA, 1008 bp, Artificial Sequence
  derived and/or modified sequence
atgggaccattaagtgcccctccttgtaccgaacacatcaaatggaaagggctgctcgtgaccgcaagcctcctgaacttctggaaccttccaacgacagcccaggtcacaatcgaagcccagcctcccaaagtgagtgaaggcaaagatgtgttgttgctcgttcacaacctgccacagaatttgacggggtatatttggtacaagggccaaatccgggacttgtatcattatatcacttcatacgtggtggacggccagatcataatctacggacctgcctactctggccgagagaccgcttatagcaacgccagtttgctgatacagaacgtcacccgcgaggacgcgggatcatatacactccatataatcaaacggggggatggcacacgcggcgttacaggatactttacattcaccctttatctggaaactcctaagccctctatatcaagttctaatttgaatccacgagaagcaatggaaaccgtaattttgacttgcgaccccgagactccggatacatcctatcaatggtggatgaatggccaatccctaccaatgacccataggtttcagttgtccgagaccaacaggaccctcttcctgtttggcgttactaaatacacagctgggccttatgagtgtgagatcaggaactctggatcagcttctagaagcgacccagttaccttaaatctgctccacggccctgatctgccccggattcaccccagctatacgaactatcgatcaggggataatctgtatttgtcgtgtttcgctaactctaacccaccagctcagtattcatggactataaacgggaagtttcagcaatctggtcagaacctgtttattccgcagattactaccaagcatagcggcctgtatgtctgctcagtcagaaatagtgccacaggcgaggaatccagcaccagcctcaccgtgaaagtgtcagcctctactcggattggtttacttccactcctgaatcctacgtag

SEQ ID NO: 221340 - DNA, 1008 bp, Artificial Sequence
  derived and/or modified sequence
atgggacccctgagcgcaccaccttgcaccgagcacattaaatggaagggcctgctcgtgactgctagtcttcttaacttttggaacctgccaaccacggctcaagtaacaattgaggctcaacctcctaaggtgtctgagggcaaggacgtgcttctcctcgtccacaacctccctcagaacctgacaggatacatttggtacaaggggcagatccgggatttataccactatattacctcatacgtggtggatgggcagattatcatctacggccctgcttatagtggccgtgaaacggcctattccaacgcatccttgctaatccaaaacgtgacgagggaggatgcaggatcttacactctgcacattatcaagaggggagacggcactcgcggggttactggatatttcactttcaccctttatctcgagacccctaagccctccatcagcagttctaaccttaatcccagggaagctatggagactgttatcctcacctgtgaccccgagaccccagacacctcttaccagtggtggatgaatggacagtcacttccgatgacgcacaggttccagctgtctgagaccaatcgtaccctctttttgtttggggtgacaaaatatacggccggcccatatgagtgcgagatcaggaatagcgggagcgcttctcggtccgatccagtgacattaaaccttttacacggacctgatctgccacgaatccatccatcctacacaaactacaggagcggcgacaatctgtacctgagttgtttcgcgaattcaaacccccctgcgcagtactcgtggactattaacggcaaatttcagcaaagcgggcagaacctcttcattccccagatcacaacaaagcacagcgggctgtacgtttgctcagttcgaaactccgcaacaggagaggagtcatccacctcactcactgtaaaggtttccgcctctacccggatcgggctcctgcccctgctgaatcccacctag

SEQ ID NO: 221341 - DNA, 1008 bp, Artificial Sequence
  derived and/or modified sequence
atgggccccctgagcgccccaccctgcacagagcacatcaagtggaagggcctgctggtgacagccagcctgctgaacttctggaacctgcccaccacagcccaggtgaccatcgaggcccagccccccaaggtgtctgagggcaaggatgtgctgctgctggtgcacaacctgccccagaacctgaccggctacatctggtacaagggccagatccgggacctgtaccactacatcaccagctatgtggtggatggccagatcatcatctacggccctgcctacagcggccgggagacagcctacagcaatgccagcctgctgatccagaatgtgaccagagaagatgctggcagctacaccctgcacatcatcaagagaggagatggcacccggggcgtgacaggctacttcaccttcaccctgtacctggagacccccaagcccagcatcagcagcagcaacctgaacccccgggaggccatggagaccgtcatcctgacctgtgaccctgagaccccagacaccagctaccagtggtggatgaatggccagagcctgcccatgacccaccgcttccagctgtctgagaccaacagaaccctcttcctgtttggagtgaccaagtacacagctggcccctatgaatgtgagatccggaacagcggcagcgccagcagaagtgaccctgtgaccctgaacctgctgcacggccctgacctgccccgcatccaccccagctacaccaactacagaagtggggacaacctgtacctgagctgctttgccaacagcaaccccccagcccagtacagctggaccatcaacgggaagttccagcagagcggccagaacctcttcatcccccagatcaccaccaagcacagcggcctgtatgtgtgcagcgtgaggaacagcgccaccggggaggagagcagcaccagcctgactgtgaaggtgtctgccagcacccgcatcggcctgctgcccctgctgaaccccacctag

SEQ ID NO: 221342 - DNA, 1008 bp, Artificial Sequence
  derived and/or modified sequence
atgggccccctgagcgcccccccctgcaccgagcacatcaagtggaagggactgctggtaactgctagtctgctcaatttctggaacctcccgaccaccgcccaggtgacaattgaagcgcagccgcccaaagtgtccgaagggaaggacgttctgttacttgtgcacaatcttccccagaacctgacaggctatatttggtataaagggcaaatccgcgatttgtatcactacataaccagttacgtcgtggatggtcagataatcatctacggtccagcctactcgggcagagaaacagcatactcaaatgccagtctcctgatccagaatgtcacacgtgaggacgccggttcgtacacactgcacattatcaagcgaggggatggaacgagaggggtaacagggtactttaccttcacactctacctcgaaacaccgaaacctagcatcagcagctccaatctgaatccgagggaggccatggagaccgtcatacttacatgtgaccctgagacaccagatacatcctaccagtggtggatgaacgggcagtctttaccgatgactcataggttccagctgagtgaaaccaatcggaccttattccttttcggtgtgaccaagtacacagccggaccttacgagtgcgaaattagaaattccgggtctgcctctcggagcgatcctgtcacattaaacctgttgcacggacctgatttgccaaggatccatccctcctataccaactaccgtagcggtgacaatttgtacttgtcttgcttcgcaaattccaatcctcccgcccagtactcctggacgatcaatggcaaattccagcagtctggccagaatctgtttataccccagattaccactaaacactcagggctgtatgtgtgttcggtgagaaattccgccaccggtgaagaaagctcaacgtctctgactgttaaggtgtccgcttcgacacggattggcctgctgcccctacttaatcccacatag

SEQ ID NO: 221343 - DNA, 1008 bp, Artificial Sequence
  derived and/or modified sequence
atgggccccctgagcgcccccccctgcaccgagcacatcaagtggaaaggcctgttggtcactgccagcctgctgaacttttggaacctccccacaactgcacaggtgaccatcgaggcacagccgccaaaggttagtgagggcaaggatgtgttactgctcgtgcacaatcttcctcagaatcttaccggctacatttggtataagggccaaattcgcgacttatatcattacataacctcatatgtcgtcgacggccaaattatcatctacgggcctgcctattctggacgagaaaccgcttacagcaatgcaagtcttctcatccagaacgtgacgcgagaggacgcaggatcttacactctccacatcatcaaaagaggtgacggcaccaggggcgttactggctattttaccttcactctgtatctcgagacccctaagccatcaatttcttccagcaatctgaacccaagggaggcaatggagacagtaatacttacctgtgatcccgagacacccgacactagttaccagtggtggatgaacggacaatccctgcctatgacacatcgcttccagttatcagagactaacaggacgctctttttgtttggcgtgacgaagtacaccgcaggaccatatgaatgcgaaattcgcaacagcggctctgcatctaggtctgacccagtcacactgaacctgctccatggtcctgatctaccaaggatccatccaagctataccaactaccggtccggtgacaatctttatctcagctgttttgctaatagcaaccctcctgcacaatacagctggaccatcaatggcaaattccaacagtcgggacagaatctgttcatcccccaaatcacaaccaaacattccgggctgtatgtatgcagtgtgcgcaatagcgcgaccggggaagaaagtagcactagtctaactgtcaaagtatccgcatcgacccgcattgggttgctcccactcctgaatccaacgtag

SEQ ID NO: 221344 - DNA, 1008 bp, Artificial Sequence
  derived and/or modified sequence
atgggccccctgagcgcccccccctgcaccgagcacatcaagtggaaggggctgctggtgaccgctagtttgctgaacttttggaacttacccaccactgcccaggtgactatcgaggcgcaaccacctaaggtgtcagagggaaaggacgtgctgctactggtacataacttgccacaaaacctgaccgggtacatctggtacaagggtcaaattagagacctgtatcactatattacctcttacgtcgtggacgggcagattattatctacggccccgcttactcaggccgggagacggcctactctaatgcctctcttctgattcagaatgttactcgggaggacgccggaagttacactctgcatataattaaaaggggggatggcacaaggggcgtaacaggctatttcacgtttactctgtatctcgaaactccaaaaccatcgattagtagcagcaatctgaaccctagggaagccatggaaacagtcatcctgacctgtgaccctgaaactccggacacctcatatcagtggtggatgaacggacagagcttgccgatgacccatcgtttccagttgagcgagaccaaccgaactctctttttatttggtgtgaccaaatacaccgccgggccatacgagtgtgaaattcggaattcaggtagcgccagtagatcagaccctgtgacactgaatctgctgcacgggcccgaccttccacgtattcacccttcgtacaccaattacagatcgggcgataacctgtatttgagttgtttcgcgaacagtaatcctccggcacagtacagctggactattaatgggaagtttcagcaatcaggtcagaacctctttattccacagattaccacaaagcactccggcctgtatgtctgtagcgttcggaactccgccaccggagaagagagcagcacttcccttacagtcaaggttagcgcatctaccagaatcggactgctgcctcttctcaaccccacatag

SEQ ID NO: 221345 - DNA, 1529 bp, Artificial Sequence
  derived and/or modified sequence
ggaggaaggacagcacagctgacagccgtgctcaggaagtttctggatcctaggctcatctccacagaggagaacacacaggcagcagagaccatggggcccctctcagcccctccctgcacagagcacatcaaatggaaggggctcctggtcacagcatcacttttaaacttctggaacctgcccaccactgcccaagtcacgattgaagcccagccaccaaaagtttccgaggggaaggatgttcttctacttgtccacaatttgccccagaatcttactggctacatctggtacaaagggcaaatcagggacctctaccattacattacatcatatgtagtagacggtcaaataattatatatgggcctgcatatagtggacgagaaacagcatattccaatgcatccctgctgatccagaatgtcacccgggaggacgcaggatcctacaccttacacatcataaagcgaggtgatgggactagaggagtaactggatatttcaccttcaccttatacctggagactcccaagccctccatctccagcagcaacttaaaccccagggaggccatggaaactgtgatcttaacctgtgatcctgagactccggacacaagctaccagtggtggatgaatggtcagagcctccctatgactcataggtttcagctgtccgaaaccaacaggaccctctttctatttggtgtcacaaagtatactgcaggaccctatgaatgtgaaatacggaactcagggagtgccagccgcagtgacccagtcaccctgaatctcctccatggtccagacctccccagaattcacccttcatacaccaattaccgttcaggagataacctctacttgtcttgcttcgcgaactctaacccaccggcacagtattcttggacaattaatgggaagtttcagcaatcaggacaaaatctgtttatcccccaaattactacaaagcatagcgggctctatgtttgctctgttcgtaactcagccactggcgaggaaagctccacatcgttgacagtcaaagtctctgcttctacaagaataggacttcttcctctccttaatccaacatagcagctgtgatgtcatttctgtatttcaggaagactggcagatttatggaaaggtctcttacaaggactcttgaatacaagctcctgataacttcaagatcataccactggactaagaactttcaaaattttaatgaacaggctgataccttcatgaaattcaagacaaagaagaaaaatactcaatgttattggactaaataatcaaaaggataatgatttcataattttctatttgaaaatgtgctgattcttggaatgtttcattctccagatttatgaacattttttcttgagcaattggtaaagtatacttttgtaaacaaaaattgaaacatttccttttgctctctatctgagtgccccagaattgggaatctattcatgagtattcatatgtttatggtaataaagctatttgcacaagtt

SEQ ID NO: 221346 - DNA, 1555 bp, Artificial Sequence
  derived and/or modified sequence
ggaggaaggacagcacagctgacagccgtgctcaggaagtttctggatcctaggctcatctccacagaggagaacacacaggcagcagagaccatggggcccctctcagcccctccctgcacagagcacatcaaatggaaggggctcctggtcacagcatcacttttaaacttctggaacctgcccaccactgcccaagtcacgattgaagcccagccaccaaaagtttccgaggggaaggatgttcttctacttgtccacaatttgccccagaatcttactggctacatctggtacaaagggcaaatcagggacctctaccattacattacatcatatgtagtagacggtcaaataattatatatgggcctgcatatagtggacgagaaacagcatattccaatgcatccctgctgatccagaatgtcacccgggaggacgcaggatcctacaccttacacatcataaagcgaggtgatgggactagaggagtaactggatatttcaccttcaccttatacctggagactcccaagccctccatctccagcagcaacttaaaccccagggaggccatggaaactgtgatcttaacctgtgatcctgagactccggacacaagctaccagtggtggatgaatggtcagagcctccctatgactcataggtttcagctgtccgaaaccaacaggaccctctttctatttggtgtcacaaagtatactgcaggaccctatgaatgtgaaatacggaactcagggagtgccagccgcagtgacccagtcaccctgaatctcctccatggtccagacctccccagaattcacccttcatacaccaattaccgttcaggagataacctctacttgtcttgcttcgcgaactctaacccaccggcacagtattcttggacaattaatgggaagtttcagcaatcaggacaaaatctgtttatcccccaaattactacaaagcatagcgggctctatgtttgctctgttcgtaactcagccactggcgaggaaagctccacatcgttgacagtcaaagtctctgcttctacaagaataggacttcttcctctccttaatccaacatagcagctgtgatgtcatttctgtatttcaggaagactggcagtccaaaattgctttttcttcaaggagatttatggaaaggtctcttacaaggactcttgaatacaagctcctgataacttcaagatcataccactggactaagaactttcaaaattttaatgaacaggctgataccttcatgaaattcaagacaaagaagaaaaatactcaatgttattggactaaataatcaaaaggataatgatttcataattttctatttgaaaatgtgctgattcttggaatgtttcattctccagatttatgaacattttttcttgagcaattggtaaagtatacttttgtaaacaaaaattgaaacatttccttttgctctctatctgagtgccccagaattgggaatctattcatgagtattcatatgtttatggtaataaagctatttgcacaagtt

SEQ ID NO: 221347 - DNA, 1538 bp, Artificial Sequence
  derived and/or modified sequence
gcagaaggaggaaggacagcacagctgacagccgtgctcaggaagtttctggatcctaggctcatctccacagaggagaacacacaggcagcagagaccatggggcccctctcagcccctccctgcacagagcacatcaaatggaaggggctcctggtcacagcatcacttttaaacttctggaacctgcccaccactgcccaagtcacgattgaagcccagccaccaaaagtttccgaggggaaggatgttcttctacttgtccacaatttgccccagaatcttactggctacatctggtacaaagggcaaatcagggacctctaccattacattacatcatatgtagtagacggtcaaataattatatatgggcctgcatatagtggacgagaaacagcatattccaatgcatccctgctgatccagaatgtcacccgggaggacgcaggatcctacaccttacacatcataaagcgaggtgatgggactagaggagtaactggatatttcaccttcaccttatacctggagactcccaagccctccatctccagcagcaacttaaaccccagggaggccatggaaactgtgatcttaacctgtgatcctgagactccggacacaagctaccagtggtggatgaatggtcagagcctccctatgactcataggtttcagctgtccgaaaccaacaggaccctctttctatttggtgtcacaaagtatactgcaggaccctatgaatgtgaaatacggaactcagggagtgccagccgcagtgacccagtcaccctgaatctcctccatggtccagacctccccagaattcacccttcatacaccaattaccgttcaggagataacctctacttgtcttgcttcgcgaactctaacccaccggcacagtattcttggacaattaatgggaagtttcagcaatcaggacaaaatctgtttatcccccaaattactacaaagcatagcgggctctatgtttgctctgttcgtaactcagccactggcgaggaaagctccacatcgttgacagtcaaagtctctgcttctacaagaataggacttcttcctctccttaatccaacatagcagctgtgatgtcatttctgtatttcaggaagactggcaggagatttatggaaaggtctcttacaaggactcttgaatacaagctcctgataacttcaagatcataccactggactaagaactttcaaaattttaatgaacaggctgataccttcatgaaattcaagacaaagaagaaaaatactcaatgttattggactaaataatcaaaaggataatgatttcataattttctatttgaaaatgtgctgattcttggaatgtttcattctccagatttatgaacattttttcttgagcaattggtaaagtatacttttgtaaacaaaaattgaaacatttccttttgctctctatctgagtgccccagaattgggaatctattcatgagtattcatatgtttatggtaataaagctatttgcacaagtt

SEQ ID NO: 221348 - DNA, 1008 bp, Artificial Sequence
  derived and/or modified sequence
atgggccctctgtccgcacccccttgcacggaacatataaaatggaagggactgcttgtgacagccagtctgctgaacttctggaacttaccaaccaccgcacaggtgactatcgaagcccaaccccctaaggtgtccgagggaaaagatgtccttctactagtccacaacctgcctcagaatttgacgggttatatctggtataaggggcagatccgggacctgtaccactatatcacatcgtatgttgtagatgggcagataatcatttatggcccagcttactctggtagggaaactgcttacagcaatgcgtccttacttatccaaaacgtgaccagggaagatgccggtagctataccctccacattatcaaaagaggcgatgggacccggggtgtgaccggttatttcactttcacgctttacctcgaaactccaaagcctagcattagctcctctaacctgaacccgagagaggccatggaaactgtcatactgacttgcgaccctgagaccccagacacttcctatcagtggtggatgaacggtcagtcactgcctatgactcacaggttccagctgagcgaaacaaacaggacactcttcctcttcggcgtcaccaaatacaccgctgggccttatgaatgcgaaattcggaacagtggatcagccagccgttccgaccctgtgaccctgaatcttctgcatgggccagatctgccacgcatccatccctcatacacaaactacagatccggcgataacctgtatctcagttgcttcgccaacagcaacccaccggcacaatattcctggaccatcaatggcaaatttcaacagagcggccagaatctgttcatccctcagattactaccaagcatagtggcctgtatgtctgctctgtgaggaactccgccactggtgaagaatcaagtacaagcctgaccgttaaggtctccgcttccacccgaatcgggctgcttcctctgctgaatccaacttag

SEQ ID NO: 221349 - DNA, 1008 bp, Artificial Sequence
  derived and/or modified sequence
atggggccactgtccgcccctccctgcaccgagcacattaagtggaagggcttgctggtgactgcatccctactcaatttttggaacctgccgaccaccgcccaagtgaccatcgaggcacagccgcctaaagtttccgaggggaaggatgtccttctcttggtgcataacctgccacagaatctgaccggttacatttggtataaaggacagattcgcgatctgtaccactacatcacgtcttatgtggttgatggacagatcataatttacgggccagcgtatagtggcagggagactgcttattccaatgctagccttctcattcaaaatgtgactcgggaggacgctgggagctacacccttcacatcattaaacggggagacggcaccagaggagtgactggctacttcacgtttactctgtatctcgagacccctaaaccttcaatctcctcatccaatttaaacccaagagaagccatggagacggtgatactcacttgtgacccagaaactccagacacaagctaccagtggtggatgaatggtcagagccttcccatgacccaccgttttcagttgtcagaaacgaataggaccctgttcctctttggtgtaactaaatacacagctgggccatacgaatgtgagatcagaaactccggctctgctagcagaagcgatcctgtgaccctaaacctgttacacggtcccgacctgcccaggatccacccctcttatacaaattaccgcagcggagacaatctgtacttgagttgcttcgcaaatagcaatccccctgctcagtatagctggacgattaacggcaagttccagcagagtggacagaacctgtttatcccgcagatcaccacaaagcacagcggactctatgtctgtagtgttaggaattctgcaaccggagaggaatcctccacatcactcactgtgaaagtctctgcttccactcggatcgggctgttacctcttctgaaccccacctag

SEQ ID NO: 221350 - DNA, 1008 bp, Artificial Sequence
  derived and/or modified sequence
atgggtccactttctgcccctccttgcactgaacacatcaaatggaaaggactgctcgtgacagcaagccttctcaacttctggaacttgccaacaaccgctcaggtgactatcgaagctcaaccgccaaaggtttcagagggcaaggatgtgctgcttctggtccataacctgccacaaaatctgaccggatatatctggtacaagggccaaattcgcgacttgtatcattacatcacctcctatgtcgtcgacggtcagattatcatatatggccctgcatactcgggcagagagaccgcttacagcaatgcctctctgctcatacaaaacgtcactagggaggacgctgggtcttacaccttgcacataatcaaaagaggagacgggaccaggggggtaactggttacttcaccttcacactatacctcgagacacctaagccctccatttcttcatcaaatcttaatccccgtgaagctatggagacggtgatcctaacctgtgaccctgagacacccgatacctcatatcagtggtggatgaatgggcagagcttgccaatgacgcaccgcttccaattatccgagacgaatagaactctgttcctttttggagtcactaagtatactgctggaccttatgaatgtgagatccggaacagcggatctgccagtaggtccgaccccgtgaccctgaatctgttacatggtcctgatttgcctcggatccatcccagctacactaactacagaagcggagacaatctttatctgtcttgcttcgctaactccaaccctccagctcaatatagttggacgataaatggaaaattccagcagagtgggcagaatttgttcatcccccagatcaccacgaagcatagcggcctctatgtgtgttcagtgagaaatagtgctactggcgaggagtcctccactagtctcacagtgaaagtaagcgctagcacccgaattgggctgcttccgctattaaatccaacgtag

SEQ ID NO: 221351 - DNA, 1008 bp, Artificial Sequence
  derived and/or modified sequence
atgggccccctgagcgcccccccctgcaccgagcacatcaagtggaagggcctgctggtgaccgccagcctgctgaacttctggaacctgcccaccaccgcccaggtgaccatcgaggcccagccccccaaggtgagcgagggcaaggacgtgctgctgctggtgcacaacctgccccagaacctgaccggctacatctggtacaagggccagatcagagacctgtaccactacatcaccagctacgtggtggacggccagatcatcatctacggccccgcctacagcggcagagagaccgcctacagcaacgccagcctgctgatccagaacgtgaccagagaggacgccggcagctacaccctgcacatcatcaagagaggcgacggcaccagaggcgtgaccggctacttcaccttcaccctgtacctggagacccccaagcccagcatcagcagcagcaacctgaaccccagagaggccatggagaccgtgatcctgacctgcgaccccgagacccccgacaccagctaccagtggtggatgaacggccagagcctgcccatgacccacagattccagctgagcgagaccaacagaaccctgttcctgttcggcgtgaccaagtacaccgccggcccctacgagtgcgagatcagaaacagcggcagcgccagcagaagcgaccccgtgaccctgaacctgctgcacggccccgacctgcccagaatccaccccagctacaccaactacagaagcggcgacaacctgtacctgagctgcttcgccaacagcaacccccccgcccagtacagctggaccatcaacggcaagttccagcagagcggccagaacctgttcatcccccagatcaccaccaagcacagcggcctgtacgtgtgcagcgtgagaaacagcgccaccggcgaggagagcagcaccagcctgaccgtgaaggtgagcgccagcaccagaatcggcctgctgcccctgctgaaccccacctag

SEQ ID NO: 221352 - protein, 459 aa, Artificial Sequence
  derived and/or modified sequence
METEQPEETFPNTETNGEFGKRPAEDMEEEQAFKRSRNTDEMVELRILLQSKNAGAVIGKGGKNIKALRTDYYLVFVVFDSILSISADIETIGEILKKIIPTLEEGLQLPSPTATSQLPLESDAVECLNYQHYKGSDFDCELRLLIHQSLAGGIIGVKGAKIKELRENTQTTIKLFQECCPHSTDRVVLIGGKPDRVVECIKIILDLISESPIKGRAQPYDPNFYDETYDYGGFTMMFDDRRGRPVGFPMRGRGGFDRMPPGRGGRPMPPSRRDYDDMSPRRGPPPPPPGRGGRGGSRARNLPLPPPPPPRGGDLMAYDRRGRPGDRYDGMVGFSADETWDSAIDTWSPSEWQMAYEPQGGSGYDYSYAGGRGSYGDLGGPIITTQVTIPKDLAGSIIGKGGQRIKQIRHESGASIKIDEPLEGSEDRIITITGTQDQIQNAQYLLQNSVKQYADVEGF

SEQ ID NO: 221353 - protein, 464 aa, Artificial Sequence
  derived and/or modified sequence
METEQPEETFPNTETNGEFGKRPAEDMEEEQAFKRSRNTDEMVELRILLQSKNAGAVIGKGGKNIKALRTDYNASVSVPDSSGPERILSISADIETIGEILKKIIPTLEEGLQLPSPTATSQLPLESDAVECLNYQHYKGSDFDCELRLLIHQSLAGGIIGVKGAKIKELRENTQTTIKLFQECCPHSTDRVVLIGGKPDRVVECIKIILDLISESPIKGRAQPYDPNFYDETYDYGGFTMMFDDRRGRPVGFPMRGRGGFDRMPPGRGGRPMPPSRRDYDDMSPRRGPPPPPPGRGGRGGSRARNLPLPPPPPPRGGDLMAYDRRGRPGDRYDGMVGFSADETWDSAIDTWSPSEWQMAYEPQGGSGYDYSYAGGRGSYGDLGGPIITTQVTIPKDLAGSIIGKGGQRIKQIRHESGASIKIDEPLEGSEDRIITITGTQDQIQNAQYLLQNSVKQYADVEGF

SEQ ID NO: 221354 - DNA, 1380 bp, Artificial Sequence
  derived and/or modified sequence
atggaaactgagcagccagaggagacgttcccaaacaccgagacaaatggtgaattcggcaaacgtccagccgaggatatggaggaagaacaggccttcaaacgttctagaaatacagatgaaatggtggaactgcggattcttcttcaatcaaaaaacgctggtgccgtcatcggcaaagggggcaaaaatatcaaggccttacgcaccgactattaccttgttttcgttgtctttgatagcattctctcaattagcgctgatatcgaaacgataggcgagattctgaagaaaattattccaacactggaggaggggctgcaacttccatctccaacagccaccagtcagttgccgctggagagtgacgctgtagaatgcttgaattaccagcattataagggaagtgatttcgactgtgagcttaggcttcttattcaccaatctctggcgggaggaatcatcggggtgaaaggcgcgaaaattaaggagttacgagagaacacccaaactacaatcaaactgtttcaggagtgttgtcctcattcaacggatagagtagtcctaatcggtggcaaacccgacagagttgtcgagtgcatcaagatcattctggatttgatttccgagagcccaataaaaggccgtgcacaaccttacgaccccaatttttacgacgagacatatgactatggcggttttaccatgatgttcgatgaccgccgcggaagaccagttggcttccctatgcggggccggggtgggttcgatcgaatgccacccggtaggggtggccgccctatgcccccgagtcggagggactatgatgatatgagcccccggcggggaccaccccccccaccacccgggagaggcggtcggggcggcagtagagctcggaatctgccactgccccctccgccccctccacgcggtggagacctgatggcctatgacagacgcgggcggcccggagaccgatacgacggtatggtgggtttcagcgcagacgaaacctgggacagcgcaatcgacacttggtcaccttctgagtggcagatggcttacgagccacagggaggatcgggctacgattattcctatgcaggtggacgcggaagctatggagatttgggcggacctataatcacgacacaggtgactatacctaaggatttggccggctccatcatcggaaagggcgggcagcggattaaacagatcaggcatgagagcggggcctcaattaaaatcgatgagccactagaaggttctgaagatcgcatcataaccattactggcacccaggaccaaatacagaatgcacagtacttactgcaaaactctgttaagcagtacgccgacgtagaaggcttctag

SEQ ID NO: 221355 - DNA, 1395 bp, Artificial Sequence
  derived and/or modified sequence
atggagacggagcagccagaagagacatttcctaatacggaaacaaatggggaattcggaaaaaggccagccgaggacatggaggaggagcaggcgttcaagagatccaggaatactgatgaaatggtcgagctgagaattttgctgcaaagcaagaacgctggggcggtgatcggtaaaggcggaaaaaatatcaaggcactgagaaccgactacaatgcttccgtgtctgtgcctgatagttctggtccagagaggattctcagcataagtgctgacatcgagaccatcggagagatcctgaaaaaaataattccaactctcgaggaaggattgcagttgccgagccccacggctaccagtcagctgcccctagaatctgatgcagttgagtgtctgaattaccagcactacaagggctccgattttgactgcgaattaagactgttgatccaccaatctcttgccggcggaatcatcggggtgaagggagctaagataaaggagctgagggaaaacactcagacaactattaaactgttccaggagtgctgtccccatagcaccgaccgcgtggttcttataggaggtaaacccgaccgggtcgtcgagtgcatcaagatcatcttagatctgatttctgagtccccgatcaaaggaagagcccaaccctacgacccaaacttttatgatgagacttacgattatgggggcttcacaatgatgttcgatgatcggcgcgggcgcccagtaggattcccaatgcgcggacgtgggggcttcgatcgtatgccaccagggcgcggaggaaggcccatgcccccgagccgtcgggactacgatgatatgtctcctcggcgggggcccccgcctccaccgcctggtcgtggaggaagggggggatctagagcacgcaatctccccttaccaccaccacctcctccccggggcggtgacctcatggcttacgatcgcagaggacgacccggggaccgttacgacggtatggtgggcttcagcgctgacgaaacatgggatagtgcaatagatacctggagcccttcagagtggcagatggcttatgagccgcaggggggctccgggtacgactactcttacgccggtgggcggggctcatatggcgaccttggcggtcctatcatcaccactcaggtcaccattcctaaggatctggccgggagcatcattgggaaggggggccagaggatcaaacagatcagacatgagtctggggcgtcgatcaaaatcgatgagcccctggagggctcagaggaccgcatcattacaatcaccggaacccaagatcagatacagaatgcccagtacctgttacaaaattctgtgaagcagtacgccgatgtggagggcttttag

SEQ ID NO: 221356 - DNA, 1395 bp, Artificial Sequence
  derived and/or modified sequence
atggaaaccgagcagcccgaggagacatttccgaacaccgaaacaaacggtgaattcggtaagcgccccgcagaggacatggaggaggagcaggcctttaagcggtccaggaataccgatgagatggttgagctgcgtatattgctgcagagtaagaacgcaggcgcggttatcggcaagggagggaaaaatatcaaagcactgcggactgattacaatgcatcggtgtcggtccccgattccagcgggccagaaaggattctaagcatctctgccgatatcgagacaattggtgaaatactgaagaagattatacctaccttggaagaaggtttgcagctgccgagtcccactgccacttctcagttgccgctggagagtgacgccgtggagtgtctaaattatcaacactacaaaggctctgatttcgattgcgaattgcgactgctgatccatcaaagccttgctggcggaataatcggtgtgaaaggcgcaaaaatcaaggaactgcgagagaatacccagaccacaatcaagctctttcaggagtgttgtcctcatagtacagatagagtcgttctgatcggtgggaagccagaccgagttgtcgagtgcatcaagatcattctggacctaatttcagaatcccctatcaaggggcgagctcaaccctatgatccaaacttctatgatgagacttatgactatgggggttttactatgatgttcgacgatagaagaggaagacctgtcggatttcctatgcgcggccgggggggctttgaccggatgcccccaggaagagggggccggccgatgccaccaagtcgacgtgattatgatgatatgtcccctcgtaggggaccacctcccccacctcccgggagggggggccggggtggaagcagggcaagaaatcttcctctgcctccaccgccaccccctcgggggggggacctgatggcatacgatagaagggggagaccaggtgacagatatgatggaatggttggattctccgccgacgagacgtgggattctgccattgacacctggagtcccagtgagtggcagatggcctacgagccccaaggtgggtccgggtacgattacagctacgcaggcggcagagggtcctatggagatctgggcgggcccataatcaccacgcaggtgaccatcccaaaggatctggctggctcaatcattggtaagggcggacaacggatcaagcaaatccgccacgagtcgggagcatctatcaagatagacgaacccctggagggatctgaagaccggataattaccatcacaggtactcaggaccagatccagaacgctcagtatctgctgcagaattccgtcaagcagtatgccgatgtggagggcttttag

SEQ ID NO: 221357 - DNA, 1395 bp, Artificial Sequence
  derived and/or modified sequence
atggagaccgaacaaccagaagagacgttcccaaacaccgagaccaatggcgaattcggcaaacggcctgccgaagatatggaagaagaacaggccttcaaacgctccagaaacaccgatgaaatggtggaactaagaattttattgcagagcaaaaatgctggggccgttataggtaagggtggaaaaaacatcaaggcccttagaactgattacaatgccagtgtctcagtaccggattctagcggtccagagagaattctctccatcagtgcggacatcgagaccataggcgagatcctgaagaaaataatccctacccttgaggagggtttacagcttcccagccccaccgcgacctcccaactccctctcgagtcagacgccgtggagtgtttaaattatcaacactacaaggggagcgattttgattgtgagctccggttactgatacaccagagtctggccggtgggattatcggcgtgaagggcgcaaagataaaagaacttcgggagaacactcagacaacaataaagttattccaggagtgctgtccccattcaaccgaccgtgtcgtgctcattggtggcaagccggacagagtggtggaatgtattaagatcatcttggatctcataagcgagagcccgattaaaggcagagcccaaccctatgacccaaatttctatgacgaaacatacgattatggaggttttaccatgatgttcgacgatagaagaggccgacctgtgggcttcccgatgcggggacgggggggattcgatagaatgccgccgggacggggcgggaggcccatgccgccttcccggagggactacgacgatatgtctccacgccgtgggcctcccccacctccacccggccgcggaggtcgaggcggcagtcgtgcaagaaatctgcctctccccccccccccacctcctaggggcggcgacctgatggcatatgatcgccgaggcagacctggcgatcgctacgatggaatggtcggctttagtgcagacgagacgtgggactcggctatcgacacatggagcccctcggagtggcagatggcgtatgaaccccagggcggctcggggtacgactacagctatgctggaggccggggatcttatggcgaccttggcggacccattatcactactcaggtaactattcctaaggaccttgccggctcgattataggaaagggcgggcagcgtatcaaacagattcggcatgaatcaggagcttccattaagattgatgagcccctggaaggctcggaggaccggataataacgattactggtacacaagatcagatccaaaacgcccagtaccttctccagaactctgtcaaacagtatgccgatgtcgagggtttttag

SEQ ID NO: 221358 - DNA, 1380 bp, Artificial Sequence
  derived and/or modified sequence
atggagacagagcagcctgaggagaccttccccaacacagagaccaacggggagtttgggaagaggcctgctgaggacatggaggaggagcaggccttcaagaggagcaggaacacagatgagatggtggagctgcgcatcctgctgcagagcaagaatgctggggccgtcatcggcaagggcggcaagaacatcaaggccctgaggacagactactacctggtgtttgtggtgtttgacagcatcctgagcatctctgctgacatcgagaccatcggggagatcctgaagaagatcatccccaccctggaggagggcctgcagctgcccagccccacagccaccagccagctgcccctggagagtgatgctgtggagtgcctgaactaccagcactacaagggcagtgactttgactgtgagctgcggctgctgatccaccagagcctggccggcggcatcattggagtgaagggggccaagatcaaggagctgcgggagaacacccagaccaccatcaagctgttccaggagtgctgcccccacagcacagacagagtggtgctgattggaggcaagccagacagagtggtggagtgcatcaagatcatcctggacctgatcagcgagagccccatcaagggccgggcccagccctatgaccccaacttctatgatgagacctatgactatggaggcttcaccatgatgtttgatgacagaagaggccggcctgtgggcttccccatgaggggccggggcggctttgacaggatgcctcctggccggggcggccggcccatgccacccagccggcgggactatgatgacatgagcccccggcggggccccccacctcctcctcctggccggggcggccggggcggcagccgggccaggaacctgcccctgcccccacctcctccaccccggggcggggacctgatggcctatgaccggcggggccggcctggggacagatatgatggcatggtgggcttcagcgcagatgagacctgggacagcgccatcgacacctggagccccagcgagtggcagatggcctatgagccccagggcggcagcggctatgactacagctatgccggcggccggggcagctatggagacctgggcggccccatcatcaccacccaggtgaccatccccaaggacctggccggcagcatcatcggcaagggcggccagaggatcaagcagatcagacatgagagcggggccagcatcaagattgatgagcccctggagggcagcgaggaccgcatcatcaccatcaccggcacccaggaccagatccagaatgcccagtacctgctgcagaacagcgtgaagcagtatgcagatgtggagggcttctag

SEQ ID NO: 221359 - DNA, 1395 bp, Artificial Sequence
  derived and/or modified sequence
atggagacagagcagcctgaggagaccttccccaacacagagaccaacggggagtttgggaagaggcctgctgaggacatggaggaggagcaggccttcaagaggagcaggaacacagatgagatggtggagctgcgcatcctgctgcagagcaagaatgctggggccgtcatcggcaagggcggcaagaacatcaaggccctgaggacagactacaatgcctctgtgtctgtgcctgacagcagcggccctgagcgcatcctgagcatctctgctgacatcgagaccatcggggagatcctgaagaagatcatccccaccctggaggagggcctgcagctgcccagccccacagccaccagccagctgcccctggagagtgatgctgtggagtgcctgaactaccagcactacaagggcagtgactttgactgtgagctgcggctgctgatccaccagagcctggccggcggcatcatcggcgtgaagggggccaagatcaaggagctgcgggagaacacccagaccaccatcaagctgttccaggagtgctgcccccacagcacagacagagtggtgctgattggaggcaagccagacagagtggtggagtgcatcaagatcatcctggacctgatcagcgagagccccatcaagggccgggcccagccctatgaccccaacttctatgatgagacctatgactatggaggcttcaccatgatgtttgatgaccggcggggccggcctgtgggcttccccatgaggggccggggcggctttgacaggatgcctcctggccggggcggccggcccatgccacccagcagaagagattatgatgacatgagcccccggcggggccccccacctcctcctcctggccggggcggccggggcggcagccgggccaggaacctgcccctgcccccacctcctccaccccggggcggggacctgatggcctatgacagaagaggccggcctggggacagatatgatggcatggtgggcttcagcgcagatgagacctgggacagcgccatcgacacctggagccccagcgagtggcagatggcctatgagccccagggcggcagcggctatgactacagctatgctgggggccggggcagctatggagacctgggcggccccatcatcaccacccaggtgaccatccccaaggacctggccggcagcatcattggaaaaggaggccagaggatcaagcagatcagacatgaaagtggggccagcatcaagattgatgagcccctggagggctctgaagatcgcatcatcaccatcaccggcacccaggaccagatccagaatgcccagtacctgctgcagaacagcgtgaagcagtatgcagatgtggagggcttctag

SEQ ID NO: 221360 - DNA, 1380 bp, Artificial Sequence
  derived and/or modified sequence
atggagaccgagcagcccgaggagaccttccccaacaccgagaccaacggagaatttggcaagcggcccgcagaagacatggaagaagagcaagcgtttaagcggtcacgaaacactgatgagatggtggaactcaggatacttctgcaatcaaagaatgccggagccgtgataggaaagggcggcaagaatataaaagccctgcgtaccgactattatctggtgttcgtggtgtttgattccatcctaagcatctcagcagacatagagacaataggggagatactcaaaaagattattcccacccttgaagaaggtcttcagttaccgagtccaactgcaacctcccagctacccctggagtcggacgccgtggagtgcctgaattatcagcattataagggctctgactttgattgcgaactcagacttctgattcatcagagcctggcaggaggcatcatcggagtgaagggggcaaagatcaaagaattaagggaaaacactcagaccaccatcaagcttttccaggagtgttgcccccactccactgatcgcgtggtcctcattggaggcaagcccgacagggtggtcgagtgtatcaagattatactcgacttgatttcggagagcccaataaaaggccgggcacaaccatacgaccccaacttttacgatgagacctacgattacggcgggtttaccatgatgtttgatgacaggcgaggacgaccggttgggttcccaatgcgtggacgagggggcttcgatagaatgccgccaggacgaggaggccggccaatgcccccaagcagacgggactacgatgatatgtcccctcgcagaggcccgcctccacctccacctggcagaggtgggaggggcggctcgagagcacgaaacctgccactcccccctcctccacctcctcggggtggggatctgatggcatatgaccggcgggggagacccggcgatcgttacgacggaatggttggtttttctgccgatgagacctgggattcagccatcgacacatggagcccttccgaatggcaaatggcgtacgaaccacaggggggcagcggttacgattactcttatgcaggcggccgcgggtcctatggtgacctaggtggccctataattacaacacaagtgaccataccaaaagacctggccggctccattattggaaagggcgggcagcgtatcaaacagattcgccacgagtccggtgcctctattaagatagacgaaccacttgaaggaagtgaggatagaatcattactattactgggactcaggaccagatacaaaacgcgcagtacctgctgcaaaattcggtgaagcaatacgctgatgttgagggcttttag

SEQ ID NO: 221361 - DNA, 1395 bp, Artificial Sequence
  derived and/or modified sequence
atggagaccgagcagcccgaggagaccttccccaacaccgagaccaatggggagttcgggaaaaggccggccgaagacatggaggaagagcaggccttcaagcgttctaggaacacggacgagatggtggaattgagaatcctcttgcagtcaaaaaacgccggggccgtcatcggtaaaggggggaaaaatattaaggcccttcggaccgactataacgcatctgtatcagtacccgatagctcaggaccagagcgtatattgtccatcagtgctgatatcgaaaccataggtgaaatactgaagaaaattattccaactcttgaggagggtctgcagctcccctcacccaccgctacctcccaactgccactggagtccgatgctgtagagtgcctcaattaccagcactataaaggctcggattttgattgcgaattgagactgttgattcaccagtccttggccggtggtattattggagtcaagggggcaaagataaaagaactgcgcgagaacacacagacaactattaaactgttccaggaatgctgtccccatagcacggacagggtggtcctcatcggtggaaagcctgaccgggtggtcgagtgcattaagatcattctggacttgatcagcgagtcccctataaaggggcgagcacaaccatacgaccccaacttctatgacgaaacctacgactatggaggctttaccatgatgtttgatgataggcgcggtcgcccggtgggcttcccaatgcggggacgcggtgggtttgaccggatgcctcctggaaggggcggaaggcccatgcctccctcacggagagactatgatgatatgtctcctcggcggggcccgccacctccccccccaggcagaggggggagaggcggatctagagcccgtaaccttccccttccccctccccccccacccaggggaggcgacctgatggcctacgaccggagaggcagaccaggggatcgttatgacggcatggtggggttcagcgccgatgagacgtgggactccgctatcgatacctggagccctagtgagtggcagatggcttatgagcctcagggtggaagtgggtacgactacagttatgcaggagggcgtggcagctacggtgatctgggaggacctatcattaccacgcaggtaacgatccctaaagaccttgctggttctatcattggcaagggtggccagcggattaaacaaattcggcatgagtccggagcctctatcaagatcgacgagccactggaggggagcgaggatcggataataacaataacgggcacccaggatcagatacaaaacgctcagtacctccttcagaactctgtgaagcaatatgccgatgtggaagggttttag

SEQ ID NO: 221362 - DNA, 1395 bp, Artificial Sequence
  derived and/or modified sequence
atggagaccgagcagcccgaggagaccttccccaacaccgagaccaatggagagttcggtaagcggcccgctgaagatatggaggaggagcaggcctttaagcgctcccggaataccgatgagatggtggaactacgtatcctgctgcagtcaaagaacgccggggccgtgatcggcaaaggtggtaaaaatattaaggccctgcggacagattataacgcctccgtgagcgttcctgactcttccggccctgagaggatcctgtcaatctctgccgacatcgagaccatcggtgagattttaaaaaagatcattcctacactggaggagggcctccaactgccttcccccaccgccacctcacagcttcctctagagtccgacgccgttgagtgtctgaattatcagcactacaaaggctccgattttgactgtgaattaagattattgatccatcaatcactggctggtggcattatcggagttaaaggtgccaaaatcaaagagttgcgggagaatacgcagaccacgattaaattgttccaggaatgctgccctcattctacggacagggttgtactcatcgggggcaaaccagaccgggttgtggaatgcatcaaaataatcttggacctcatcagcgagtctccaattaaggggagggcccaaccttatgaccctaatttctatgatgagacatatgactacggagggtttacaatgatgtttgacgacagacgggggcgtcctgttggctttcccatgagaggccgaggaggcttcgaccggatgccgcccggaaggggcggaaggcccatgccaccctctcggcgcgactatgacgatatgtcgcccaggcggggacctcccccacctccacctggccgcggaggcagggggggctcccgcgccagaaatctgccacttccgccgcccccccctccgaggggaggtgatctaatggcatacgatcggcggggtaggcctggggataggtacgatggaatggtaggcttttctgccgatgagacttgggatagcgcaattgacacctggtccccttcagagtggcaaatggcgtatgagccacagggcgggtctggctacgattattcttacgctggaggaagaggctcgtacggtgacttagggggacccatcattaccacccaggtgaccattcctaaagacttagcagggtcaattatcgggaagggcggccagcggatcaagcagattagacacgagagcggagcctctattaaaattgatgagcctctcgaagggagcgaagatagaataatcaccatcacaggtacacaggaccagatccagaatgcccagtatcttctccaaaactccgtcaagcagtacgccgatgtggaaggcttttag

SEQ ID NO: 221363 - DNA, 1395 bp, Artificial Sequence
  derived and/or modified sequence
atggagaccgagcagcccgaggagaccttccccaacaccgagaccaatggtgagttcggcaagcgccccgccgaggacatggaggaggagcaggcattcaaaaggagccggaatacggatgaaatggtcgagctccgcatcttactgcaaagtaagaacgccggcgctgttatcggcaaagggggcaagaacattaaggcactcagaactgattacaacgcctctgtatcagtccccgattcgagcggacctgagcggatattgtcaatctcggccgacattgaaaccattggggaaatcctgaagaagatcatacccactctcgaggagggactccagttgccaagtcccacagccaccagtcaactgccactggaaagtgatgctgtggagtgcctgaattatcaacattacaaaggatcggacttcgattgtgaattgcgactcctaatacatcagtcactcgccggcggtatcattggggtaaagggagccaaaatcaaagagctaagggaaaacactcagacgactatcaagcttttccaagagtgttgcccccactccaccgatcgggttgtccttatcgggggcaagccagatcgagtggtcgaatgtataaaaattatactagatctcatctcagaaagtcctattaaagggcgtgcacaaccatatgatcccaatttctatgacgaaacatacgattatgggggctttacaatgatgtttgacgatcgcaggggaaggcctgttgggttccctatgagaggtaggggcggatttgatcgcatgccaccaggacgcggaggacgcccaatgccaccctccagacgcgactatgatgatatgtctcctcggaggggacctccccctccacctccaggccgtgggggtaggggggggtctagagcacgcaacctgccgctaccaccaccccccccccctcggggcggggatctcatggcctacgataggcgcgggcggcctggtgatagatatgacgggatggtagggttttcagcagatgagacctgggactccgctatcgatacttggtcgccatccgaatggcagatggcttatgaaccccagggagggagcggctacgactatagttacgcaggaggccgcggcagctatggcgatttgggcggccccatcatcaccacacaagtaaccatcccgaaggatttagccggatccattattggtaaaggaggtcaacgcataaaacagatcagacatgagtccggcgcatccattaagattgatgaaccactcgaaggaagcgaggacagaatcattacaatcaccgggacacaggatcagatccagaacgcacagtacctcctccagaactccgtgaagcagtacgcagacgtggaggggttctag

SEQ ID NO: 221364 - DNA, 1380 bp, Artificial Sequence
  derived and/or modified sequence
atggagacggaacaacccgaagagacatttcccaataccgagactaacggcgaattcggaaagcgtccagccgaggatatggaagaggagcaagcctttaaacgctccaggaacactgatgagatggtggaactacgcatcctgctccaatcaaagaacgccggtgccgtgattggaaagggcggaaagaatattaaagcactgagaacagattactatctcgtgttcgtcgtatttgattctattctgagcatcagcgccgacatcgaaacaattggtgagattctgaagaagataataccaactctggaggagggcctccagttaccttctcccactgctacctctcagctgcctctggagagtgacgcagtggagtgtctgaattaccaacactataagggaagtgacttcgattgcgagctcaggctactgatacaccaatctctggccggtgggattatcggggtaaaaggcgcaaagataaaggaactgagagaaaacactcagacaactataaaactgtttcaggaatgttgccctcatagtactgaccgggtggtactgatcggcggaaagccagatagagtcgtagagtgcattaagatcattttagacctgatctcagagagccccattaaggggcgagcacaaccctatgatccaaatttttacgacgaaacgtatgattacggagggttcaccatgatgtttgacgacaggagagggagacccgtgggcttccccatgcggggtcggggtggcttcgaccgcatgccgcctggcagggggggtaggccaatgcccccaagcaggcgtgactacgacgacatgtccccaaggcggggtcctcctcctcctccccctgggaggggcggaagggggggatcccgggcacgcaatctaccattaccgcctccacctcctcccaggggaggggacctcatggcctatgacaggagaggacgccctggggataggtacgatggcatggtcgggttctccgctgacgagacatgggattcagctattgacacttggagtccaagcgaatggcagatggcatacgaacctcaaggtggcagcggctacgattatagttatgctggaggcagagggagctacggcgatctaggtgggccaattatcaccactcaggttacgatccctaaagatctagcagggtccattattgggaaaggaggccagcgcataaaacagatccgccatgagtcaggggcatccattaagattgatgaacctctggagggatccgaagatcgcatcattacaataaccggcacacaagatcagattcaaaatgcccagtatctgctgcagaacagtgtgaagcagtatgcagacgtagaagggttttag

SEQ ID NO: 221365 - DNA, 1395 bp, Artificial Sequence
  derived and/or modified sequence
atggagaccgagcagccagaagagactttcccaaatactgaaactaatggggagtttggcaagcgcccagcggaagatatggaggaggaacaggccttcaaacggtctcgcaataccgacgagatggtagaactcagaattctgctccaatcaaagaatgccggagccgtaatagggaagggtgggaagaatataaaggcgcttcggactgactacaatgcctctgtcagcgtccctgactcctcaggacccgaaagaattctctctatcagcgcagacattgagacgattggggaaattcttaagaagatcatacctacactcgaagaggggctgcagctcccttcacctacagctacctctcagctgcccttggagtccgatgctgtagagtgtctgaactatcagcactacaaggggtccgattttgattgtgaacttcgcctgttgattcatcagtctttggctggcggtatcattggcgtcaaaggagcaaagataaaggaattgcgggaaaatacacaaacgaccattaaacttttccaggaatgttgccctcatagtaccgatagggtcgtcctgatcggcggaaagcctgatagagtggtagagtgtattaagatcatcctggatctgatctccgagtcccctattaagggacgcgcacagccgtacgaccctaacttttacgatgagacatacgactatgggggatttactatgatgtttgacgatcgaaggggaaggccagtgggctttcccatgagaggccgaggcggttttgatagaatgcctccgggtaggggaggacggcctatgccaccatcccggagagactatgacgacatgagcccgagaaggggcccaccccctcccccaccaggtagaggcggtagggggggatccagagctcggaacctgccgctcccccctcctcccccaccaagagggggtgacctcatggcctatgatcgacggggtcggccaggcgatcggtatgacggaatggtcgggtttagtgctgacgagacctgggatagtgctatcgacacatggagccctagcgagtggcagatggcatatgaacctcagggaggcagtggatacgattatagctatgcgggagggcgtggctcgtacggagacctgggtggacctatcatcacaacccaagttaccatcccgaaggaccttgcaggttccatcatcggtaaaggaggccagcgaattaaacagattcggcacgagagtggcgcatctataaagatagacgagccactggagggatccgaagatagaattatcaccattaccggaactcaggatcagatccagaatgcccagtacctcctgcagaatagcgtaaaacaatatgccgacgtagagggattctag

SEQ ID NO: 221366 - DNA, 1395 bp, Artificial Sequence
  derived and/or modified sequence
atggagaccgaacagccagaggaaacgtttcccaacaccgaaaccaatggcgagtttggtaagcgccctgccgaagacatggaggaggagcaggcttttaaacgtagccgaaatactgacgaaatggtcgaactcaggatcttactccagagtaagaatgccggagcagtcatcggtaagggtggcaaaaacataaaggctctccggacggattacaacgcgtcagtgtccgtaccagactcttccggccctgaacgaatactgagcatcagcgctgatatagaaaccatcggggaaatcctaaaaaaaatcattccaactctggaggaggggttgcagctgccgtctcctaccgccacaagtcagctgccgttagagagcgacgccgtggagtgtctcaattatcagcactataagggatccgacttcgactgcgagctgcgcttgctcatccatcagagtttagcgggtggaattattggggtgaagggtgcaaaaataaaagaattacgggagaacacgcagaccacgattaagctgttccaggaatgttgcccacacagcacagacagggttgtgttgataggcggaaaaccagatagggtagtggaatgcataaagatcattcttgacttaatctcagagtccccaatcaagggacgagcccagccctacgaccctaacttctacgatgagacttacgactatgggggtttcacaatgatgtttgacgaccgcagaggacgtcctgtcggttttcctatgaggggcagaggaggatttgacaggatgccaccaggtaggggtggtcggccaatgccgccatctcgacgtgattacgatgatatgtctccccgaaggggccctccccctcctcctcccggaagggggggacgaggcggatccagagcccgaaacctgcctctccctcccccacccccacccagggggggagacctcatggcctacgacaggagaggtcggcctggggacagatatgacggtatggttggtttctccgcggatgagacatgggacagcgcaattgacacttggagcccctctgaatggcagatggcatatgagccacagggaggctccggatatgattatagctacgccggaggtaggggatcctatggcgacctgggcggaccaattattactacacaagttactatacccaaggatctggccggatctataatcggcaagggtgggcagagaattaagcagataaggcacgaatcgggcgcttccatcaaaatcgatgagcctctggaaggctctgaagacaggattatcaccatcaccgggacacaggaccagatccaaaatgcacaatatctcctccagaattctgtcaaacagtatgccgatgtcgaaggcttttag

SEQ ID NO: 221367 - DNA, 1395 bp, Artificial Sequence
  derived and/or modified sequence
atggaaacagaacaaccagaggagacatttcccaacaccgagactaatggagaattcggtaagagaccagcagaagacatggaggaggagcaggcctttaagaggtctagaaatacagacgaaatggtcgaacttcgaatcctccttcaatcaaaaaacgccggagcagtgatcggcaaggggggaaagaatatcaaggccctgcggacagactataatgccagcgtctctgtcccagactcgagtgggccagagagaattctgtcaatttctgctgatattgaaacaatcggtgagatcctgaagaagattattcccaccctggaggaagggctgcaacttccatcaccaacagctacctcacagctcccgctggaaagcgatgccgtggaatgcttgaactaccagcattataagggctcagattttgattgtgagttaagattattgattcaccagtcactcgcagggggaatcatcggagtgaaaggggctaaaattaaagagctgcgggagaacacgcagacgactatcaagttatttcaggagtgttgcccacattccactgatagagtcgtgctgattgggggaaaaccagaccgtgtggttgagtgtatcaagataatactggatctgatctccgagagtcccataaaaggtagggctcagccctacgacccgaacttctatgacgaaacatatgattacggaggctttaccatgatgtttgacgatcggagaggcagacctgtgggttttccgatgcggggacggggaggctttgaccggatgcccccaggacgtggtggacgacccatgcccccaagtcgcagggactacgatgacatgtcaccacggaggggtccaccccctcctccacccggtcgaggcggtaggggcggttccagagccaggaatctccctctgccacccccaccaccaccgaggggtggagacttgatggcatatgatagacgcggaagacctggagatcggtatgatggcatggtcggattctccgcggatgaaacgtgggactctgcaattgatacttggtccccctccgaatggcaaatggcttacgagccccagggcggatccgggtacgactatagctacgccggtgggagggggtcttatggtgacctgggcggtccaataattaccactcaagtgaccattcccaaggaccttgctggctccatcatcggcaaaggcggacagcggattaaacaaataagacatgaaagcggcgcttctattaaaatagatgagcccctagagggaagtgaggacaggattattaccatcacagggacacaagatcagatccaaaacgctcaatacctgcttcaaaattctgtcaaacagtacgctgacgtggagggattctag

SEQ ID NO: 221368 - DNA, 1380 bp, Artificial Sequence
  derived and/or modified sequence
atggagaccgagcagcccgaggagaccttccccaacaccgagaccaacggcgagttcggcaagagacccgccgaggacatggaggaggagcaggccttcaagagaagcagaaacaccgacgagatggtggagctgagaatcctgctgcagagcaagaacgccggcgccgtgatcggcaagggcggcaagaacatcaaggccctgagaaccgactactacctggtgttcgtggtgttcgacagcatcctgagcatcagcgccgacatcgagaccatcggcgagatcctgaagaagatcatccccaccctggaggagggcctgcagctgcccagccccaccgccaccagccagctgcccctggagagcgacgccgtggagtgcctgaactaccagcactacaagggcagcgacttcgactgcgagctgagactgctgatccaccagagcctggccggcggcatcatcggcgtgaagggcgccaagatcaaggagctgagagagaacacccagaccaccatcaagctgttccaggagtgctgcccccacagcaccgacagagtggtgctgatcggcggcaagcccgacagagtggtggagtgcatcaagatcatcctggacctgatcagcgagagccccatcaagggcagagcccagccctacgaccccaacttctacgacgagacctacgactacggcggcttcaccatgatgttcgacgacagaagaggcagacccgtgggcttccccatgagaggcagaggcggcttcgacagaatgccccccggcagaggcggcagacccatgccccccagcagaagagactacgacgacatgagccccagaagaggcccccccccccccccccccggcagaggcggcagaggcggcagcagagccagaaacctgcccctgccccccccccccccccccagaggcggcgacctgatggcctacgacagaagaggcagacccggcgacagatacgacggcatggtgggcttcagcgccgacgagacctgggacagcgccatcgacacctggagccccagcgagtggcagatggcctacgagccccagggcggcagcggctacgactacagctacgccggcggcagaggcagctacggcgacctgggcggccccatcatcaccacccaggtgaccatccccaaggacctggccggcagcatcatcggcaagggcggccagagaatcaagcagatcagacacgagagcggcgccagcatcaagatcgacgagcccctggagggcagcgaggacagaatcatcaccatcaccggcacccaggaccagatccagaacgcccagtacctgctgcagaacagcgtgaagcagtacgccgacgtggagggcttctag

SEQ ID NO: 221369 - DNA, 1395 bp, Artificial Sequence
  derived and/or modified sequence
atggagaccgagcagcccgaggagaccttccccaacaccgagaccaacggcgagttcggcaagagacccgccgaggacatggaggaggagcaggccttcaagagaagcagaaacaccgacgagatggtggagctgagaatcctgctgcagagcaagaacgccggcgccgtgatcggcaagggcggcaagaacatcaaggccctgagaaccgactacaacgccagcgtgagcgtgcccgacagcagcggccccgagagaatcctgagcatcagcgccgacatcgagaccatcggcgagatcctgaagaagatcatccccaccctggaggagggcctgcagctgcccagccccaccgccaccagccagctgcccctggagagcgacgccgtggagtgcctgaactaccagcactacaagggcagcgacttcgactgcgagctgagactgctgatccaccagagcctggccggcggcatcatcggcgtgaagggcgccaagatcaaggagctgagagagaacacccagaccaccatcaagctgttccaggagtgctgcccccacagcaccgacagagtggtgctgatcggcggcaagcccgacagagtggtggagtgcatcaagatcatcctggacctgatcagcgagagccccatcaagggcagagcccagccctacgaccccaacttctacgacgagacctacgactacggcggcttcaccatgatgttcgacgacagaagaggcagacccgtgggcttccccatgagaggcagaggcggcttcgacagaatgccccccggcagaggcggcagacccatgccccccagcagaagagactacgacgacatgagccccagaagaggcccccccccccccccccccggcagaggcggcagaggcggcagcagagccagaaacctgcccctgccccccccccccccccccagaggcggcgacctgatggcctacgacagaagaggcagacccggcgacagatacgacggcatggtgggcttcagcgccgacgagacctgggacagcgccatcgacacctggagccccagcgagtggcagatggcctacgagccccagggcggcagcggctacgactacagctacgccggcggcagaggcagctacggcgacctgggcggccccatcatcaccacccaggtgaccatccccaaggacctggccggcagcatcatcggcaagggcggccagagaatcaagcagatcagacacgagagcggcgccagcatcaagatcgacgagcccctggagggcagcgaggacagaatcatcaccatcaccggcacccaggaccagatccagaacgcccagtacctgctgcagaacagcgtgaagcagtacgccgacgtggagggcttctag

SEQ ID NO: 221370 - DNA, 1734 bp, Artificial Sequence
  derived and/or modified sequence
gagaaggcgggggaggggagcctgcgctcgttttctgtctagctccgaccggctgaggcggcgcggcagcggagggacggcagtctcgcgcggctactgcagcactggggtgtcagttgttggtccgacccagaacgcttcagttctgctctgcaaggatatataataactgattggtgtgcccgtttaataaaagaatatggaaactgaacagccagaagaaaccttccctaacactgaaaccaatggtgaatttggtaaacgccctgcagaagatatggaagaggaacaagcatttaaaagatctagaaacactgatgagatggttgaattacgcattctgcttcagagcaagaatgctggggcagtgattggaaaaggaggcaagaatattaaggctctccgtacagactactatctggtatttgtggtgtttgacagcatattgagtatcagtgctgatattgaaacaattggagaaattctgaagaaaatcatccctaccttggaagagggcctgcagttgccatcacccactgcaaccagccagctcccgctcgaatctgatgctgtggaatgcttaaattaccaacactataaaggaagtgactttgactgcgagttgaggctgttgattcatcagagtctagcaggaggaattattggggtcaaaggtgctaaaatcaaagaacttcgagagaacactcaaaccaccatcaagcttttccaggaatgctgtcctcattccactgacagagttgttcttattggaggaaaacccgatagggttgtagagtgcataaagatcatccttgatcttatatctgagtctcccatcaaaggacgtgcacagccttatgatcccaatttttacgatgaaacctatgattatggtggttttacaatgatgtttgatgaccgtcgcggacgcccagtgggatttcccatgcggggaagaggtggttttgacagaatgcctcctggtcggggtgggcgtcccatgcctccatctagaagagattatgatgatatgagccctcgtcgaggaccacctccccctcctcccggacgaggcggccggggtggtagcagagctcggaatcttcctcttcctccaccaccaccacctagagggggagacctcatggcctatgacagaagagggagacctggagaccgttacgacggcatggttggtttcagtgctgatgaaacttgggactctgcaatagatacatggagcccatcagaatggcagatggcttatgaaccacagggtggctccggatatgattattcctatgcagggggtcgtggctcatatggtgatcttggtggacctattattactacacaagtaactattcccaaagatttggctggatctattattggcaaaggtggtcagcggattaaacaaatccgtcatgagtcgggagcttcgatcaaaattgatgagcctttagaaggatccgaagatcggatcattaccattacaggaacacaggaccagatacagaatgcacagtatttgctgcagaacagtgtgaagcagtatgcagatgttgaaggattctaatgcaagatattttttcttttttatagtgtgaagcagtattctggaaagtttttctaagactagtgaagaactgaaggagtcctgcatctttttttttttatctgcttctgtttaaaaagccaacattcctctgcttcataggtgttctgcatttg

SEQ ID NO: 221371 - DNA, 2942 bp, Artificial Sequence
  derived and/or modified sequence
tagggcgcgacggcggggaggacgcgagaaggcgggggaggggagcctgcgctcgttttctgtctagctccgaccggctgaggcggcgcggcagcggagggacggcagtctcgcgcggctactgcagcactggggtgtcagttgttggtccgacccagaacgcttcagttctgctctgcaaggatatataataactgattggtgtgcccgtttaataaaagaatatggaaactgaacagccagaagaaaccttccctaacactgaaaccaatggtgaatttggtaaacgccctgcagaagatatggaagaggaacaagcatttaaaagatctagaaacactgatgagatggttgaattacgcattctgcttcagagcaagaatgctggggcagtgattggaaaaggaggcaagaatattaaggctctccgtacagactacaatgccagtgtttcagtcccagacagcagtggccccgagcgcatattgagtatcagtgctgatattgaaacaattggagaaattctgaagaaaatcatccctaccttggaagagggcctgcagttgccatcacccactgcaaccagccagctcccgctcgaatctgatgctgtggaatgcttaaattaccaacactataaaggaagtgactttgactgcgagttgaggctgttgattcatcagagtctagcaggaggaattattggggtcaaaggtgctaaaatcaaagaacttcgagagaacactcaaaccaccatcaagcttttccaggaatgctgtcctcattccactgacagagttgttcttattggaggaaaacccgatagggttgtagagtgcataaagatcatccttgatcttatatctgagtctcccatcaaaggacgtgcacagccttatgatcccaatttttacgatgaaacctatgattatggtggttttacaatgatgtttgatgaccgtcgcggacgcccagtgggatttcccatgcggggaagaggtggttttgacagaatgcctcctggtcggggtgggcgtcccatgcctccatctagaagagattatgatgatatgagccctcgtcgaggaccacctccccctcctcccggacgaggcggccggggtggtagcagagctcggaatcttcctcttcctccaccaccaccacctagagggggagacctcatggcctatgacagaagagggagacctggagaccgttacgacggcatggttggtttcagtgctgatgaaacttgggactctgcaatagatacatggagcccatcagaatggcagatggcttatgaaccacagggtggctccggatatgattattcctatgcagggggtcgtggctcatatggtgatcttggtggacctattattactacacaagtaactattcccaaagatttggctggatctattattggcaaaggtggtcagcggattaaacaaatccgtcatgagtcgggagcttcgatcaaaattgatgagcctttagaaggatccgaagatcggatcattaccattacaggaacacaggaccagatacagaatgcacagtatttgctgcagaacagtgtgaagcagtatgcagatgttgaaggattctaatgcaagatattttttcttttttatagtgtgaagcagtattctggaaagtttttctaagactagtgaagaactgaaggagtcctgcatctttttttttttatctgcttctgtttaaaaagccaacattcctctgcttcataggtgttctgcatttgaggtgtagtgaaatctttgctgttcaccagatgtaatgttttagttccttacaaacagggttgggggggggaagggcgtgcaaaaactaacattgaaattttgaaacagcagcagagtgagtggattttatttttcgttattgttggtggtttaaaaaattccccccatgtaattattgtgaacaccttgctttgtggtcactgtaacatttggggggtgggacagggaggaaaagtaacaatagtccacatgtccctggcatctgttcagagcagtgtgcagaatgtaatgctcttttgtaagaaacgttttatgatttttaaaataaatttagtgaacctatttttggtggtcattttttttttaagacagtcattttaaaatggtggctgaatttcccaacccacccccaaactaaacactaagtttaattttcagctcctctgttggacatataagtgcatctcttgttggacataggcaaaataacttggcaaacttagttctggtgatttcttgatggtttggaagtctattgctgggaagaaattccatcatacatattcatgcttataataagctggggattttttgtttgtttttgcaaatgcttgcccctacttttcaacaattttctatgttagttgtgaagaactaaggtggggagcagtactacaagttgagtaatggtatgagtatataccagaattctgattggcagcaagttttattaatcagaataacacttggttatggaagtgactaatgctgaaaaaattgattatttttattagataatttctcacctatagacttaaactgtcaatttgctctagtgtcttattagttaaactttgtaaaatatatatatacttgtttttccattgtatgcaaattgaaagaaaaagatgtaccatttctctgttgtatgttggattatgtaggaaatgtttgtgtacaattcaaaaaaaaaaaagatgaaaaaagttcctgtggatgttttgtgtagtatcttggcatttgtattgatagttaaaattcacttccaaataaataaaacacccatgatgctagatttgatgtgtgcccgatttgaacaagggttgattgacacctgtaaaatttgttgaaacgttcctcttaaaaggaaatatagtaatcttatgt

SEQ ID NO: 221372 - DNA, 2741 bp, Artificial Sequence
  derived and/or modified sequence
gctccaggcgacagcactgcagacgccattatcctctgtttctctgctgcaccgacctcgacgtcttgcctgtgtcccacttgttcgcggcctattggtgtgcccgtttaataaaagaatatggaaactgaacagccagaagaaaccttccctaacactgaaaccaatggtgaatttggtaaacgccctgcagaagatatggaagaggaacaagcatttaaaagatctagaaacactgatgagatggttgaattacgcattctgcttcagagcaagaatgctggggcagtgattggaaaaggaggcaagaatattaaggctctccgtacagactacaatgccagtgtttcagtcccagacagcagtggccccgagcgcatattgagtatcagtgctgatattgaaacaattggagaaattctgaagaaaatcatccctaccttggaagagggcctgcagttgccatcacccactgcaaccagccagctcccgctcgaatctgatgctgtggaatgcttaaattaccaacactataaaggaagtgactttgactgcgagttgaggctgttgattcatcagagtctagcaggaggaattattggggtcaaaggtgctaaaatcaaagaacttcgagagaacactcaaaccaccatcaagcttttccaggaatgctgtcctcattccactgacagagttgttcttattggaggaaaacccgatagggttgtagagtgcataaagatcatccttgatcttatatctgagtctcccatcaaaggacgtgcacagccttatgatcccaatttttacgatgaaacctatgattatggtggttttacaatgatgtttgatgaccgtcgcggacgcccagtgggatttcccatgcggggaagaggtggttttgacagaatgcctcctggtcggggtgggcgtcccatgcctccatctagaagagattatgatgatatgagccctcgtcgaggaccacctccccctcctcccggacgaggcggccggggtggtagcagagctcggaatcttcctcttcctccaccaccaccacctagagggggagacctcatggcctatgacagaagagggagacctggagaccgttacgacggcatggttggtttcagtgctgatgaaacttgggactctgcaatagatacatggagcccatcagaatggcagatggcttatgaaccacagggtggctccggatatgattattcctatgcagggggtcgtggctcatatggtgatcttggtggacctattattactacacaagtaactattcccaaagatttggctggatctattattggcaaaggtggtcagcggattaaacaaatccgtcatgagtcgggagcttcgatcaaaattgatgagcctttagaaggatccgaagatcggatcattaccattacaggaacacaggaccagatacagaatgcacagtatttgctgcagaacagtgtgaagcagtatgcagatgttgaaggattctaatgcaagatattttttcttttttatagtgtgaagcagtattctggaaagtttttctaagactagtgaagaactgaaggagtcctgcatctttttttttttatctgcttctgtttaaaaagccaacattcctctgcttcataggtgttctgcatttgaggtgtagtgaaatctttgctgttcaccagatgtaatgttttagttccttacaaacagggttgggggggggaagggcgtgcaaaaactaacattgaaattttgaaacagcagcagagtgagtggattttatttttcgttattgttggtggtttaaaaaattccccccatgtaattattgtgaacaccttgctttgtggtcactgtaacatttggggggtgggacagggaggaaaagtaacaatagtccacatgtccctggcatctgttcagagcagtgtgcagaatgtaatgctcttttgtaagaaacgttttatgatttttaaaataaatttagtgaacctatttttggtggtcattttttttttaagacagtcattttaaaatggtggctgaatttcccaacccacccccaaactaaacactaagtttaattttcagctcctctgttggacatataagtgcatctcttgttggacataggcaaaataacttggcaaacttagttctggtgatttcttgatggtttggaagtctattgctgggaagaaattccatcatacatattcatgcttataataagctggggattttttgtttgtttttgcaaatgcttgcccctacttttcaacaattttctatgttagttgtgaagaactaaggtggggagcagtactacaagttgagtaatggtatgagtatataccagaattctgattggcagcaagttttattaatcagaataacacttggttatggaagtgactaatgctgaaaaaattgattatttttattagataatttctcacctatagacttaaactgtcaatttgctctagtgtcttattagttaaactttgtaaaatatatatatacttgtttttccattgtatgcaaattgaaagaaaaagatgtaccatttctctgttgtatgttggattatgtaggaaatgtttgtgtacaattcaaaaaaaaaaaagatgaaaaaagttcctgtggatgttttgtgtagtatcttggcatttgtattgatagttaaaattcacttccaaataaataaaacacccatgatg

SEQ ID NO: 221373 - DNA, 2928 bp, Artificial Sequence
  derived and/or modified sequence
agggcgctccaggcgacagcactgcagacgccattatcctctgtttctctgctgcaccgacctcgacgtcttgcctgtgtcccacttgttcgcggcctataggctactgcagcactggggtgtcagttgttggtccgacccagaacgcttcagttctgctctgcaaggatatataataactgattggtgtgcccgtttaataaaagaatatggaaactgaacagccagaagaaaccttccctaacactgaaaccaatggtgaatttggtaaacgccctgcagaagatatggaagaggaacaagcatttaaaagatctagaaacactgatgagatggttgaattacgcattctgcttcagagcaagaatgctggggcagtgattggaaaaggaggcaagaatattaaggctctccgtacagactacaatgccagtgtttcagtcccagacagcagtggccccgagcgcatattgagtatcagtgctgatattgaaacaattggagaaattctgaagaaaatcatccctaccttggaagagggcctgcagttgccatcacccactgcaaccagccagctcccgctcgaatctgatgctgtggaatgcttaaattaccaacactataaaggaagtgactttgactgcgagttgaggctgttgattcatcagagtctagcaggaggaattattggggtcaaaggtgctaaaatcaaagaacttcgagagaacactcaaaccaccatcaagcttttccaggaatgctgtcctcattccactgacagagttgttcttattggaggaaaacccgatagggttgtagagtgcataaagatcatccttgatcttatatctgagtctcccatcaaaggacgtgcacagccttatgatcccaatttttacgatgaaacctatgattatggtggttttacaatgatgtttgatgaccgtcgcggacgcccagtgggatttcccatgcggggaagaggtggttttgacagaatgcctcctggtcggggtgggcgtcccatgcctccatctagaagagattatgatgatatgagccctcgtcgaggaccacctccccctcctcccggacgaggcggccggggtggtagcagagctcggaatcttcctcttcctccaccaccaccacctagagggggagacctcatggcctatgacagaagagggagacctggagaccgttacgacggcatggttggtttcagtgctgatgaaacttgggactctgcaatagatacatggagcccatcagaatggcagatggcttatgaaccacagggtggctccggatatgattattcctatgcagggggtcgtggctcatatggtgatcttggtggacctattattactacacaagtaactattcccaaagatttggctggatctattattggcaaaggtggtcagcggattaaacaaatccgtcatgagtcgggagcttcgatcaaaattgatgagcctttagaaggatccgaagatcggatcattaccattacaggaacacaggaccagatacagaatgcacagtatttgctgcagaacagtgtgaagcagtatgcagatgttgaaggattctaatgcaagatattttttcttttttatagtgtgaagcagtattctggaaagtttttctaagactagtgaagaactgaaggagtcctgcatctttttttttttatctgcttctgtttaaaaagccaacattcctctgcttcataggtgttctgcatttgaggtgtagtgaaatctttgctgttcaccagatgtaatgttttagttccttacaaacagggttgggggggggaagggcgtgcaaaaactaacattgaaattttgaaacagcagcagagtgagtggattttatttttcgttattgttggtggtttaaaaaattccccccatgtaattattgtgaacaccttgctttgtggtcactgtaacatttggggggtgggacagggaggaaaagtaacaatagtccacatgtccctggcatctgttcagagcagtgtgcagaatgtaatgctcttttgtaagaaacgttttatgatttttaaaataaatttagtgaacctatttttggtggtcattttttttttaagacagtcattttaaaatggtggctgaatttcccaacccacccccaaactaaacactaagtttaattttcagctcctctgttggacatataagtgcatctcttgttggacataggcaaaataacttggcaaacttagttctggtgatttcttgatggtttggaagtctattgctgggaagaaattccatcatacatattcatgcttataataagctggggattttttgtttgtttttgcaaatgcttgcccctacttttcaacaattttctatgttagttgtgaagaactaaggtggggagcagtactacaagttgagtaatggtatgagtatataccagaattctgattggcagcaagttttattaatcagaataacacttggttatggaagtgactaatgctgaaaaaattgattatttttattagataatttctcacctatagacttaaactgtcaatttgctctagtgtcttattagttaaactttgtaaaatatatatatacttgtttttccattgtatgcaaattgaaagaaaaagatgtaccatttctctgttgtatgttggattatgtaggaaatgtttgtgtacaattcaaaaaaaaaaaagatgaaaaaagttcctgtggatgttttgtgtagtatcttggcatttgtattgatagttaaaattcacttccaaataaataaaacacccatgatgctagatttgatgtgtgcccgatttgaacaagggttgattgacacctgtaaaatttgttgaaacgttcctcttaaaaggaaatatagtaatcttatgta

SEQ ID NO: 221374 - protein, 651 aa, Artificial Sequence
  derived and/or modified sequence
MGSWALLWPPLLFTGLLVRPPGTMAQAQYCSVNKDIFEVEENTNVTEPLVDIHVPEGQEVTLGALSTPFAFRIQGNQLFLNVTPDYEEKSLLEAQLLCQSGGTLVTQLRVFVSVLDVNDNAPEFPFKTKEIRVEEDTKVNSTVIPETQLQAEDRDKDDILFYTLQEMTAGASDYFSLVSVNRPALRLDRPLDFYERPNMTFWLLVRDTPGENVEPSHTATATLVLNVVPADLRPPWFLPCTFSDGYVCIQAQYHGAVPTGHILPSPLVLRPGPIYAEDGDRGINQPIIYSIFRGNVNGTFIIHPDSGNLTVARSVPSPMTFLLLVKGQQADLARYSVTQVTVEAVAAAGSPPRFPQRLYRGTVARGAGAGVVVKDAAAPSQPLRIQAQDPEFSDLNSAITYRITNHSHFRMEGEVVLTTTTLAQAGAFYAEVEAHNTVTSGTATTVIEIQVSEQEPPSTGGGPSEDKRFSVVDMAALGGVLGALLLLALLGLAVLVHKHYGPRLKCCCGKAPEPQPQGFDNQAFLPDHKANWAPVPSPTHDPKPAEAPMPAEPAPPGPASPGGAPEPPAAARAGGSPTAVRSILTKERRPEGGYKAVWFGEDIGTEADVVVLNAPTLDVDGASDSGSGDEGEGAGRGGGPYDAPGGDDSYI

SEQ ID NO: 221375 - DNA, 1956 bp, Artificial Sequence
  derived and/or modified sequence
atgggatcctgggccctgttgtggcccccactgctgtttaccggtctgctggttagacccccaggtaccatggcacaagctcagtattgttcagttaataaggacattttcgaggtcgaggagaataccaacgttactgaacccctggtggatatccacgtgcctgagggccaggaggtcaccctcggtgccctttccaccccgttcgctttccggattcagggaaaccagttgtttctgaacgtgacccctgattacgaggagaaatcactgcttgaagcacagttattatgtcagtccggtggcacgctggtgacacaattacgcgttttcgtttccgtgctcgacgtcaacgataatgcccccgagttccccttcaagacaaaggagattcgggtcgaggaggatacaaaggtcaatagtactgtgattccagaaacccagcttcaggcggaggatagagacaaagatgacatcttattttacacactgcaagagatgacagcaggggccagcgattatttcagcctcgtttctgtgaatcgtcccgcgctgcggctggatcgccccctagatttttacgagcggcctaacatgacattctggttgctagttagggacacccccggggagaacgtagagccttcacacaccgctactgctactctagttctcaatgtcgtgccagccgacttaaggccgccctggttcctcccatgtaccttcagtgacgggtacgtttgtatccaagcccagtatcatggcgcagtgcccactggtcatattctgccaagccctctcgtcctgcggccaggtcccatctacgcagaggatggggatagaggcatcaaccagcctataatttattcaattttccgaggcaacgtcaacggcaccttcatcatccacccagactccggcaatctgaccgtcgcccgatctgtgcctagcccaatgaccttccttctgctcgtcaagggtcagcaggccgatctggcacgttacagcgtaacccaggtaacagtggaggccgttgccgccgccggaagccccccgaggttcccgcagagattatacagaggtacagtggcacggggagccggcgcaggcgtcgtggtcaaagacgccgccgcaccctctcagccactgaggatacaagcccaggacccggaattttcagacctgaactcggccattacgtaccggatcactaatcactcccatttcagaatggaaggggaggtggttttgactaccaccactctcgcccaggccggagctttttatgcggaggtggaggcacacaacaccgtcacatccggaactgccacgaccgtcatagagatccaggtgagcgagcaggaaccacctagcacgggcggtggtccttccgaagataagcggttcagcgtggtcgacatggcggcacttgggggagtgctgggagccctactactgctcgcactcttgggattagctgtgctcgtgcacaagcattacgggcctcggctcaaatgttgttgcggaaaagcccctgagccccaaccccagggctttgataaccaagccttcttgcccgatcacaaagccaattgggccccagttccatcacccacccacgaccccaagcctgctgaggctcccatgcccgccgagcctgctccccccggcccagcctcccccggcggagctccagagcccccagctgcggcgagagcaggcggttccccaaccgctgtgcgttctattctcaccaaagaaaggcgcccagagggaggttacaaggctgtgtggtttggcgaggatatcggcaccgaggccgacgtggtggttctgaatgctcccaccctggatgtggatggcgccagtgactcaggctccggggatgaaggagagggcgctggtcgtggaggagggccctacgatgctccaggcggggatgactcctacatatag

SEQ ID NO: 221376 - DNA, 1956 bp, Artificial Sequence
  derived and/or modified sequence
atgggctcctgggccctgctgtggccacccctgctcttcaccggcctgctggtgcggcccccaggcaccatggcccaggcccagtactgcagcgtgaacaaggacatctttgaggtggaggagaacaccaacgtgacagagcccctggtggacatccacgtgcctgagggccaggaggtgaccctgggcgccctgagcaccccatttgccttccgcatccagggcaaccagctgttcctgaatgtgaccccagactatgaggagaagagcctgctggaggcccagctgctgtgccagagcggcggcaccctggtgacccagctgcgggtgtttgtgtctgtgctggatgtgaatgacaatgcccctgagttccccttcaagaccaaggagatccgggtggaggaggacaccaaggtgaacagcaccgtcatccctgagacccagctgcaggccgaggaccgggacaaggatgacatcctcttctacaccctgcaggagatgacagctggggccagtgactacttcagcctggtgtctgtgaacagacctgccctgcggctggaccggcccctggacttctatgaaagacccaacatgaccttctggctgctggtgcgggacaccccaggagaaaatgtggagcccagccacacagccacagccaccctggtgctgaatgtggtgcctgctgacctgcggcccccctggttcctgccctgcaccttcagtgatggctacgtgtgcatccaggcccagtaccacggggctgtgcccaccggccacatcctgcccagccccctggtgctgcggcccggccccatctatgcagaagatggagaccggggcatcaaccagcccatcatctacagcatcttcagaggaaatgtgaatggcaccttcatcatccacccagacagcggcaacctgactgtggcccggtctgtgcccagccccatgaccttcctgctgctggtgaagggccagcaggccgacctggcccgctacagcgtgacccaggtgacagtggaggccgtggccgccgccggcagccccccacgcttcccccagaggctgtaccggggcaccgtggcccggggagctggagctggggtggtggtgaaggatgctgctgcccccagccagcccctgcgcatccaggcccaggaccctgagttcagtgacctgaacagcgccatcacctaccgcatcaccaaccacagccacttcaggatggagggggaggtggtgctgaccaccaccaccctggcccaggccggggccttctacgccgaggtggaggcccacaacacagtgaccagcggcacagccaccaccgtgattgagatccaggtgtctgagcaggagccccccagcactggaggcggccccagcgaggacaagcgcttctctgtggtggacatggccgccctgggcggcgtgctgggcgccctgctgctgctggccctgctgggcctggccgtgctggtgcacaagcactacggcccccggctgaagtgctgctgcggcaaggcccctgagccccagccccagggctttgacaaccaggccttcctgcctgaccacaaggccaactgggcccctgtgcccagccccacccatgaccccaagccagctgaggcccccatgcctgctgagcccgcccctcctggccctgccagccctggaggagcccctgagcccccagctgctgcccgggccggcggcagccccacagctgtgcgcagcatcctgaccaaggagcggcggcctgagggcggctacaaggctgtgtggtttggagaagatattggaacagaagcagatgtggtggtgctgaatgcccccaccctggatgtggatggagccagtgacagcggcagcggagatgaaggagagggcgccggccggggcggcggcccctatgatgcccctggaggagatgacagctacatctag

SEQ ID NO: 221377 - DNA, 1956 bp, Artificial Sequence
  derived and/or modified sequence
atgggcagctgggccctgctgtggccccccctgctgttcaccggcctgttggtgaggccacctggcactatggctcaggctcagtactgctccgtgaacaaggatatattcgaagttgaggagaacaccaatgtgacggagcccctggtggacatccatgtccccgaggggcaggaggtcaccctgggagccctgtcaacccctttcgcctttcgcattcagggaaaccagctcttcctgaatgtgacccctgactacgaggagaaatccctgctggaggcccagctgctatgtcaatccggtggtactctagtaactcaactgcgggtttttgtctcagttctggatgtgaacgataacgcaccagagttccctttcaagaccaaggagatcagggtggaggaggatacaaaagtaaacagcaccgtgatccctgagactcagctgcaggctgaggaccgagacaaagacgacatcctgttctacaccctgcaggagatgacagccggggcttctgactacttctcactggtttcggtaaatagaccggcgctaaggctcgaccggcccctggatttctatgagaggccaaacatgacattttggcttctcgtgcgcgacacccccggcgagaacgtggagcctagccatacggctaccgcaacattagtattaaatgtcgtgcccgcggacctccggcccccttggtttctcccttgtacgttcagtgatgggtatgtgtgtatccaggcccagtatcacggtgccgttcctaccggccatatcctgccctcccccctggttctgaggcctgggccgatttatgctgaagacggagaccgcgggatcaatcagccaatcatctattcaatttttaggggtaacgtcaatggcacctttatcattcaccccgatagtggcaacttgaccgttgctagaagcgtaccaagtccgatgacattccttctgctggtcaaaggacagcaggccgatctggcccgatattcagtcacccaggttaccgttgaggccgtcgccgccgcgggctctccccctcggttccctcagcgcctctatcgcggcactgttgccagaggcgccggcgcaggggtggtcgtgaaggatgcagcggccccttcccagcctctccgcattcaggctcaggaccccgaattttctgacctgaattccgccatcacgtaccggattaccaaccattctcacttccgcatggagggggaggtagtgcttactaccaccacacttgctcaggcaggagcattttatgctgaggtggaggctcacaatactgtcacctcaggaactgcaacgaccgttatcgagattcaggtctctgaacaagaaccgcccagcacaggcgggggaccctccgaagacaagcgcttctcagtggttgacatggcagccctggggggggtgctgggagctctgcttctcctcgctctgctcggcctcgccgtgttggtccataaacattacggccctcgcctcaaatgttgttgcggcaaggcccctgagccacagcctcaaggattcgacaatcaggcctttctgcccgaccataaggcaaattgggcccctgtgccctcgcccacacacgaccccaaacctgctgaggctcctatgccagccgagcccgccccacctggacccgccagtccaggaggagctccagagccacccgccgcagctagagctgggggcagtcccaccgctgtccgaagtatcctgacgaaggagcggaggcctgagggtggctacaaggcggtttggttcggcgaggacatcggaacagaggctgacgtggtagtcttaaacgcccccacactcgatgtggatggtgcctccgattctggctcaggggatgagggtgagggcgccgggaggggcggaggcccatatgacgcacctggcggtgacgacagttacatatag

SEQ ID NO: 221378 - DNA, 1956 bp, Artificial Sequence
  derived and/or modified sequence
atgggatcttgggctctcctgtggccacccctgttgttcacaggcctccttgtccgaccaccaggcactatggctcaggcccaatactgtagcgtgaacaaggacatcttcgaggtggaagaaaacacgaatgttaccgaaccactcgtcgatattcacgtgcctgaggggcaagaagtgacactgggcgcattgtcgaccccttttgccttcagaatccagggtaaccagctcttcttgaacgtaacccctgactacgaggagaagtcattactggaggcacaactgctctgtcagagcggagggactctggtgactcagctgagggtcttcgtgagcgtgctcgatgtaaacgacaacgctcccgagtttccgtttaagacaaaggagattagggttgaggaggacaccaaggtgaattccaccgtcatccccgaaacgcagctccaagctgaagaccgcgataaagatgatattttgttctatactttgcaggaaatgaccgctggagcctccgattacttttcgctcgtgtcagtcaatagacctgctcttcgcctcgatcgcccactggatttctatgagaggcccaacatgacattttggctgctcgtgagagacacccccggtgagaatgtagagccaagccacactgccaccgcaacactggtgcttaatgtcgtgcccgctgacttgcgtccaccctggtttctgccttgcacattcagcgatggctacgtgtgcatccaggcacagtatcatggcgctgtccctaccggtcacatcttgccatccccactggtcctccgacctgggccaatatacgcagaagatggggatcgtgggatcaaccagccgattatctacagtatctttcgcggaaacgtaaatggcacgttcattatacatccggacagtgggaaccttaccgtcgctaggtctgtgccaagtcccatgacttttctgcttcttgtgaagggacagcaggccgacctcgcccgatacagcgtgacccaggtaacagtggaagccgtggcagctgccggatcccctccacgcttcccccagaggctttaccgaggcacagttgcgcgtggcgctggggcaggggttgtcgtgaaagacgcagccgctccatctcaaccactgaggatacaagcccaggaccctgaattcagcgacttgaattctgccattacctatcggataactaatcactctcacttcagaatggaaggagaagtcgtcctgaccactacaaccctggcccaggccggagctttttacgctgaggtggaagcacacaatacagtcacctccggcacggccactacagttatcgagattcaggtgtctgagcaggaacccccttcgaccggcggaggccctagtgaggacaagcgatttagcgtcgtggacatggcagcactgggcggtgtgctgggagccctgctccttctggcactgctgggactggccgtactggttcataaacactacggccctcgcttaaagtgctgctgcggcaaggccccagagcctcagcctcaaggattcgataatcaggcatttctgccagatcataaggccaactgggcccctgtgcccagccctacccacgatcctaaaccagccgaggcacccatgcccgcagagccggctccccctggaccagcttcaccgggtggagctcccgagcctcccgcagcagccagagcaggtggatcccccactgcggtgcgatcgatccttacgaaagaaagacgacctgagggcggttataaggcggtctggttcggggaggacataggaacggaagccgacgtggttgtgttgaacgccccaacacttgatgtcgacggtgcaagtgattcaggctctggcgacgagggcgagggggcaggccgaggaggcggtccgtacgatgctccaggcggtgacgattcatatatatag

SEQ ID NO: 221379 - DNA, 2318 bp, Artificial Sequence
  derived and/or modified sequence
agtcccttctgccctgtgcctcggtgcctgtgacctgagccccctggttgacccctgcactcagtccaacttgggccaaacgactgcccctccttctggcagtgggctggaccagccggccagcgggagcccccttggcagaagccggtcgtaaaggatcataaactgggcggcgtctggctggggcgaaggtcgctgaggtaggaactgcgccagtcctagacgccagacccgctcagaccctcctgccaggtgacagccgccaagatggggtcttgggccctgctgtggcctcccctgctgttcaccgggctgctcgtccgacccccggggaccatggcccaggcccagtactgctctgtgaacaaggacatctttgaagtagaggagaacacaaatgtcaccgagccgctggtggacatccacgtcccggagggccaggaggtgaccctcggagccttgtccaccccctttgcatttcggatccagggaaaccagctgtttctcaacgtgactcctgattacgaggagaagtcactgcttgaggctcagctgctgtgtcagagcggaggcacattggtgacccagctaagggtgttcgtgtcagtgctggacgtcaatgacaatgcccccgaattcccctttaagaccaaggagataagggtggaggaggacacgaaagtgaactccaccgtcatccccgagacgcaactgcaggctgaggaccgcgacaaggacgacattctgttctacaccctccaggaaatgacagcaggtgccagtgactacttctccctggtgagtgtaaaccgtcccgccctgaggctggaccggcccctggacttctacgagcggccgaacatgaccttctggctgctggtgcgggacactccgggggagaatgtggaacccagccacactgccaccgccacactagtgctgaacgtggtgcccgccgacctgcggcccccgtggttcctgccctgcaccttctcagatggctacgtctgcattcaagctcagtaccacggggctgtccccacggggcacatactgccatctcccctcgtcctgcgtcccggacccatctacgctgaggacggagaccgcggcatcaaccagcccatcatctacagcatctttaggggaaacgtgaatggtacattcatcatccacccagactcgggcaacctcaccgtggccaggagtgtccccagccccatgaccttccttctgctggtgaagggccaacaggccgaccttgcccgctactcagtgacccaggtcaccgtggaggctgtggctgcggccgggagcccgccccgcttcccccagagactgtatcgtggcaccgtggcgcgtggcgctggagcgggcgttgtggtcaaggatgcagctgccccttctcagcctctgaggatccaggctcaggacccggagttctcggacctcaactcggccatcacatatcgaattaccaaccactcacacttccggatggagggagaggttgtgctgaccaccaccacactggcacaggcgggagccttctacgcagaggttgaggcccacaacacggtgacctctggcaccgcaaccacagtcattgagatacaagtttccgaacaggagcccccctccacaggtggcggcccctcggaggacaagcgcttctcggtggtggatatggcggccctgggcggggtgctgggtgcgctgctgctgctggctctccttggcctcgccgtccttgtccacaagcactatggcccccggctcaagtgctgctgtggcaaagctccggagccccagccccaaggctttgacaaccaggcgttcctccctgaccacaaggccaactgggcgcccgtccccagccccacgcacgaccccaagcccgcggaggcaccgatgcccgcagagcccgcaccccccggccctgcctccccaggcggtgcccctgagccccccgcagcggcccgagctggcggaagccccacggcggtgaggtccatcctgaccaaggagcggcggccggagggcgggtacaaggctgtctggtttggcgaggacatcgggacggaggcagacgtggtcgttctcaacgcgcccaccctggacgtggatggcgccagtgactccggcagcggcgatgagggcgagggcgcggggaggggtgggggtccctacgatgcgcccggtggtgatgactcctacatctaagtggcccctccaccctctcccccagccgcacgggcactggaggtctcgctcccccagcctccgacccgaggcagaataaagcaaggctcccgaaa

SEQ ID NO: 221380 - DNA, 1956 bp, Artificial Sequence
  derived and/or modified sequence
atgggcagctgggccctgctgtggccccccctgctgttcaccggcctgctggtgagaccccccggcaccatggcccaggcccagtactgcagcgtgaacaaggacatcttcgaggtggaggagaacaccaacgtgaccgagcccctggtggacatccacgtgcccgagggccaggaggtgaccctgggcgccctgagcacccccttcgccttcagaatccagggcaaccagctgttcctgaacgtgacccccgactacgaggagaagagcctgctggaggcccagctgctgtgccagagcggcggcaccctggtgacccagctgagagtgttcgtgagcgtgctggacgtgaacgacaacgcccccgagttccccttcaagaccaaggagatcagagtggaggaggacaccaaggtgaacagcaccgtgatccccgagacccagctgcaggccgaggacagagacaaggacgacatcctgttctacaccctgcaggagatgaccgccggcgccagcgactacttcagcctggtgagcgtgaacagacccgccctgagactggacagacccctggacttctacgagagacccaacatgaccttctggctgctggtgagagacacccccggcgagaacgtggagcccagccacaccgccaccgccaccctggtgctgaacgtggtgcccgccgacctgagacccccctggttcctgccctgcaccttcagcgacggctacgtgtgcatccaggcccagtaccacggcgccgtgcccaccggccacatcctgcccagccccctggtgctgagacccggccccatctacgccgaggacggcgacagaggcatcaaccagcccatcatctacagcatcttcagaggcaacgtgaacggcaccttcatcatccaccccgacagcggcaacctgaccgtggccagaagcgtgcccagccccatgaccttcctgctgctggtgaagggccagcaggccgacctggccagatacagcgtgacccaggtgaccgtggaggccgtggccgccgccggcagcccccccagattcccccagagactgtacagaggcaccgtggccagaggcgccggcgccggcgtggtggtgaaggacgccgccgcccccagccagcccctgagaatccaggcccaggaccccgagttcagcgacctgaacagcgccatcacctacagaatcaccaaccacagccacttcagaatggagggcgaggtggtgctgaccaccaccaccctggcccaggccggcgccttctacgccgaggtggaggcccacaacaccgtgaccagcggcaccgccaccaccgtgatcgagatccaggtgagcgagcaggagccccccagcaccggcggcggccccagcgaggacaagagattcagcgtggtggacatggccgccctgggcggcgtgctgggcgccctgctgctgctggccctgctgggcctggccgtgctggtgcacaagcactacggccccagactgaagtgctgctgcggcaaggcccccgagccccagccccagggcttcgacaaccaggccttcctgcccgaccacaaggccaactgggcccccgtgcccagccccacccacgaccccaagcccgccgaggcccccatgcccgccgagcccgccccccccggccccgccagccccggcggcgcccccgagccccccgccgccgccagagccggcggcagccccaccgccgtgagaagcatcctgaccaaggagagaagacccgagggcggctacaaggccgtgtggttcggcgaggacatcggcaccgaggccgacgtggtggtgctgaacgcccccaccctggacgtggacggcgccagcgacagcggcagcggcgacgagggcgagggcgccggcagaggcggcggcccctacgacgcccccggcggcgacgacagctacatctag

SEQ ID NO: 221381 - protein, 332 aa, Artificial Sequence
  derived and/or modified sequence
MSEAGEEQPMETTGATENGHEAVPEGESPAGAGTGAAAGAGGATAAPPSGNQNGAEGDQINASKNEEDAGKMFVGGLSWDTSKKDLKDYFTKFGEVVDCTIKMDPNTGRSRGFGFILFKDAASVEKVLDQKEHRLDGRVIDPKKAMAMKKDPVKKIFVGGLNPEATEEKIREYFGEFGEIEAIELPMDPKLNKRRGFVFITFKEEEPVKKVLEKKFHTVSGSKCEIKVAQPKEVYQQQQYGSGGRGNRNRGNRGSGGGGGGGGQSQSWNQGYGNYWNQGYGYQQGYGPGYGGYDYSPYGYYGYGPGYDYSQGSTNYGKSQRRGGHQNNYKPY

SEQ ID NO: 221382 - protein, 1452 aa, Artificial Sequence
  derived and/or modified sequence
MPSSSDTALGGGGGLSWAEKKLEERRKRRRFLSPQQPPLLLPLLQPQLLQPPPPPPPLLFLAAPGTAAAAAAAAAASSSCFSPGPPLEVKRLARGKRRAGGRQKRRRGPRAGQEAEKRRVFSLPQPQQDGGGGASSGGGVTPLVEYEDVSSQSEQGLLLGGASAATAATAAGGTGGSGGSPASSSGTQRRGEGSERRPRRDRRSSSGRSKERHREHRRRDGQRGGSEASKSRSRHSHSGEERAEVAKSGSSSSSGGRRKSASATSSSSSSRKDRDSKAHRSRTKSSKEPPSAYKEPPKAYREDKTEPKAYRRRRSLSPLGGRDDSPVSHRASQSLRSRKSPSPAGGGSSPYSRRLPRSPSPYSRRRSPSYSRHSSYERGGDVSPSPYSSSSWRRSRSPYSPVLRRSGKSRSRSPYSSRHSRSRSRHRLSRSRSRHSSISPSTLTLKSSLAAELNKNKKARAAEAARAAEAAKAAEATKAAEAAAKAAKASNTSTPTKGNTETSASASQTNHVKDVKKIKIEHAPSPSSGGTLKNDKAKTKPPLQVTKVENNLIVDKATKKAVIVGKESKSAATKEESVSLKEKTKPLTPSIGAKEKEQHVALVTSTLPPLPLPPMLPEDKEADSLRGNISVKAVKKEVEKKLRCLLADLPLPPELPGGDDLSKSPEEKKTATQLHSKRRPKICGPRYGETKEKDIDWGKRCVDKFDIIGIIGEGTYGQVYKARDKDTGEMVALKKVRLDNEKEGFPITAIREIKILRQLTHQSIINMKEIVTDKEDALDFKKDKGAFYLVFEYMDHDLMGLLESGLVHFNENHIKSFMRQLMEGLDYCHKKNFLHRDIKCSNILLNNRGQIKLADFGLARLYSSEESRPYTNKVITLWYRPPELLLGEERYTPAIDVWSCGCILGELFTKKPIFQANQELAQLELISRICGSPCPAVWPDVIKLPYFNTMKPKKQYRRKLREEFVFIPAAALDLFDYMLALDPSKRCTAEQALQCEFLRDVEPSKMPPPDLPLWQDCHELWSKKRRRQKQMGMTDDVSTIKAPRKDLSLGLDDSRTNTPQGVLPSSQLKSQGSSNVAPGEKQTDPSTPQQESSKPLGGIQPSSQTIQPKVETDAAQAAVQSAFAVLLTQLIKAQQSKQKDVLLEERENGSGHEASLQLRPPPEPSTPVSGQDDLIQHQDMRILELTPEPDRPRILPPDQRPPEPPEPPPVTEEDLDYRTENQHVPTTSSSLTDPHAGVKAALLQLLAQHQPQDDPKREGGIDYQAGDTYVSTSDYKDNFGSSSFSSAPYVSNDGLGSSSAPPLERRSFIGNSDIQSLDNYSTASSHSGGPPQPSAFSESFPSSVAGYGDIYLNAGPMLFSGDKDHRFEYSHGPIAVLANSSDPSTGPESTHPLPAKMHNYNYGGNLQENPSGPSLMHGQTWTSPAQGPGYSQGYRGHISTSTGRGRGRGLPY

SEQ ID NO: 221383 - DNA, 4359 bp, Artificial Sequence
  derived and/or modified sequence
atgccctcctcttccgacacggcactgggaggcgggggaggactcagctgggcagaaaagaagctcgaggagaggagaaagcgacggcgattcctgagtcctcaacagccccctctgctcctccccctgttgcagccccagttgctgcagcccccgcctcccccacctcctttgcttttcctggccgcccctggaacggctgcagccgccgctgccgctgccgccgcctccagctcctgctttagcccggggcctccacttgaggttaaacgcttggcgagggggaagcgccgcgccgggggaaggcaaaagcgaagacgaggacctcgggctggacaagaggccgaaaaacggcgtgtgttcagcctgccacaaccgcagcaggatggtggcggcggcgcttcctccggggggggcgtcacccccttggtggagtacgaggacgtctccagtcagagcgagcaggggttgttattgggtggtgctagcgccgctacagccgccacggcagcaggagggacaggaggatctggcggctcccccgcttcctcttcgggtacgcaacgcaggggggaggggtccgaacgccggccacggagagacaggagatctagtagcggccgctccaaggagcgccatagggagcatagacggagagacgggcagcgcggcggaagtgaagcttccaaatcccgctctcggcatagtcattccggagaagagagggctgaggtagctaagagcggttcttccagcagcagcggcggccggcgaaaatcggcgtccgccaccagtagctctagctcctcccgaaaggatcgggactcgaaggcccataggtctaggactaaatctagtaaagagcctccctctgcttataaagagccgccgaaggcttatcgagaggacaagactgaacccaaggcctatcgcaggcggcgctccctttcacctcttggcggccgggacgacagccctgtgtcccacagggcaagccagagtctgcgatcccggaagtcccctagcccagccgggggcgggtcttccccttattcgagacgccttccaagatctccttccccgtactcaaggcggcgttcaccatcctatagccggcactcaagctatgaacgggggggagacgtgtctcctagcccctacagttctagttcatggagaaggtcaagatcaccttattctccagtattgcgtagaagcggaaagtctaggtccagatcgccatattcatcccgacacagtagaagcaggtcgcgtcaccgtttgtctcgaagtagaagccggcatagcagtatttcaccaagtacgttgacactgaagagctccctcgctgccgagctgaacaaaaacaagaaggcgcgagcagctgaggccgctcgtgctgctgaagccgccaaggccgcggaagcaactaaggccgccgaggccgctgctaaggccgccaaggcctctaatacatctacccccaccaagggaaacacagaaacatccgcttccgctagccagacaaaccatgtgaaagacgtaaaaaagattaagatagagcacgcgccatccccctcgagtggtgggactctgaagaatgacaaagctaagaccaagcctcccttgcaagttaccaaggtggagaacaatcttattgtggataaggccactaagaaagcagtgatagttggaaaggagtccaagtccgctgccaccaaagaagaatctgtgtctctgaaggaaaagaccaaacctttaacaccttccattggcgcaaaagagaaggagcagcacgtggccctggtcacgtccacgttgccccctctgcctctgccgcccatgctaccagaagataaggaggctgatagcttgcgaggtaatatctctgtaaaagccgtgaagaaggaggtcgaaaaaaagctgaggtgcctgctggcggaccttccattgccgccagagctgcccggcggcgacgacctcagcaagtctcctgaggaaaaaaaaacagcgacccagctgcattctaaacgaaggccaaagatatgtgggccccgttatggcgagacaaaggagaaagacatcgattggggtaaacgctgcgtggataagttcgatatcataggcatcatcggcgagggcacctatgggcaggtgtataaggccagggacaaggatactggagagatggttgcgttaaagaaggtgagattagataacgagaaggaagggttccccataacagccatccgggagattaaaattctgagacagctgacacaccagtcaataatcaacatgaaggagatcgttacggacaaggaggatgctttggattttaagaaagataagggcgccttttacttggtctttgaatacatggatcatgatctcatgggcttgttggagtccggtttagttcacttcaatgagaatcatattaaatcttttatgagacagcttatggaaggactggactactgccacaagaaaaactttttgcaccgagatatcaaatgttccaatattctcttgaacaacagaggccagattaagctggccgatttcgggttagccagattatacagttcagaggagtctagaccatacactaacaaagtcatcactctgtggtatcgaccccctgagctccttcttggcgaggagcggtatacaccggccatcgatgtgtggagctgtggatgtatccttggagagctttttacaaaaaagccaattttccaggcgaatcaggaactcgcccagctggagctaatatcacgcatctgcggatctccatgccccgctgtgtggcccgatgtgataaaactcccctattttaatacaatgaaacccaagaaacaatatcgccggaaacttagggaagagttcgtgtttattcccgcagctgcattggacctgttcgactacatgctcgctttggacccgtccaaacgttgcactgctgagcaggcactgcagtgcgagttcttgcgcgatgtggaaccatcaaagatgccacctcctgatttgcccttatggcaggactgccacgagctctggagcaagaagagacggcgccagaaacaaatgggaatgaccgatgacgtgtcaacaatcaaggcccctaggaaagatctgagcttggggctggacgacagtagaacaaacactcctcagggagtgcttccctcttctcagcttaagtcgcagggctcgtcgaacgtagccccgggagaaaagcagactgaccccagtactccacaacaagaatcctccaaacctcttggcgggatacagccatccagccaaactattcaaccaaaagtcgagacagatgctgcccaggctgccgtgcagtcggctttcgccgtgctgctgacgcagcttattaaagctcaacagagcaagcagaaggatgtactcctggaggaaagagaaaatggtagcgggcacgaggctagtctccaactgaggccaccacccgagccttcaactccagttagtggacaggacgatcttatccagcaccaggacatgaggattttggagcttacacctgagccagaccgacctaggatcctgcctcccgaccagcgtcctccggaaccaccggagccccctcccgtcactgaggaggacttagactacagaacggagaatcaacacgtgccgacgaccagcagcagcctgaccgatccgcacgcaggcgtgaaggccgcactcttgcagttgctagctcagcaccagccccaggatgacccgaaaagagagggcggaatcgactaccaggctggagacacatacgtttctacctcagactataaggataacttcgggagtagttccttcagttccgctccgtacgtgtctaacgatggcttaggtagttccagcgccccacctcttgagagaagatcttttattggcaattctgacatccagagcttggacaattactctacggctagctcacacagcggcggaccgccacagcctagcgccttttcagaaagttttcctagtagtgtggcaggttacggcgacatctatctcaacgctgggcctatgttatttagcggggacaaagaccataggttcgaatattcccatgggcctatcgcggtgctagctaacagctccgacccctcgacaggccccgagagcacccacccccttccggctaaaatgcataactataactatggtggtaatcttcaggagaatccatccgggccaagtttgatgcacggtcagacctggacatcgcccgcccaaggcccaggatattcacagggctatcggggccacatctctacgtccacaggccggggtcgggggagaggcctgccctactag

SEQ ID NO: 221384 - DNA, 4359 bp, Artificial Sequence
  derived and/or modified sequence
atgcccagcagcagtgacacagccctgggcggcggcggcggcctgtcctgggccgagaagaagctggaggagaggaggaagagaagacgcttcctgagcccccagcagccccccctgctgctgcccctgctgcagccccagctgctgcagcccccacctcctcctccacccctgctcttcctggccgcccctggaacagctgctgctgctgctgctgctgctgctgccagcagcagctgcttcagccctggcccccccctggaggtgaagaggctggcccggggcaagagaagagctgggggccggcagaagagaagaagaggccccagggctggccaggaggccgagaagagaagagtcttcagcctgccccagccccagcaggacggcggcggcggggccagcagcggcggcggcgtgacccccctggtggagtatgaagatgtgagcagccagagcgagcagggcctgctgctgggcggggccagcgctgccacagctgccacagctgctgggggcaccggcggcagcggcggcagccctgccagcagcagcggcacccagaggagaggagagggcagcgagcggcggccccggcgggaccggcgcagcagcagcggccgcagcaaggagcggcaccgggagcacagaagaagagatggccagaggggcggcagcgaggccagcaagagccgcagccgccacagccacagcggggaggagagagctgaggtggccaagagcggcagcagcagcagcagcggcggccgcaggaagagcgccagcgccaccagcagcagcagcagcagcaggaaggaccgggacagcaaggcccacaggagcaggaccaagagcagcaaggagcccccatctgcctacaaggagccccccaaggcctaccgggaggacaagacagagcccaaggcctacagaagaagaagaagcctgagccccctgggcggcagagatgacagccctgtgagccaccgggccagccagagcctgcggagcaggaagagccccagccctgctgggggcggcagcagcccctacagccggcggctgcccaggagccccagcccctacagcagaagaagaagccccagctacagccgccacagcagctatgaaagaggaggagatgtgagccccagcccctacagcagcagctcctggaggaggagccgcagcccctacagccctgtgctgcggcgcagcggcaagagccgcagccgcagcccctacagcagccgccacagccgcagccgcagccgccaccggctgagccgcagccgcagccgccacagcagcatcagccccagcaccctgaccctgaagagcagcctggccgctgagctgaacaagaacaagaaggcccgggctgctgaggccgcccgggctgctgaggccgccaaggctgctgaggccaccaaggctgctgaggccgccgccaaggccgccaaggccagcaacaccagcacccccaccaagggcaacacagagaccagcgccagcgccagccagaccaaccacgtgaaggatgtgaagaagatcaagattgagcacgcccccagccccagcagcggcggcaccctgaagaatgacaaggccaagaccaagccacccctgcaggtgaccaaggtggagaacaacctgattgtggacaaggccaccaagaaggctgtgattgtgggcaaggagagcaagtctgctgccaccaaggaggagagcgtgtccctgaaggagaagaccaagcccctgacccccagcattggagccaaggagaaggagcagcacgtggccctggtgaccagcaccctgccccccctgcccctgccccccatgctgcctgaggacaaggaggccgacagcctgcggggcaacatctctgtgaaggctgtgaagaaggaggtggagaagaagctgcgctgcctgctggccgacctgcccctgcccccagagctgcctggaggagatgacctgagcaagagccctgaggagaagaagacagccacccagctgcacagcaagaggcggcccaagatctgtggccccaggtatggagagaccaaggagaaggacatcgactggggcaagagatgtgtggacaagtttgacatcatcggcatcattggagagggcacctacggccaggtgtacaaggcccgggacaaggacacaggagagatggtggccctgaagaaggtgcggctggacaatgagaaggagggcttccccatcacagccatccgggagatcaagatcctgcggcagctgacccaccagagcatcatcaacatgaaggagatcgtgacagacaaggaggatgccctggacttcaagaaggacaagggggccttctacctggtgtttgagtacatggaccatgacctgatgggcctgctggagagcggcctggtgcacttcaatgaaaaccacatcaagagcttcatgaggcagctgatggagggcctggactactgccacaagaagaacttcctgcaccgggacatcaagtgcagcaacatcctgctgaacaacagaggccagatcaagctggccgactttggcctggcccggctgtacagcagcgaggagagccggccctacaccaacaaggtgatcaccctgtggtacagacctcctgagctgctgctgggggaggagcgctacaccccagccattgatgtgtggagctgtggctgcatcctgggggagctgttcaccaagaagcccatcttccaggccaaccaggagctggcccagctggagctgatcagccgcatctgtggcagcccctgcccagctgtgtggccagatgtgatcaagctgccctacttcaacaccatgaagcccaagaagcagtacagaaggaagctgcgggaggagtttgtgttcatcccagctgctgccctggacctgtttgactacatgctggccctggaccccagcaagcgctgcacagctgagcaggccctgcagtgtgagttcctgagagatgtggagcccagcaagatgcctcctccagacctgcccctgtggcaggactgccacgagctgtggagcaagaagagaagacggcagaagcagatgggcatgacagatgatgtgtccaccatcaaggcccccaggaaggacctgagcctgggcctggatgacagcaggaccaacaccccccagggcgtgctgcccagcagccagctgaagagccagggcagcagcaatgtggcccctggagagaagcagacagaccccagcaccccccagcaggagagcagcaagcccctgggcggcatccagcccagcagccagaccatccagcccaaggtggagacagatgctgcccaggccgctgtgcagagcgcctttgctgtgctgctgacccagctgatcaaggcccagcagagcaagcagaaggatgtgctgctggaggagagagaaaatggcagcggccacgaggccagcctgcagctgcggcccccacctgagcccagcacccctgtgtctggccaggatgacctgatccagcaccaggacatgaggatcctggagctgaccccagagccagaccggccccgcatcctgcccccagaccagaggcctcctgagcccccagagcccccacctgtgacagaggaggacctggactacagaacagagaaccagcacgtgcccaccaccagcagcagcctgacagacccccacgccggcgtgaaggccgccctgctgcagctgctggcccagcaccagccccaggatgaccccaagcgggagggcggcatcgactaccaggccggggacacctacgtgtccaccagtgactacaaggacaactttggcagcagcagcttcagcagcgccccctacgtgtccaatgatggcctgggcagcagcagcgccccacccctggagaggaggagcttcatcggcaacagcgacatccagagcctggacaactacagcacagccagcagccacagcggcggccccccccagcccagcgccttcagcgagagcttccccagctctgtggccggctatggagacatctacctgaatgccggccccatgctgttcagcggggacaaggaccacagatttgagtacagccacggccccatcgctgtgctggccaacagcagtgaccccagcactggacctgagagcacccaccccctgcctgccaagatgcacaactacaactacggcggcaacctgcaggagaaccccagcggccccagcctgatgcacggccagacctggaccagccctgcccagggccctggctacagccagggctaccggggccacatcagcaccagcacaggccggggccggggccggggcctgccctactag

SEQ ID NO: 221385 - DNA, 4359 bp, Artificial Sequence
  derived and/or modified sequence
atgcccagcagcagcgacaccgccctgggcggcggcggcggcctgagttgggccgaaaagaagctggaggaacggcgcaaacgccgacgctttctgtcaccacagcaaccaccactactcctgccgctcctccagccccagctgctgcagccgccgccgccacccccccctctgttgttcctcgccgcgccgggaacagcggcagcagctgcagccgctgccgccgcctccagtagctgttttagtcctggccccccccttgaagtcaagagactggcccgaggcaaacggagggcaggaggtcgtcagaagagacgcaggggaccaagagccggtcaggaggccgagaaaaggagggtcttctcccttccccaaccgcagcaagatgggggggggggggcaagtagcgggggcggcgtcactcccctggtggagtatgaagatgtttcttctcaatcagaacagggcttgctgctcggaggcgccagcgccgccaccgccgccacggcagcaggtgggactggcggctccgggggaagccctgcctcttcctctggaacacagaggagaggtgaaggttctgaaaggcgtcctagaagagaccggagatcatctagtggccgcagcaaggagcggcatcgcgaacataggagacgcgacggccagaggggcggcagcgaggcctctaaatctaggtcaagacactcccattccggagaggagagggcggaggtagcgaagagcggctcttcctcctcatctggaggcagaagaaagtcggcatcagcaacctcatcctcgtcttcttcgaggaaagatagagattccaaagctcatagaagccgcactaaatcctcaaaagaacctccttctgcctacaaagagcctcccaaagcttatcgggaagataagaccgagccaaaggcatacaggcgtcgaaggtcactatcgccactcggaggcagagacgattctcctgtgagtcatagagctagccagagtctccgctcccgcaagagtcctagcccggccggtgggggctcttctccttacagtcgtcggctccctcgaagcccttcaccatactcacgccgtagaagtccttcatatagccgccactctagttatgagcgaggcggtgatgtaagcccgtccccttactcctcctctagctggaggagaagtagaagcccctacagccctgtcttaagaagaagtggaaagtcaagatcaagatcgccatacagctcacggcattcccgctctaggagtcgacatagactttctagaagtcggtctcgccactccagtatttcacccagtactctgaccctcaagtccagcctggccgccgagttgaacaagaataagaaggcacgagccgccgaggccgcgcgggccgcggaagctgcaaaagcagcggaggctaccaaggctgccgaggcagcagccaaagctgctaaggcaagtaatactagcacacctaccaaggggaacaccgaaactagtgcctcagcaagtcagacaaatcacgtcaaagacgtgaagaaaatcaaaatagagcacgcccctagcccaagtagcggaggaaccctgaagaacgacaaagccaagacaaaaccacctctccaggtcactaaggtggagaacaatttgatcgtggataaggccactaagaaagcagtgatagtagggaaggaatccaagtctgccgcgactaaagaagaaagcgttagtctgaaggaaaaaaccaagcctcttactcctagcatcggcgctaaagaaaaggaacaacacgtcgcattggtcacctccactctccctccactccctctacctcccatgttacccgaagacaaagaggcggattcactgaggggaaacatcagcgttaaggctgtcaaaaaagaggttgaaaaaaagctccgatgtctgctagctgatttacccctgcccccagagctacccgggggcgatgatctcagcaagagtccagaagaaaagaaaacagccactcaactccatagcaaacgcagacccaagatctgtgggccacgctacggtgaaactaaggagaaagacatcgattggggaaaaaggtgtgtggataaattcgacattatcggtattattggggaagggacttacggtcaagtgtataaggcccgcgataaagataccggcgagatggtagctttaaaaaaggtgagactcgacaatgagaaggaagggttcccaatcaccgcgattcgtgagatcaaaatcctcaggcagctgacgcaccaatctattataaacatgaaggagatcgtgacagataaagaggacgcgctggactttaagaaggacaagggcgctttttatctggttttcgaatatatggatcatgacctgatgggacttctcgagtcagggttggtgcacttcaacgaaaaccacatcaagtcttttatgcggcagttgatggaaggattagactactgccacaagaaaaatttcctccatcgggatattaagtgcagcaatattcttctgaacaatagaggccagataaagcttgcagattttgggttagcgagactctactcttcggaggagagcagaccgtacaccaacaaggtaataacattgtggtaccggccaccagaactgctgcttggcgaagagagatacacaccagccattgacgtgtggtcctgcggctgtattttaggtgagttattcacaaaaaagcctatcttccaggccaaccaggaactggcacagctggaattaatttccaggatttgtggtagcccatgtcctgctgtatggccagatgtgattaagctaccgtattttaataccatgaagcctaaaaagcagtatcggagaaaactccgggaagagtttgtgttcatccccgcagcagccctagatctctttgactacatgttagcactggacccttcaaagaggtgtacggcggaacaggctctgcagtgcgaattcctgagggacgtggaaccttcaaaaatgccccccccggacctgcccctgtggcaggactgtcatgagctctggtcgaagaagcgccgcagacagaaacagatgggaatgactgacgacgtctctacaattaaggcaccccgcaaggacctctccctaggcctcgatgactctaggactaacaccccacagggtgtgcttccctcatctcaactcaaaagtcaggggtccagcaacgtcgcccccggagaaaaacagaccgatccctcgacccctcagcaggaaagctcaaagcctctaggcggaatccagccatcatcccaaactattcagcctaaggtagaaactgacgccgctcaggccgctgtccagtcagcctttgctgtgctattaacacagctcatcaaggcgcaacaaagtaagcaaaaagatgtgctgctggaggagagggaaaatggcagcggccacgaggcatcccttcagctccggcctcctcccgagccctcgacaccagtcagcggtcaagacgatctaattcagcaccaagatatgcgaattcttgagctgacccctgagcccgaccgcccacggatcctgcccccagatcaacggcctcctgaacctcccgagccaccacccgttactgaggaggacttggattaccgtacagagaaccagcatgtccccaccacctcctcaagcttaacagacccccatgcaggagtgaaggcagccctcctccagctgctagcacaacaccagcctcaagacgaccccaagagggaaggagggattgattatcaggctggagacacctacgtttcgacctccgactacaaggacaattttggcagcagttctttctcttccgcaccctacgtgtcaaacgacgggctgggttccagcagcgcccccccgttagaacggcggtccttcattgggaactccgacatccagtctctggataactatagcaccgcctcctcacacagtggcggcccaccccagccctccgcattctctgaaagcttcccgtcgagcgtagcaggctacggcgatatatacttgaacgccggccctatgctgttctcgggcgataaggaccatagatttgaatattctcacgggcctatcgccgttctagcaaactcttccgatcctagtaccggccccgagagtacgcaccctttgccagccaagatgcacaattacaattacggcgggaacctgcaggagaacccatcaggcccttccctgatgcatggtcagacttggacttcacctgcccagggtcctggttacagtcagggatatcgaggccacatctccactagtaccgggcggggacgggggagagggctcccatactag

SEQ ID NO: 221386 - DNA, 4359 bp, Artificial Sequence
  derived and/or modified sequence
atgcccagttctagcgacactgcactgggaggcggtggcggattgtcctgggcagagaaaaaacttgaggaaaggcgcaaacgacgacgctttctttccccacagcagccgccactgctgcttcccctcttacagcctcagcttctacagcctccccctcctcctccccctttgctttttctggcagctccgggtactgctgccgctgcggcagcggcagccgctgcaagcagctcgtgtttctccccaggtcctcctcttgaggttaagaggttggccagggggaagcgaagagccggaggcaggcaaaagaggaggagaggtcctcgggctgggcaggaggccgagaagagacgcgttttttccttaccccagccccagcaagatggtggtggcggtgccagctccggcggaggcgttacccctcttgtcgaatatgaggacgtaagttcccaatcggagcaggggttacttctgggtggagcctcagctgctacagccgcaacagcggctggcggtaccgggggatctggcggatcacccgcttccagcagtggcacccagaggcggggagagggttccgagagaagacccagaagagaccgaaggtcttcctccggacggagtaaggagcgccaccgggaacatcgcagacgggacggccagcgcggtgggtcagaggcctctaaaagtaggtctagacactcccactccggcgaagaaagggccgaggtcgccaagtccgggagctccagcagcagtggaggtcgcagaaagagcgccagcgcaacttcctcaagtagtagttcacgaaaagaccgggactctaaggcccaccggtcccggacgaaaagttctaaggagcctccctccgcatacaaggaaccacctaaggcctatcgcgaagataaaacagagccgaaggcgtatagaaggcgcaggtcactgtcaccactggggggaagagacgactcacccgtgtcccatcgcgcaagccagtcactcagaagccggaagtcccctagcccagcagggggtggctccagcccatactcacggaggctccccagatccccctccccctattctagacgccgttccccatcatatagtcgccactcgtcctacgaacggggaggagacgtgtccccatctccttacagttcaagcagctggcgcaggtcacgcagcccttattcaccagtactgagaagatcaggcaagagccgtagccgctcaccctattcttcccgacatagtcggtcacgatcacgtcatcgtctcagccgtagtagaagtcgacacagttctatttcaccttccacattgaccctcaagagttcactcgcggctgagcttaataagaacaaaaaagctcgggcagcagaggcagctagggcggcagaagcagcgaaagccgcagaagcaacaaaggcagcagaggccgcagctaaagccgctaaagccagcaatacatctacgcccactaaaggaaacactgagactagcgccagcgcttctcagacgaaccatgtgaaggatgtcaagaaaatcaagatagaacatgcaccctcaccttcatccggagggacactaaaaaatgataaagccaagacaaagcccccactacaagtcaccaaagtggaaaacaacctgattgtggacaaggctacaaagaaagccgtgatcgttgggaaggaaagcaaatccgccgcaaccaaagaagaatcagtcagccttaaagagaagaccaagcctctgacgccaagcattggcgctaaggagaaggagcagcacgtggcactggtgactagcacacttcctccattgcccttgcctccgatgctacctgaggataaggaggcagatagcttgcgcggtaatatctcagttaaggccgtgaaaaaagaggttgaaaagaaactcagatgcctgctcgcagaccttcccctgcccccagagctcccaggaggcgacgatctatccaagagccctgaagagaaaaagacagctacccagcttcattccaagagacgaccaaagatctgtggacccagatatggcgagacaaaggagaaggacatagactggggcaaaaggtgtgtggataagttcgacattattggtatcattggcgaagggacctacgggcaggtgtacaaggccagagacaaagatactggggagatggttgccttgaaaaaagtccgccttgataatgaaaaagagggcttccctattactgcgatccgggaaattaaaatcctgcgccagttgacacaccagtctataatcaacatgaaggagatcgttactgacaaggaggatgccctggatttcaaaaaggataagggcgcattctacctggtcttcgagtacatggatcatgaccttatgggcctcttagaatcaggtctggttcacttcaatgagaatcatatcaagagctttatgcggcaactgatggaggggttggattattgtcataaaaagaattttctgcatagagatataaaatgttctaacatcctacttaataacaggggccaaatcaaactagctgactttggattggctagactgtactctagcgaggaatcccgcccatacacaaataaggtgatcacactttggtacagaccacccgagcttctcttaggtgaagagcgttatacaccggcaattgatgtatggagctgtggttgtatcctgggcgagctgttcacaaaaaaacccatcttccaggccaatcaggagctggcacaactcgaactgatatcgcggatctgcggatctccctgtccagcagtctggcccgatgtgatcaagctgccgtactttaacactatgaaacccaaaaagcagtataggaggaagctccgggaggaatttgtgtttatccctgccgctgccctcgatcttttcgactatatgctagccttagatccctcaaagaggtgcaccgccgagcaggccctgcagtgcgagtttctgcgtgacgtggagccaagcaagatgcctccacctgatctgccactctggcaggactgtcacgagctttggtcaaagaaacgaaggcggcagaagcagatgggaatgaccgacgatgtgtccacgatcaaagcccctcgaaaggacctgtccctcgggctggatgattctcgaaccaacaccccacagggggtactcccaagctcccagctgaaatcacaagggtccagcaacgtagcccctggagagaaacaaaccgatccatctaccccccagcaggagagttcaaagccccttggaggtatccagccatcttcacagactatacagcccaaggtggagacagacgccgctcaagcggctgtccaatccgcattcgctgtgctgctgactcagctaatcaaagcccaacagagcaaacagaaggacgtgttgctggaagaacgtgagaacgggtcgggtcacgaggcttctctgcagttgcgcccaccacccgaaccctcgaccccagtctctgggcaagatgacctgattcagcaccaggatatgagaatcctggagctcactcccgagccggataggcccaggatcctccctccagatcagcgcccaccagaaccacctgagcctcccccagttactgaggaggacctcgattatcgcaccgaaaaccagcacgtaccaacaacctcaagcagcctgacagacccccatgccggagtgaaggctgcacttttgcagctcctggctcagcaccaacctcaggacgaccccaaacgtgaaggtggcattgattatcaggctggtgacacctacgtgagtacttccgattataaagacaattttggatcgtcgagcttttcttccgcgccttatgtcagcaatgatggcctgggatcctctagcgccccacctcttgagaggaggagctttatcggtaacagtgatattcagtctctggataattattccaccgcttccagtcactcgggaggtccccctcagcccagcgcctttagtgaaagctttccctcatcagtagccggatatggcgatatttacctcaatgccggtcctatgctcttctctggggacaaggaccaccgatttgaatactcccatgggccaatagccgtattagccaacagttcagaccctagcaccggcccagagtcaactcaccccctgccagccaagatgcacaactataactacgggggtaacctacaggagaacccgtctggcccaagtctgatgcacggacagacatggacttcaccagcacagggcccagggtacagccagggctacagaggacatatctctactagcacgggcagagggcgaggccgtggtctcccatactag

SEQ ID NO: 221387 - DNA, 5066 bp, Artificial Sequence
  derived and/or modified sequence
ggcgcttttcccggccggctctggtgctcggtgtccctccgccgccgctcccgtttccggcgggggagatggccaggatctgacccgggaggaggccgcacccgcgccgcgctctgcggctggctctaggcgatgccgagcagctcggacacggcgctggggggaggcgggggcctgagctgggcggagaagaagttggaggaacgccgcaagcggaggcgattcctgtcccctcagcagccgccgctgctgttgccgctcctgcagccgcagctcctgcaaccgccgccgcccccgccgcctctgctcttcctggctgctcccggcacggccgccgccgcagccgccgccgccgcggcctcctcctcttgcttcagcccgggcccccctctggaggtcaagcggctggcgagaggcaagaggcgcgcaggagggcggcagaagcggcgtcgcgggccccgcgccgggcaggaggcggagaagcgtcgggtcttctcgctgccccagccgcagcaggacggcggtggcggtgctagtagcggcgggggtgtgaccccgctggtggaatacgaggatgtgagctcccagtccgagcaggggctgctgctggggggggccagcgcggcaacggcggcgacggctgccgggggaacggggggcagcggcgggagtccggcctcctcctccggcacccagcggcgcggggaggggtcggagcgcaggccccgccgggaccgccgcagcagcagtggccgcagcaaggagcgccaccgcgagcaccggcggcgggatgggcagcgcggtggcagcgaggcctccaagtcccgcagccgccacagccacagcggcgaggaacgggccgaggtcgccaagagcggcagcagcagcagcagcggcggccgccggaaaagcgcttcggccacatccagcagcagtagcagccgcaaggaccgggactcgaaggcccaccgcagccggactaagtcgtccaaggagccgccttcggcctacaaggaaccgcccaaggcctaccgggaggacaagaccgagcctaaggcctacaggcggcggcggtccctcagcccactgggaggccgggacgacagcccggtgtcccacagggcctctcagagcctgaggagccgcaagtcccccagcccggcaggaggtggcagcagcccctattctcggcggctgccgcgctccccgagcccctacagtcgccgccgctcccccagctacagccgccacagctcctacgagcggggcggcgacgtgtcccctagtccctacagcagcagcagctggcgccgctctcgcagtccctacagccctgtgctcagacggtctggaaaatcccgaagcagaagcccgtattcatctaggcattcaagatctcgtagcaggcacagattgtctagatccagaagtcgtcattctagtatttctcctagcacactaactctgaagagtagcctggcagctgaattgaacaagaataaaaaagcacgagcagcagaggcagcaagagccgcagaagcagcgaaagctgcagaagcaactaaggctgctgaggctgctgccaaggctgcaaaagcttcaaacacttctacacctaccaaggggaacacggaaactagtgccagtgcatcacaaacaaaccatgtgaaggatgtgaagaaaattaaaattgaacatgcaccttctccctcaagtggtggaactttaaaaaatgacaaagcaaaaacaaagccacctcttcaggtaacgaaggtggaaaataatttgattgtagataaagccaccaagaaagcagtcatagttggaaaggagagtaaatctgctgctacaaaggaggaatcagtatctcttaaagagaaaaccaaaccacttacaccaagcataggagccaaggagaaggagcaacatgtagctttagtcacctctacattaccaccgttacctttgcctcccatgctgcctgaagataaagaagctgatagcttacgaggaaatatttcagtaaaagcagttaaaaaagaagtagaaaagaaactccgatgtcttcttgctgatttaccgctgccccctgagctaccaggaggagatgatctttcaaagagtccagaggaaaagaaaacagcaacacagttacatagtaaaaggaggcctaaaatatgtgggcctcgctatggtgaaaccaaagaaaaagatattgactggggaaaacgctgcgtggataaatttgatatcatcggaattattggagaaggtacttacggacaagtttacaaagccagggataaagacactggagaaatggtagccttaaaaaaagtacgtctggataatgaaaaggaaggctttccaattacagcaattcgagaaattaaaattctccggcagcttacccatcagagtattatcaatatgaaggaaatagtgactgataaagaagatgctttggatttcaagaaggacaaaggtgcattttatctggtgtttgaatatatggaccatgatctgatgggactactggaatcaggcttggttcattttaatgaaaatcacataaagtcatttatgagacagctcatggagggtctggattattgtcataagaagaactttttgcatagagatattaaatgttccaatatccttctaaataatagagggcagataaaacttgcagactttggacttgctcgattgtatagctcagaagaaagtcggccgtatactaacaaggtaattactttatggtaccgtccacctgaactgctactgggagaagaacgatacacaccagccattgatgtatggagctgtggctgtatccttggcgaactcttcactaaaaaacctatatttcaagcaaatcaggaacttgcacaactagaattaataagccgaatatgtgggagtccatgtcctgcagtgtggcctgatgtaatcaaactaccatatttcaacaccatgaaaccaaagaagcaatatcgtcgaaagttaagagaagaatttgtttttattcctgcagctgcgctagacttatttgattacatgcttgccttggatcctagtaagcgctgcactgctgaacaggctcttcagtgcgagttcctccgagatgtggaaccctcaaaaatgcctccaccagatctccctttatggcaagattgtcatgagttatggagtaaaaagcgaagaagacagaagcagatgggcatgactgatgatgtttccacaattaaagcccccaggaaggacttgtctctgggcttggatgacagcagaaccaacacaccccagggtgtgctgccatcttcacagctgaaatctcagggcagctcaaatgtggcacctggtgaaaaacagacagatccatcaacaccacaacaggagtcttcgaaaccgttgggaggaattcagccttcttctcagaccatccagcctaaagtggagactgatgctgcccaggcggctgtgcagagtgcatttgcagttctgttgactcagttaataaaggctcagcagtcaaagcagaaagatgtgctactagaagagagggaaaatggatcgggacatgaagcgtcattacaactcaggccacctccagaacctagcactccggtgtcgggacaagatgacctcatccagcatcaagatatgaggatcttggagctaacgccagaaccagaccggcctcgaattctgcctcctgaccaacgacctcccgagcctcctgaaccaccaccagtcactgaggaagatctagattatcggacagaaaaccagcatgtacccaccaccagttcttcattaactgaccctcatgccggagtgaaggcagccctgttacagctgcttgctcagcatcagccccaggatgaccccaaaagagaaggtgggattgattatcaagcaggagacacttacgtgtccacttcagactacaaggacaactttggatcctcttctttctcttctgctccttatgttagcaatgatggtctaggaagcagttctgctccaccactagaacgacgtagtttcattggaaattcagatattcagtctttggataactacagtactgcttcatctcattctggtggtccacctcagccttctgccttttctgagtcatttcccagttcagtagctggatatggagacatttacctcaatgctggtcccatgttgtttagtggagacaaggaccatagatttgaatatagccatggtcctattgcagtcctggcaaacagcagtgacccttccacggggccagagagtactcatcctttgccagcaaagatgcacaactataactatggtggtaacttacaggaaaatccgagtggccccagcctcatgcatggacagacctggacttctcctgcccaaggacctggatattcacaaggatacaggggacatattagcacatcaactggcagaggcagaggcagagggttaccatactgagtatctgtttttcctcaggcacatcatttttatctggaaagacttttctagctgcaatttaaggcagcaatccaagagacttgaataataataattcaacaacagctttatttttatgtggagaagggtcttgcatacaatagtttaaaaaagacaaaaaaaacctttgcttaaattcatgctgttctaaaaactagatcgattgtacatcttcacaaattctagttaacaattttattttgtattcttgcagttttaagtggatgctaattttaggggcataagccttttatggccctcttgcagatcttctgaactatgcacatttgtgctttttttgtaagtttggaccaacttttatgtaacaaacagcccctccccacctccagttttacaacaatcagaaagggcactgatttatttggtatttttctttttacaaagctacctttagtcaaaggtcactgtcagtctttgcacctgctttcagtgttattgtgaaaggtgtactttgtgctcatttcagaaaataaaacacaacctttctcttgatgcaacagttttataaaaaaaaa

SEQ ID NO: 221388 - DNA, 4359 bp, Artificial Sequence
  derived and/or modified sequence
atgcccagcagcagcgacaccgccctgggcggcggcggcggcctgagctgggccgagaagaagctggaggagagaagaaagagaagaagattcctgagcccccagcagccccccctgctgctgcccctgctgcagccccagctgctgcagcccccccccccccccccccccctgctgttcctggccgcccccggcaccgccgccgccgccgccgccgccgccgccgccagcagcagctgcttcagccccggcccccccctggaggtgaagagactggccagaggcaagagaagagccggcggcagacagaagagaagaagaggccccagagccggccaggaggccgagaagagaagagtgttcagcctgccccagccccagcaggacggcggcggcggcgccagcagcggcggcggcgtgacccccctggtggagtacgaggacgtgagcagccagagcgagcagggcctgctgctgggcggcgccagcgccgccaccgccgccaccgccgccggcggcaccggcggcagcggcggcagccccgccagcagcagcggcacccagagaagaggcgagggcagcgagagaagacccagaagagacagaagaagcagcagcggcagaagcaaggagagacacagagagcacagaagaagagacggccagagaggcggcagcgaggccagcaagagcagaagcagacacagccacagcggcgaggagagagccgaggtggccaagagcggcagcagcagcagcagcggcggcagaagaaagagcgccagcgccaccagcagcagcagcagcagcagaaaggacagagacagcaaggcccacagaagcagaaccaagagcagcaaggagccccccagcgcctacaaggagccccccaaggcctacagagaggacaagaccgagcccaaggcctacagaagaagaagaagcctgagccccctgggcggcagagacgacagccccgtgagccacagagccagccagagcctgagaagcagaaagagccccagccccgccggcggcggcagcagcccctacagcagaagactgcccagaagccccagcccctacagcagaagaagaagccccagctacagcagacacagcagctacgagagaggcggcgacgtgagccccagcccctacagcagcagcagctggagaagaagcagaagcccctacagccccgtgctgagaagaagcggcaagagcagaagcagaagcccctacagcagcagacacagcagaagcagaagcagacacagactgagcagaagcagaagcagacacagcagcatcagccccagcaccctgaccctgaagagcagcctggccgccgagctgaacaagaacaagaaggccagagccgccgaggccgccagagccgccgaggccgccaaggccgccgaggccaccaaggccgccgaggccgccgccaaggccgccaaggccagcaacaccagcacccccaccaagggcaacaccgagaccagcgccagcgccagccagaccaaccacgtgaaggacgtgaagaagatcaagatcgagcacgcccccagccccagcagcggcggcaccctgaagaacgacaaggccaagaccaagccccccctgcaggtgaccaaggtggagaacaacctgatcgtggacaaggccaccaagaaggccgtgatcgtgggcaaggagagcaagagcgccgccaccaaggaggagagcgtgagcctgaaggagaagaccaagcccctgacccccagcatcggcgccaaggagaaggagcagcacgtggccctggtgaccagcaccctgccccccctgcccctgccccccatgctgcccgaggacaaggaggccgacagcctgagaggcaacatcagcgtgaaggccgtgaagaaggaggtggagaagaagctgagatgcctgctggccgacctgcccctgccccccgagctgcccggcggcgacgacctgagcaagagccccgaggagaagaagaccgccacccagctgcacagcaagagaagacccaagatctgcggccccagatacggcgagaccaaggagaaggacatcgactggggcaagagatgcgtggacaagttcgacatcatcggcatcatcggcgagggcacctacggccaggtgtacaaggccagagacaaggacaccggcgagatggtggccctgaagaaggtgagactggacaacgagaaggagggcttccccatcaccgccatcagagagatcaagatcctgagacagctgacccaccagagcatcatcaacatgaaggagatcgtgaccgacaaggaggacgccctggacttcaagaaggacaagggcgccttctacctggtgttcgagtacatggaccacgacctgatgggcctgctggagagcggcctggtgcacttcaacgagaaccacatcaagagcttcatgagacagctgatggagggcctggactactgccacaagaagaacttcctgcacagagacatcaagtgcagcaacatcctgctgaacaacagaggccagatcaagctggccgacttcggcctggccagactgtacagcagcgaggagagcagaccctacaccaacaaggtgatcaccctgtggtacagaccccccgagctgctgctgggcgaggagagatacacccccgccatcgacgtgtggagctgcggctgcatcctgggcgagctgttcaccaagaagcccatcttccaggccaaccaggagctggcccagctggagctgatcagcagaatctgcggcagcccctgccccgccgtgtggcccgacgtgatcaagctgccctacttcaacaccatgaagcccaagaagcagtacagaagaaagctgagagaggagttcgtgttcatccccgccgccgccctggacctgttcgactacatgctggccctggaccccagcaagagatgcaccgccgagcaggccctgcagtgcgagttcctgagagacgtggagcccagcaagatgcccccccccgacctgcccctgtggcaggactgccacgagctgtggagcaagaagagaagaagacagaagcagatgggcatgaccgacgacgtgagcaccatcaaggcccccagaaaggacctgagcctgggcctggacgacagcagaaccaacaccccccagggcgtgctgcccagcagccagctgaagagccagggcagcagcaacgtggcccccggcgagaagcagaccgaccccagcaccccccagcaggagagcagcaagcccctgggcggcatccagcccagcagccagaccatccagcccaaggtggagaccgacgccgcccaggccgccgtgcagagcgccttcgccgtgctgctgacccagctgatcaaggcccagcagagcaagcagaaggacgtgctgctggaggagagagagaacggcagcggccacgaggccagcctgcagctgagacccccccccgagcccagcacccccgtgagcggccaggacgacctgatccagcaccaggacatgagaatcctggagctgacccccgagcccgacagacccagaatcctgccccccgaccagagaccccccgagccccccgagcccccccccgtgaccgaggaggacctggactacagaaccgagaaccagcacgtgcccaccaccagcagcagcctgaccgacccccacgccggcgtgaaggccgccctgctgcagctgctggcccagcaccagccccaggacgaccccaagagagagggcggcatcgactaccaggccggcgacacctacgtgagcaccagcgactacaaggacaacttcggcagcagcagcttcagcagcgccccctacgtgagcaacgacggcctgggcagcagcagcgccccccccctggagagaagaagcttcatcggcaacagcgacatccagagcctggacaactacagcaccgccagcagccacagcggcggccccccccagcccagcgccttcagcgagagcttccccagcagcgtggccggctacggcgacatctacctgaacgccggccccatgctgttcagcggcgacaaggaccacagattcgagtacagccacggccccatcgccgtgctggccaacagcagcgaccccagcaccggccccgagagcacccaccccctgcccgccaagatgcacaactacaactacggcggcaacctgcaggagaaccccagcggccccagcctgatgcacggccagacctggaccagccccgcccagggccccggctacagccagggctacagaggccacatcagcaccagcaccggcagaggcagaggcagaggcctgccctactag

SEQ ID NO: 221389 - protein, 429 aa, Artificial Sequence
  derived and/or modified sequence
MARTTSQLYDAVPIQSSVVLCSCPSPSMVRTQTESSTPPGIPGGSRQGPAMDGTAAEPRPGAGSLQHAQPPPQPRKKRPEDFKFGKILGEGSFSTVVLARELATSREYATRANSFVGTAQYVSPELLTEKSACKSSDLWALGCIIYQLVAGLPPFRAGNEYLIFQKIIKLEYDFPEKFFPKARDLVEKLLVLDATKRLGCEEMEGYGPLKAHPFFESVTWENLHQQTPPKLTAYLPAMSEDDEDCYGNYDNLLSQFGCMQVSSSSSSHSLSASDTGLPQRSGSNIEQYIHDLDSNSFELDLQFSEDEKRLLLEKQAGGNPWHQFVENNLILKMGPVDKRKGLFARRRQLLLTEGPHLYYVDPVNKVLKGEIPWSQELRPEAKNFKTFFVHTPNRTYYLMDPSGNAHKWCRKIQEVWRQRYQSHPDAAVQ

SEQ ID NO: 221390 - DNA, 1290 bp, Artificial Sequence
  derived and/or modified sequence
atggccagaaccacatcccagctgtatgatgccgttcctatccagtcaagcgtggtgttgtgctcctgcccaagtccatcaatggtgagaactcagacagagagtagcacgccccccgggatacccggcggctccagacagggacccgcaatggacggcaccgccgccgagcccaggccgggagccggctctctgcaacacgcacagccccctccccagcctcgtaagaagcgccctgaggacttcaaatttggtaagatcctgggcgagggatccttttctaccgtagtcctcgcgcgtgagcttgccacaagccgcgaatacgcaactagggctaattccttcgtaggtaccgcgcagtacgtgtcacctgaactgctgaccgaaaagtctgcttgtaaaagttccgatctgtgggcattaggctgcataatttatcagctagttgctggcctgccccccttcagggccgggaacgagtatctgattttccaaaaaatcatcaagctagaatacgacttccctgaaaaattttttccgaaggctagagatctggtagagaaactcctggtactagacgctaccaagagattggggtgcgaggagatggagggctatggtcccttgaaggcacaccctttcttcgagagtgttacatgggagaacctgcatcagcaaacaccacccaagttgaccgcctatttgccagccatgagcgaggacgatgaagattgttatggcaattacgataatttattgtctcaattcggatgcatgcaggtgtcttcgtcatcttctagccattcactgagtgctagcgacaccgggctgccccagcggagtggctccaacatcgagcagtatatccacgacttagattctaattcttttgaactggaccttcagtttagcgaagacgaaaagcgcttgctgcttgagaagcaagccgggggcaacccatggcaccagttcgtcgaaaacaacctgatcctgaagatgggccctgtcgacaagcgcaagggcctttttgctagacgccgccagctgctgttgacagagggtcctcatctttactatgtggatcccgtaaataaggtgcttaaaggggagattccttggtcgcaggagctgcggcctgaagccaagaatttcaagacatttttcgtgcatacacccaatagaacctactatctgatggatccaagcgggaacgctcataagtggtgtcgtaagatccaggaagtctggcgccagaggtaccagtcccacccagatgctgccgtgcagtag

SEQ ID NO: 221391 - DNA, 4728 bp, Artificial Sequence
  derived and/or modified sequence
cgcaggatgagggcggccattgctggggctccgcttcggggaggaggacgctgaggaggcgccgagccgcgcagcgctgcgggggaggcgcccgcgccgacgcggggcccatggccaggaccaccagccagctgtatgacgccgtgcccatccagtccagcgtggtgttatgttcctgcccatccccatcaatggtgaggacccagactgagtccagcacgccccctggcattcctggtggcagcaggcagggccccgccatggacggcactgcagccgagcctcggcccggcgccggctccctgcagcatgcccagcctccgccgcagcctcggaagaagcggcctgaggacttcaagtttgggaaaatccttggggaaggctctttttccacggttgtcctggctcgagaactggcaacctccagagaatatgcgaccagggccaactcattcgtgggaacagcgcagtacgtttctccagagctgctcacggagaagtccgcctgtaagagttcagacctttgggctcttggatgcataatataccagcttgtggcaggactcccaccattccgagctggaaacgagtatcttatatttcagaagatcattaagttggaatatgactttccagaaaaattcttccctaaggcaagagacctcgtggagaaacttttggttttagatgccacaaagcggttaggctgtgaggaaatggaaggatacggacctcttaaagcacacccgttcttcgagtccgtcacgtgggagaacctgcaccagcagacgcctccgaagctcaccgcttacctgccggctatgtcggaagacgacgaggactgctatggcaattatgacaatctcctgagccagtttggctgcatgcaggtgtcttcgtcctcctcctcacactccctgtcagcctccgacacgggcctgccccagaggtcaggcagcaacatagagcagtacattcacgatctggactcgaactcctttgaactggacttacagttttccgaagatgagaagaggttgttgttggagaagcaggctggcggaaacccttggcaccagtttgtagaaaataatttaatactaaagatgggcccagtggataagcggaagggtttatttgcaagacgacgacagctgttgctcacagaaggaccacatttatattatgtggatcctgtcaacaaagttctgaaaggtgaaattccttggtcacaagaacttcgaccagaggccaagaattttaaaactttctttgtccacacgcctaacaggacgtattatctgatggaccccagcgggaacgcacacaagtggtgcaggaagatccaggaggtttggaggcagcgataccagagccacccggacgccgctgtgcagtgacgtggcctgcggccgggctgcccttcgctgccaggacacctgccccagcgcggcttggccgccatccgggacgcttccagaccacctgccagccatcacaaggggaacgcagaggcggaaaccttgcagcatttttatttaaaagaaaagaagaaaaaaaacacccaaccacacaaagaacaaaaccagtaacaaacacaaaggaattcagggtcgctttgcttgctctctgtgctccgtggaggcctccgtgtgccctcgttgccgtggggacccagctccatgcacgtcaacccagtcccgcccagactagtggacagacctggtgtcaccagtttttcctagcatcagtccgaaccatgcgcccgccctgccccaactgtgtgctggtcctgctgtggccgaggggaccgggtgtgtttggctctttatgcccctcccgctgtggtcctggaactcttcaccagggagggagccctgcgggggccgcagctttgtggagggagccgccgtgcttctgtcacctgctccctttcttgcgtctccctgtgatgggcccttaggcctggctgggcccattacatatccctgtggtggctctggtggcagctttctgtggcccctgctgtgttggcaggcaggtttgcgtggtgaggagcgggaggggttggagtggtgcgggagcaggctgccgagtggagggtgccatcgagggctccggatcccttatcctacttagcagtgttggtctctggggctggaagccgagcgcatgctgggagcggtactgtcagaagtgagcccagttagtaccccgctggctcactgcacgagagagtcctgccccgagccctaggtggggccaggaggtgccttggagaagccagccagagcagagagggctgctgacttccgtgtggagcagagaggcctgagggcctcctaaaaggtttaaatgtccacgcctctccagttgctgaagtagggtctgagagaaccctggcatcagcagacccagggtgcttctgtctcctgcagaccacgccagggagtgcagacaccaccgtcacacacgccccttttgtgttttggttcaagtttctcagagcccctcagagcttctacatctgtgcatcagaaatctcacagccttctcatgctgccggctcatctgggcccatagagtgggctttgccagttgctgttgcacaggaggcgagaacagcacacttcaaccccagcttgctggtcggctttcctctagagagagccggttttggggccatttccctttgatgctttggtggccttgccccgctctgcagcacagacaggccagatgcatttgtcctttgcctagctactccccaggtagagagtgctcctggtggcctggcaggtctgggcccttctctccctgcccaggttgtccctggagggcagccctcactccctttgggggagaggcagacattgctgcccacagacctgcctctgactcaactgtgtccaccctccctggtccctacccccaagtcacaggtgactcagcagtgaccctgtgtgccaggccagatccaaactgagagggaaggtgtcgtttttacactgctaatgacgagagtggctctttttagctaggcgagtacagacggggcctgggagggggcagagatgttccccaggccctgcctgtggttcctgcctgggccttggctgctgctgtgtgagagctgcatgtgagcctgtgaccgtgagctggggtgagctgggccgcacctaccctggggccccagggagcaggacgctccggggcccagcacgttgccctgggcctgtggccggagtcggagtcctctctcctcctcctggcttttggaaaggcttggctgtgttggggagtctctcttagccctttcaggaatttctgttcaggcttcctcctcctcatcagctattttacccatctcagaacgtcctgtgtctccatgtaggagagtggctctctcagatctctcagggcgtctggttatagggaaacaagtggagcagggacgtggctttaattggagcactcggctgggctgcttggggagactcttccgtgcgttcttcctctggatagaaccaccacctcctgggcgtcactgacaagctccatcttaacctccaaagccacagaactaggggctcagagccagagctggcagccgccagccaaaatgatgccattgcctgagctgacagccaagcccttctgtgggtcacctttctcctcacccagccccttgctcttcccttttgaaaggcccgtgtgttttctttccttaccctgtgcttgctcatgtctactccggttttctctaccacatccttagagccatcacctggcacgcaggcgccttacattctacggtagaacgtggggtactgtgtgtgcacatagacacacttacgtggaattacagttgtgggtttatccaagatgaggaagatttcacctgctgtttaatagacttggggccatgtgcctccccacacatgggcaaggacaggtggaatgtcgggaccacactgtgcggcttctcggcacaaagcggagggaggctgtggtcgctgccggcctaggtgtcccaggtgccccgcctttctctgggacacagttgggggctggcttctgagggattcctttctcccctctttgtgtggccccagccagggcggtgggcagtcctggtgtagagcacaagcctctccaccctagagaaatgcctctgtaccacggctaccatgtggaaccttaacttgcagaaggcttgttaacaattgttttgagagagatggctggtcatgccacagctgctggggactccgcctactccagccctcttgggacacactgtgggatttgtggcccttccccagaggaattgtggagactgtcccatggaacaaaccctcaggcaccagcacagggctctgggtgactcagtaaaactaacgtttgtctctgacaagatcagctgtaggctcaccggccagagaagaccactgtgagcattttgccgtatatcctgccctgccatttgttcactttttaaactaaaataggaacatccgacacacaccgtttgcatcgtcttctcccttgatattttaagcattttcccatgtcatgagtttctcagaaacatgtttttaacaattgtactatttagtcattgtccatttactataatttatctgaccatttccctactgtaaaatacttaagacggtttctgatttttccactatttaaataatgctgtgatgaatatctttaaaa

SEQ ID NO: 221392 - DNA, 1290 bp, Artificial Sequence
  derived and/or modified sequence
atggcccggaccaccagccagctgtatgatgctgtgcccatccagagctctgtggtgctgtgcagctgccccagccccagcatggtgaggacccagacagagagcagcaccccacctggcatccctgggggcagccggcagggccctgccatggatggaacagctgctgagcccaggcctggggccggcagcctgcagcacgcccagcccccaccccagcccaggaagaagaggcctgaggacttcaagtttgggaagatcctgggggagggcagcttcagcacagtggtgctggcccgggagctggccaccagccgggagtatgccacccgggccaacagctttgtgggcacagcccagtatgtgtccccagagctgctgacagagaagagcgcctgcaagagcagtgacctgtgggccctgggctgcatcatctaccagctggtggccggcctgccccccttccgggctggaaatgagtacctgatcttccagaagatcatcaagctggagtatgacttccctgagaagttcttccccaaggcccgggacctggtggagaagctgctggtgctggatgccaccaagaggctgggctgtgaggagatggagggctacggccccctgaaggcccaccccttctttgaatctgtgacctgggagaacctgcaccagcagaccccacccaagctgacagcctacctgcctgccatgtctgaagatgatgaggactgctacggcaactatgacaacctgctgagccagtttggctgcatgcaggtgagcagcagcagcagcagccacagcctgagcgccagtgacaccggcctgccccagaggagcggcagcaacatcgagcagtacatccatgacctggacagcaacagctttgagctggacctgcagttctctgaagatgagaagaggctgctgctggagaagcaggccggcggcaacccctggcaccagtttgtggagaacaacctgatcctgaagatgggccctgtggacaagaggaagggcctgtttgcccggcggcggcagctgctgctgacagagggcccccacctgtactacgtggaccctgtgaacaaggtgctgaagggggagatcccctggagccaggagctgcggcctgaggccaagaacttcaagaccttctttgtgcacacccccaacagaacctactacctgatggaccccagcggaaatgcccacaagtggtgcaggaagatccaggaggtgtggaggcagcgctaccagagccacccagatgctgctgtgcagtag

SEQ ID NO: 221393 - DNA, 1290 bp, Artificial Sequence
  derived and/or modified sequence
atggcccggaccaccagccagctgtacgacgccgtgcccatccagtcgagcgtagttctatgctcttgtccatcgccctcaatggtgcggacccaaactgaatcatcgactccacctgggattccgggtggttccagacagggccccgcaatggatggcacggccgctgaaccccgccctggagcgggctcgctccagcatgcacagccccctcctcaacccaggaaaaaacgcccggaagactttaagttcggaaagatcttaggagaaggcagtttctcaaccgtagtactcgcgagggaactggcaacttctcgcgagtacgccactcgcgcaaattccttcgtgggaaccgctcagtatgtcagtcccgagctcttgacagagaaatctgcctgtaaatcctcagacctctgggccctgggctgcatcatttatcagctcgttgctggcctgccaccattccgggccggaaacgagtatctcatttttcagaaaataataaaactggagtatgactttcccgagaagttcttcccaaaggcccgcgacctggtcgaaaagctgttggttctcgatgcaaccaaaagattgggctgcgaggagatggaggggtacgggcctctgaaggcccatcctttctttgaatccgttacatgggaaaatctgcatcagcaaacaccccccaagttaacagcatatctccctgcgatgtctgaggacgatgaagattgctatggcaactacgacaacttgctgtcccagttcggttgtatgcaggtcagctcctcctcatctagccatagcctctccgcaagcgacaccggcctgcctcagcggtcaggttcaaatatagagcagtacatacacgacctggattctaactcttttgaactcgatctacagttctcggaagatgaaaagaggctgctcctggaaaaacaggctggtgggaacccatggcatcagtttgttgagaacaaccttattctcaagatgggacccgtggataagcgcaaagggctgtttgcccggcgacgacagctactgctgacggaggggccccatctgtattatgttgacccagtgaacaaagtgctgaaaggagaaatcccatggagccaggagctaagaccagaggccaagaattttaaaacattctttgtgcacacaccgaataggacatattaccttatggacccctccggaaatgcgcacaagtggtgtcggaagatacaggaggtctggcgtcagcggtaccaaagccaccctgatgcagccgttcagtag

SEQ ID NO: 221394 - DNA, 1290 bp, Artificial Sequence
  derived and/or modified sequence
atggcacgaactaccagccagctctacgacgcagtccccatccagagcagcgttgtcctttgtagttgccccagcccgtcaatggtgcgtacgcagactgaaagttcaacccctcctggcattcccggaggctccagacaaggacctgccatggacggaactgccgcagaaccacgaccaggcgcaggctccctccagcatgcgcagcctccgcctcagcccagaaaaaaaaggcctgaagacttcaagtttgggaaaatcctcggggagggctcattctctacagttgtgctggcacgtgaactagctacgtccagggagtacgcaaccagggccaattccttcgtggggaccgcccagtacgtctctcctgagctgctcactgaaaagagtgcatgtaagagttccgatttgtgggccttagggtgtatcatctaccagctcgtcgcaggacttcccccatttcgtgccggtaacgaataccttatcttccagaagatcatcaaactggagtatgatttccctgaaaagtttttccccaaagctcgggatttagtagaaaagctgcttgtgctagacgcaaccaaaaggcttggctgcgaggagatggagggatatggcccactgaaagcacaccctttttttgagtctgtgacctgggagaatctgcaccagcaaacacctccaaagttaaccgcttacttaccagccatgagtgaggatgatgaagattgctacggaaattatgacaacctgctgtctcagttcggctgtatgcaggtttctagcagctcctcgtcacattctctgagtgcctccgacaccgggttgccccagcggagcgggagtaacatcgagcagtatatccacgaccttgatagcaactccttcgaattggacctgcagtttagtgaggacgaaaaacgattacttctcgagaagcaggcaggtggaaatccttggcaccagttcgtcgaaaacaacctgattctaaagatggggccagtggacaagcggaagggcttgttcgcgagaagaagacaactgctgctgactgagggccctcatctctactatgttgaccccgtgaataaggtgcttaagggggagataccctggtctcaggaactgcgacccgaagcgaagaactttaagacctttttcgttcatacacccaacaggacctactacctgatggaccccagcgggaacgcgcataagtggtgtagaaaaattcaagaggtctggcgccagcgttaccagtcacatccagacgccgctgtacagtag

SEQ ID NO: 221395 - DNA, 1290 bp, Artificial Sequence
  derived and/or modified sequence
atggccagaaccaccagccagctgtacgacgccgtgcccatccagagcagcgtggtgctgtgcagctgccccagccccagcatggtgagaacccagaccgagagcagcaccccccccggcatccccggcggcagcagacagggccccgccatggacggcaccgccgccgagcccagacccggcgccggcagcctgcagcacgcccagccccccccccagcccagaaagaagagacccgaggacttcaagttcggcaagatcctgggcgagggcagcttcagcaccgtggtgctggccagagagctggccaccagcagagagtacgccaccagagccaacagcttcgtgggcaccgcccagtacgtgagccccgagctgctgaccgagaagagcgcctgcaagagcagcgacctgtgggccctgggctgcatcatctaccagctggtggccggcctgccccccttcagagccggcaacgagtacctgatcttccagaagatcatcaagctggagtacgacttccccgagaagttcttccccaaggccagagacctggtggagaagctgctggtgctggacgccaccaagagactgggctgcgaggagatggagggctacggccccctgaaggcccaccccttcttcgagagcgtgacctgggagaacctgcaccagcagaccccccccaagctgaccgcctacctgcccgccatgagcgaggacgacgaggactgctacggcaactacgacaacctgctgagccagttcggctgcatgcaggtgagcagcagcagcagcagccacagcctgagcgccagcgacaccggcctgccccagagaagcggcagcaacatcgagcagtacatccacgacctggacagcaacagcttcgagctggacctgcagttcagcgaggacgagaagagactgctgctggagaagcaggccggcggcaacccctggcaccagttcgtggagaacaacctgatcctgaagatgggccccgtggacaagagaaagggcctgttcgccagaagaagacagctgctgctgaccgagggcccccacctgtactacgtggaccccgtgaacaaggtgctgaagggcgagatcccctggagccaggagctgagacccgaggccaagaacttcaagaccttcttcgtgcacacccccaacagaacctactacctgatggaccccagcggcaacgcccacaagtggtgcagaaagatccaggaggtgtggagacagagataccagagccaccccgacgccgccgtgcagtag

SEQ ID NO: 221396 - protein, 2789 aa, Artificial Sequence
  derived and/or modified sequence
MPSDAKDSVNGDLLLNWTSLKNILSGLNASFPLHNNTGSSTVTTSKSIKDPRLMRREESMGEQSSTAGLNEVLQFEKSSDNVNSEIKSTPSNSASSSEVVPGDCAVLTNGLDTPCFKTSVNDSQSWAHNMGSEDYDCIPPNKVTMAGQCKDQGNFSFPISVSNVVSEVENQNHSEEKAQRAQQESGNAYTKEYSSHIFQDSQSSDLKTIYQTGCQTSTVFPLKKKVSIDEYLQNTGKMKNFADLEDSSKHEEKQTSWKEIDNDFTNETKISPIDNYIVLHQEYKESESHNSFGKSCDKILITQELEITKSSTSTIKDKDELDHLALEWQITPSFESLSQKHPQHSVEYEGNIHTSLAIAQKLMELKLGKINQNYASIITEAFPKPKDIPQAKEMFIDTVISSYNIETAHDSSNCSITREHICVHRKNENEPVSLENIQRDYKETAYVEDRGQDHNLFCNSQLSNDIWLNVNFKKQTDRENQNEAKENSASCVENNIENIYGDKKQDSHTNENFSNIDEKEDKNYHNIEILSSEEFSTKFNLICREDNAVSAATALLESEEDTISAVKQKDTENTGRSVEHLASTTFPKTASSSVCVASNAAIQIASATMPALSLNNDDHQIYQFKETCSSESPDFGLLVKHRVSDCEIDTDKNKSQESFHQSINENLVLQSIELESEIEIELEDCDDAFIFQQDTHSHENMLCEEFVTSYKALKSRISWEGLLALDNGEMEVLESTTGRENSDQHYSKESNYFYSSTQNNETELTSPILLPDLQIKITNIFRPGFSPTADSLALKDSFCTHVTEATKPEINKEDGEILGFDIYSQPFGENADYPCEDKVDNIRQESGPVSNSEISLSFDLSRNTDVNHTSENQNSESLFTEPSNVTTIDDGSRCFFTKSKTDYNDTKNKKEVESRISKRKLHISSRDQNIPHKDLRRHKIYGRKRRLTSQDSSECFSSLSQGRIKTFSQSEKHIKSVLNILSDEASLCKSKCLSRKLDKAVVHLKKAHRRVHTSLQLITKVGEERKGPLPKSYAIICNNFWESCDLQGYSSVSQRKYYSTKHFSSKRKYDKRRKKRAPKADISKSLTHVSKHKSYKTSGEKKCLSRKSMASSVSKSHPTTSHMGEFCNQEHPESQLPVSSTSQSTSQSVYYNSSVSNPSLSEEHQPFSGKTAYLFSPDHSDEKLIEKENQIDTAFLSSTSKYEKLEKHSANHNVKDATKENSCDANEVINESNSVSLSCIKENINSSTGNDCDATCIGHTKAKTDVLISVLDSNVKHFLNDLYQQGNLILSDCKRNLEVKWTDPIERPKQNIITGNFLMGPLNLTLIASKKYSIPQLSAAAVTDSEGESSKSYLDKQRILTVDSFAASSTVPHCEQSCREKELLKTEQCSSGNCLHTDGNETNVTENYELDVASGTEEDKSYGENIVELSSSDSSLLLKDNVKGSSSETCIVKKDTEDRITWKVKQAEKAKDSVYKRSMTEGSTVNTEYKNQKNQISEESCLNEKIITTNLIDSHLSTKNTTTESVPLKNTVSNPLNKREKKGEIKVSKDSQSDLTLHSEIAYISKPGILGVNHTPILPAHSETCKVPTLLKKPASYVSDFKEKHCSANHTALIANLSQILQRADEASSLQILQEETKVCLNILPLFVEAFERKQECSVEQILISRELLVDQNLWNNCKHTLKPCAVDTLVELQMMMETIQFIENKKRHLEGEPTLRSLLWYDETLYAELLGKPRGFQQQSNFYPGFQGRLKYNAFCELQTYHDQLVELLEETKREKNSYYVFLKYKRQVNECEAIMEHCSDCFDFSLSVPFTCGVNFGDSLEDLEILRKSTLKLINVCGDSPKVHSYPGKQDHLWIIIEMISSKVNFIKNNEAVRVKISLYGLEHIFFDAAKNLVWKERTQSFSKKYSQKKDEERLLRVNKCAFSKLQKIYDTLSKDLNNEPISPIGLEEDTIIASRKSDHPINEATISIENSKFNSNLLAHPDICCISEILDQAEFADLKKLQDLTLRCTDHLEILKKYFQMLQDNNMDNIFITEENVLDVVINHSHEAIILKPEAIEMYIEIVMVSETIHFLKNSIAKKLDKQRFRGMLWFDLSLLPELVQCQEKMASFSFLKDNSTDVCLWKVIETAVSELKKDLDIICKYNEAVNCSYAIHLLSRELQELSEIKKLLKKSKYFISTYIDFVPYIASINYGSTVTELEYNYNQFSTLLKNVMSAPRKDLGKMAHIRKVMKTIEHMKMICTKNAELTISFFLCQMLYNRRKILQLKRKEKMNIHIVKPGENNNKFSISTMLPPVSECINKNISNSSKKRPSTVDKCEDSQEQQQDTTVSSCKKLKVDMKDVTKINREKATFKHPRTTGSHPKSENKIVPSSCDSLKRNHLTPKKVEMQRSLPGSLLPLENPKDTCASKSESKIDLTVSSDHFSGQQENLNSMKKRNVNFSAAETKSDKKDCAAFAICDQKSVHGTFSPDHGTLLQKFLKNSPDPTQKSCLSDINPETDVSLVPDASVLSKPIFCFVKDVHPDLEMNDTVFELQDNDIVNSSIKNSSCMTSPEPICIQNKIPTLQINKLQPTETESEDKYMKDTLNPNTVHTFGASGHITLNVNQGAEYSLSEQQNDKNSKVLMQNAATYWNELPQSACNPTYNSSEHLFGTSYPYSAWCVYQYSNSNGNAITQTYQGITSYEVQPSPSGLLTTVASTAQGTHSNLLYSQYFTYFAGEPQANGFVPVNGYFQSQIPASNFRQPIFSQYASHQPLPQATYPYLPNRFVPPEVPWVYAPWHQESFHPGH

SEQ ID NO: 221397 - protein, 1451 aa, Artificial Sequence
  derived and/or modified sequence
MSRAVRLPVPCPVQLGTLRNDSLEAQLHEYVKQGNYVKVKKILKKGIYVDAVNSLGQTALFVAALLGLRKFVDVLVDYGSDPNHRCFDGSTPVHAAAFSGNQWILSKLLDAGGDLRLHDERGQNPKTWALTAGKERSTQIVEFMQRCASHMQAIIQGFSYDLLKKIDSPQRLVYSPSWCGGLVQGNPNGSPNRLLKAGVISAQNIYSFGFGKFYLTGATQMAYLGSLPVIGEKEVIQADDEPTFSFFSGPYMVMTNLVWNGSRVTVKELNLPTHPHCSRLRLADLLIAEQEHSSKLRHPYLLQLMAVCLSQDLEKTRLVYERITIGTLFSVLHERRSQFPVLHMEVIVHLLLQISDALRYLHFQGFIHRSLSSYAVHIISPGEARLTNLEYMLESEDRGVQRDLTRVPLPTQLYNWAAPEVILQKAATVKSDIYSFSMIMQEILTDDIPWKGLDGSVVKKAVVSGNYLEADVRLPKPYYDIVKSGIHVKQKDRTMNLQDIRYILKNDLKDFTGAQRTQPTESPRVQRYGLHPDVNVYLGLTSEHPRETPDMEIIELKEMGSQPHSPRVHSLFTEGTLDPQAPDPCLMARETQNQDAPCPAPFMAEEASSPSTGQPSLCSFEINEIYSGCLILEDDIEEPPGAASSLEADGPNQVDELKSMEEELDKMEREACCFGSEDESSSKAETEYSFDDWDWQNGSLSSLSLPESTREAKSNLNNMSTTEEYLISKCVLDLKIMQTIMHENDDRLRNIEQILDEVEMKQKEQEERMSLWATSREFTNAYKLPLAVGPPSLNYIPPVLQLSGGQKPDTSGNYPTLPRFPRMLPTLCDPGKQNTDEQFQCTQGAKDSLETSRIQNTSSQGRPRESTAQAKATQFNSALFTLSSHRQGPSASPSCHWDSTRMSVEPVSSEIYNAESRNKDDGKVHLKWKMEVKEMAKKAATGQLTVPPWHPQSSLTLESEAENEPDALLQPPIRSPENTDWQRVIEYHRENDEPRGNGKFDKTGNNDCDSDQHGRQPRLGSFTSIRHPSPRQKEQPEHSEAFQASSDTLVAVEKSYSTSSPIEEDFEGIQGAFAQPQVSGEEKFQMRKILGKNAEILPRSQFQPVRSTEDEQEETSKESPKELKEKDISLTDIQDLSSISYEPDSSFKEASCKTPKINHAPTSVSTPLSPGSVSSAASQYKDCLESITFQVKTEFASCWNSQEFIQTLSDDFISVRERAKKLDSLLTSSETPPSRLTGLKRLSSFIGAGSPSLVKACDSSPPHATQRRSLPKVEAFSQHHIDELPPPSQELLDDIELLKQQQGSSTVLHENTASDGGGTANDQRHLEEQETDSKKEDSSMLLSKETEDLGEDTERAHSTLDEDLERWLQPPEESVELQDLPKGSERETNIKDQKVGEEKRKREDSITPERRKSEGVLGTSEEDELKSCFWKRLGWSESSRIIVLDQSDLSD

SEQ ID NO: 221398 - DNA, 4356 bp, Artificial Sequence
  derived and/or modified sequence
atgagcagagccgtgagactgcccgtgccctgccccgtgcagctgggcaccctgagaaacgacagcctggaggcccagctgcacgagtacgtgaagcagggcaactacgtgaaggtgaagaagatcctgaagaagggcatctacgtggacgccgtgaacagcctgggccagaccgccctgttcgtggccgccctgctgggcctgagaaagttcgtggacgtgctggtggactacggcagcgaccccaaccacagatgcttcgacggcagcacccccgtgcacgccgccgccttcagcggcaaccagtggatcctgagcaagctgctggacgccggcggcgacctgagactgcacgacgagagaggccagaaccccaagacctgggccctgaccgccggcaaggagagaagcacccagatcgtggagttcatgcagagatgcgccagccacatgcaggccatcatccagggcttcagctacgacctgctgaagaagatcgacagcccccagagactggtgtacagccccagctggtgcggcggcctggtgcagggcaaccccaacggcagccccaacagactgctgaaggccggcgtgatcagcgcccagaacatctacagcttcggcttcggcaagttctacctgaccggcgccacccagatggcctacctgggcagcctgcccgtgatcggcgagaaggaggtgatccaggccgacgacgagcccaccttcagcttcttcagcggcccctacatggtgatgaccaacctggtgtggaacggcagcagagtgaccgtgaaggagctgaacctgcccacccacccccactgcagcagactgagactggccgacctgctgatcgccgagcaggagcacagcagcaagctgagacacccctacctgctgcagctgatggccgtgtgcctgagccaggacctggagaagaccagactggtgtacgagagaatcaccatcggcaccctgttcagcgtgctgcacgagagaagaagccagttccccgtgctgcacatggaggtgatcgtgcacctgctgctgcagatcagcgacgccctgagatacctgcacttccagggcttcatccacagaagcctgagcagctacgccgtgcacatcatcagccccggcgaggccagactgaccaacctggagtacatgctggagagcgaggacagaggcgtgcagagagacctgaccagagtgcccctgcccacccagctgtacaactgggccgcccccgaggtgatcctgcagaaggccgccaccgtgaagagcgacatctacagcttcagcatgatcatgcaggagatcctgaccgacgacatcccctggaagggcctggacggcagcgtggtgaagaaggccgtggtgagcggcaactacctggaggccgacgtgagactgcccaagccctactacgacatcgtgaagagcggcatccacgtgaagcagaaggacagaaccatgaacctgcaggacatcagatacatcctgaagaacgacctgaaggacttcaccggcgcccagagaacccagcccaccgagagccccagagtgcagagatacggcctgcaccccgacgtgaacgtgtacctgggcctgaccagcgagcaccccagagagacccccgacatggagatcatcgagctgaaggagatgggcagccagccccacagccccagagtgcacagcctgttcaccgagggcaccctggacccccaggcccccgacccctgcctgatggccagagagacccagaaccaggacgccccctgccccgcccccttcatggccgaggaggccagcagccccagcaccggccagcccagcctgtgcagcttcgagatcaacgagatctacagcggctgcctgatcctggaggacgacatcgaggagccccccggcgccgccagcagcctggaggccgacggccccaaccaggtggacgagctgaagagcatggaggaggagctggacaagatggagagagaggcctgctgcttcggcagcgaggacgagagcagcagcaaggccgagaccgagtacagcttcgacgactgggactggcagaacggcagcctgagcagcctgagcctgcccgagagcaccagagaggccaagagcaacctgaacaacatgagcaccaccgaggagtacctgatcagcaagtgcgtgctggacctgaagatcatgcagaccatcatgcacgagaacgacgacagactgagaaacatcgagcagatcctggacgaggtggagatgaagcagaaggagcaggaggagagaatgagcctgtgggccaccagcagagagttcaccaacgcctacaagctgcccctggccgtgggcccccccagcctgaactacatcccccccgtgctgcagctgagcggcggccagaagcccgacaccagcggcaactaccccaccctgcccagattccccagaatgctgcccaccctgtgcgaccccggcaagcagaacaccgacgagcagttccagtgcacccagggcgccaaggacagcctggagaccagcagaatccagaacaccagcagccagggcagacccagagagagcaccgcccaggccaaggccacccagttcaacagcgccctgttcaccctgagcagccacagacagggccccagcgccagccccagctgccactgggacagcaccagaatgagcgtggagcccgtgagcagcgagatctacaacgccgagagcagaaacaaggacgacggcaaggtgcacctgaagtggaagatggaggtgaaggagatggccaagaaggccgccaccggccagctgaccgtgcccccctggcacccccagagcagcctgaccctggagagcgaggccgagaacgagcccgacgccctgctgcagccccccatcagaagccccgagaacaccgactggcagagagtgatcgagtaccacagagagaacgacgagcccagaggcaacggcaagttcgacaagaccggcaacaacgactgcgacagcgaccagcacggcagacagcccagactgggcagcttcaccagcatcagacaccccagccccagacagaaggagcagcccgagcacagcgaggccttccaggccagcagcgacaccctggtggccgtggagaagagctacagcaccagcagccccatcgaggaggacttcgagggcatccagggcgccttcgcccagccccaggtgagcggcgaggagaagttccagatgagaaagatcctgggcaagaacgccgagatcctgcccagaagccagttccagcccgtgagaagcaccgaggacgagcaggaggagaccagcaaggagagccccaaggagctgaaggagaaggacatcagcctgaccgacatccaggacctgagcagcatcagctacgagcccgacagcagcttcaaggaggccagctgcaagacccccaagatcaaccacgcccccaccagcgtgagcacccccctgagccccggcagcgtgagcagcgccgccagccagtacaaggactgcctggagagcatcaccttccaggtgaagaccgagttcgccagctgctggaacagccaggagttcatccagaccctgagcgacgacttcatcagcgtgagagagagagccaagaagctggacagcctgctgaccagcagcgagaccccccccagcagactgaccggcctgaagagactgagcagcttcatcggcgccggcagccccagcctggtgaaggcctgcgacagcagccccccccacgccacccagagaagaagcctgcccaaggtggaggccttcagccagcaccacatcgacgagctgcccccccccagccaggagctgctggacgacatcgagctgctgaagcagcagcagggcagcagcaccgtgctgcacgagaacaccgccagcgacggcggcggcaccgccaacgaccagagacacctggaggagcaggagaccgacagcaagaaggaggacagcagcatgctgctgagcaaggagaccgaggacctgggcgaggacaccgagagagcccacagcaccctggacgaggacctggagagatggctgcagccccccgaggagagcgtggagctgcaggacctgcccaagggcagcgagagagagaccaacatcaaggaccagaaggtgggcgaggagaagagaaagagagaggacagcatcacccccgagagaagaaagagcgagggcgtgctgggcaccagcgaggaggacgagctgaagagctgcttctggaagagactgggctggagcgagagcagcagaatcatcgtgctggaccagagcgacctgagcgactag

SEQ ID NO: 221399 - DNA, 4356 bp, Artificial Sequence
  derived and/or modified sequence
atgtcacgcgcagtccgcctgcctgttccctgcccagtgcagttaggtacactgcgcaacgattcattggaagcgcagttgcacgaatatgtgaaacagggtaattacgtgaaggtgaagaagattctaaaaaaagggatctatgtcgacgccgtcaactcactaggccagactgcgctgtttgtcgccgctcttctgggactgcgtaagttcgttgacgtgctggtggactatggttcagacccaaaccatcggtgttttgatgggagcactcctgtccacgccgctgctttttcaggtaatcaatggattcttagtaagctgctcgatgccggtggtgatcttaggttacatgatgaacggggtcagaaccctaagacttgggccctgactgcaggaaaagaaagatctacacagattgtggaattcatgcagagatgcgcaagtcatatgcaggccattatacaaggctttagttacgatctccttaagaaaattgattcccctcaacgtttggtctacagccccagctggtgcggagggctggtgcaggggaacccaaatgggtccccaaaccgactccttaaggccggagtcatttcagcccagaacatctactcatttggctttggcaagttttacctgactggagccacgcagatggcttacctgggctccttacctgtgatcggcgagaaggaggtgattcaggcagatgatgaacctacgttcagcttcttttccgggccgtatatggtcatgacaaacctagtgtggaacggctctagggttaccgtgaaagagctgaatttacctacccaccctcattgttcccggctcaggttggcagacttacttatagcggaacaggagcacagctcgaagcttagacatccctatctactccagctgatggctgtctgtctgtctcaggacctggagaaaacaagactagtctatgagaggattacaataggaaccttattcagcgtgctgcatgagcgaagaagtcaattcccagtcttgcatatggaggttatcgttcacctcctgctccagatcagtgacgctctcagatacctgcactttcaagggttcatacaccggtcgctgagctcttatgccgtgcacatcatttctcccggagaagctcgcctgacaaatcttgaatatatgttagagtctgaagatcgcggtgttcagcgggacctcactagagtaccgttacccactcagctttacaattgggcggcccccgaggtcatcctccagaaggccgctaccgtgaagtctgacatatactccttcagtatgatcatgcaggaaatccttactgatgacattccttggaaaggacttgatggctccgttgtcaaaaaggctgttgtttccggaaattatcttgaggccgacgtgagactgccaaagccttactatgatatagttaaatctggaatacatgtgaagcagaaagataggaccatgaacctacaagacattcgctacatactgaaaaacgatctcaaggactttacgggagcacagaggactcagccgaccgagagcccacgagtgcagcgatacggcctgcatcccgatgtcaacgtgtacctggggctgacaagcgagcaccccagggaaacacccgacatggagatcattgagttgaaggaaatgggttcacaaccacactctccgcgcgtgcattctttgtttaccgagggcacccttgacccgcaggctcccgacccatgcctcatggccagggaaactcaaaaccaggatgcaccatgtcccgcacctttcatggctgaggaggctagtagtccctctaccggtcaaccttctttgtgttcattcgagatcaatgagatctacagcggctgcctcattctcgaggacgacatcgaagagccgcccggggcagcgtcatcgttggaagcagatggtccaaaccaggttgacgaattgaaaagtatggaagaggagctcgataaaatggaaagggaagcatgctgttttgggagcgaggatgaatcttcgagtaaggccgagactgaatatagctttgatgattgggattggcagaatggaagcctatccagcttatctctgccagagagcaccagagaggccaagagcaacctgaacaacatgtccactacggaggagtatctgatttccaaatgtgtgcttgacctgaaaattatgcaaactatcatgcacgagaacgacgaccggctacgaaacattgaacaaattcttgatgaggttgagatgaagcagaaagagcaagaggaacgcatgagcctgtgggctacatctcgcgagttcaccaatgcgtataagcttccactagcagtgggtccaccgtcactgaattacattccaccagtgctgcagctgtcaggagggcagaaaccagatacgtcgggaaattatccgacccttccaaggttcccccgcatgctcccgacgctttgcgatccaggtaagcaaaacacagatgagcagttccagtgtacccagggggcgaaggacagcttagagaccagcaggatacaaaacacctcttctcagggccgaccacgagagtctaccgcgcaggcgaaagcaacccagttcaatagcgcccttttcactcttagttctcataggcaggggcccagcgcctcaccctcctgtcattgggacagtacccgcatgtctgtggaaccagtgtcctccgaaatctacaacgcggagtctcggaataaggatgatggaaaagtgcatctcaagtggaagatggaggtgaaagagatggcaaaaaaggcggcaactggccagcttacagtgcccccttggcacccccagtcttcactcacgctggaatccgaggcggagaacgagccggacgctctgttacaacccccgatcaggtcccccgagaacaccgattggcagagggtgatcgaataccatagagaaaacgacgagccgaggggaaatggaaagttcgacaagacggggaataatgattgcgactccgaccaacacggacgtcagccacgcctgggctccttcacaagtatacggcacccctcacctagacagaaggaacaacctgagcattctgaagccttccaggcatccagcgatacactcgtcgccgtcgagaaaagttattccacctcctcccctatcgaggaggatttcgaagggatccagggcgctttcgcccaaccgcaagttagtggagaagagaagttccagatgaggaagatccttggcaagaacgccgagattctacctcggtctcagtttcaacccgtgcggtccaccgaggatgagcaggaggaaacaagcaaagagtcgcccaaagagctaaaggaaaaggatatatcactcaccgacattcaagatctgagctcaatcagttacgaacccgactccagctttaaagaggcctcttgtaagaccccaaaaataaaccacgcaccaacctcagtgtccacacctctatcccccggcagtgtttcatcagccgcaagtcaatataaggactgcctggaaagcattacatttcaggtgaagacggagttcgcaagttgctggaatagccaggaattcatccagactctgtctgatgacttcattagcgtacgtgaaagggccaagaagctagacagtctcctcacaagtagcgaaacccccccttcgcggctgaccggcctaaagcgcttatcctccttcattggagccgggtctccttccttagtcaaggcctgtgactcatccccaccccacgccacccagcgacgctcattacccaaagttgaggcattttcacagcaccatattgatgaattgcccccaccgtcccaggaactgttggacgatatagaactgctgaagcagcagcaagggtcaagtactgtgctgcacgaaaacactgcctcagacggggggggcaccgccaatgaccagcggcatctggaggagcaagaaacagattcaaagaaagaagatagctcaatgctattgagtaaggagaccgaagacctgggagaagatacggaaagggcccactctactctagacgaggatcttgagcgctggctgcagccacctgaggagtctgtcgaacttcaagatctgcctaaaggctctgaaagggaaactaatatcaaagaccagaaagtgggggaagaaaaacgcaagcgcgaggactctatcactcccgagagacgcaaatccgaaggagtgctggggacaagcgaggaggatgagctgaagagctgtttctggaaaagactggggtggagcgagtcatccaggatcattgtccttgaccaatcagacctgagcgactag

SEQ ID NO: 221400 - DNA, 4356 bp, Artificial Sequence
  derived and/or modified sequence
atgagcagagctgtgcggctgcctgtgccctgccctgtgcagctgggcaccctgagaaatgacagcctggaggcccagctgcacgagtatgtgaagcagggcaactacgtgaaggtgaagaagatcctgaagaagggcatctacgtggatgctgtgaacagcctgggccagacagccctgtttgtggccgccctgctgggcctgaggaagtttgtggatgtgctggtggactatggcagtgaccccaaccaccgctgctttgatggcagcacccctgtgcatgctgctgccttcagcggcaaccagtggatcctgagcaagctgctggatgctggaggagacctgcggctgcatgatgagcggggccagaaccccaagacctgggccctgacagctgggaaggagaggagcacccagatcgtggagttcatgcagagatgtgccagccacatgcaggccatcatccagggcttctcctatgacctgctgaagaagattgacagcccccagaggctggtgtacagccccagctggtgtggcggcctggtgcagggcaaccccaacggcagccccaaccggctgctgaaggccggggtcatcagcgcccagaacatctacagctttggatttgggaagttctacctgaccggggccacccagatggcctacctgggcagcctgcccgtcatcggggagaaggaggtgatccaggctgatgatgagcccaccttctccttcttcagcggcccctacatggtgatgaccaacctggtgtggaatggcagccgggtgacagtgaaggagctgaacctgcccacccacccccactgcagccggctgcggctggccgacctgctgattgctgagcaggagcacagcagcaagctgcggcacccctacctgctgcagctgatggctgtgtgcctgagccaggacctggagaagacccggctggtgtatgaaagaatcaccatcggcaccctcttctctgtgctgcatgaaagaagaagccagtttcctgtgctgcacatggaggtgattgtgcacctgctgctgcagatcagtgatgccctgcgctacctgcacttccagggcttcatccacaggagcctgagcagctatgctgtgcacatcatcagccctggagaggcccggctgaccaacctggagtacatgctggagagcgaggacagaggagtgcagagggacctgaccagggtgcccctgcccacccagctgtacaactgggccgcccctgaggtgatcctgcagaaggccgccaccgtgaagagtgacatctacagcttctccatgatcatgcaggagatcctgacagatgacatcccctggaagggcctggatggctctgtggtgaagaaggctgtggtgtctggcaactacctggaggctgatgtgcggctgcccaagccctactatgacatcgtgaagagcggcatccacgtgaagcagaaggacaggaccatgaacctgcaggacatccgctacatcctgaagaatgacctgaaggacttcaccggggcccagaggacccagcccacagagagcccccgggtgcagagatatggcctgcacccagatgtgaatgtgtacctgggcctgaccagcgagcacccccgggagaccccagacatggagatcatcgagctgaaggagatgggcagccagccccacagcccccgggtgcacagcctcttcacagagggcaccctggacccccaggccccagacccctgcctgatggcccgggagacccagaaccaggatgccccctgcccagcccccttcatggccgaggaggccagcagccccagcacaggccagcccagcctgtgcagctttgagatcaatgagatctacagcggctgcctgatcctggaggatgacatcgaggagcccccaggggccgccagcagcctggaggctgatggccccaaccaggtggatgagctgaagtccatggaggaggagctggacaagatggagcgggaggcctgctgcttcggctctgaagatgagagcagcagcaaggccgagacagagtacagctttgatgactgggactggcagaatggcagcctgagcagcctgagcctgcctgagagcacccgggaggccaagagcaacctgaacaacatgagcaccacagaggagtacctgatcagcaaatgtgtgctggacctgaagatcatgcagaccatcatgcatgaaaatgatgaccggctgagaaatattgagcagatcctggatgaggtggagatgaagcagaaggagcaggaggagaggatgagcctgtgggccaccagccgggagttcaccaatgcctacaagctgcccctggccgtgggcccccccagcctgaactacatcccccctgtgctgcagctgagcggcggccagaagccagacaccagcggcaactaccccaccctgccccgcttccccaggatgctgcccaccctgtgtgaccccgggaagcagaacacagatgagcagttccagtgcacccagggcgccaaggacagcctggagaccagccgcatccagaacaccagcagccagggccggccccgggagagcacagcccaggccaaggccacccagttcaacagcgccctcttcaccctgagcagccaccggcagggccccagcgccagccccagctgccactgggacagcaccaggatgtctgtggagcctgtgtcctctgagatctacaatgctgagagcaggaacaaggatgatggcaaggtgcacctgaagtggaagatggaggtgaaggagatggccaagaaggccgccaccggccagctgactgtgcccccctggcacccccagagcagcctgaccctggagagcgaggccgagaatgaaccagatgccctgctgcagccccccatccgcagcccagaaaatacagactggcagagggtgattgagtaccaccgggagaatgatgagcccagaggaaatggcaagtttgacaagacaggcaacaatgactgtgacagcgaccagcacggccggcagccccggctgggcagcttcaccagcatccgccaccccagcccccggcagaaggagcagcctgagcacagcgaggccttccaggccagcagtgacaccctggtggccgtggagaagagctacagcaccagcagccccatcgaggaggactttgagggcatccagggcgcctttgcccagccccaggtgtctggagaggagaagttccagatgaggaagatcctgggcaagaatgctgagatcctgcccaggagccagttccagcctgtgcgcagcacagaagatgagcaggaggagaccagcaaggagagccccaaggagctgaaggagaaggacatcagcctgacagacatccaggacctgagcagcatctcctatgagccagacagcagcttcaaggaggccagctgcaagacccccaagatcaaccacgcccccacctctgtgtccacccccctgagccctggctctgtgtcctctgctgccagccagtacaaggactgcctggagagcatcaccttccaggtgaagacagaatttgccagctgctggaacagccaggagttcatccagaccctgagtgatgacttcatctctgtgcgggagcgggccaagaagctggacagcctgctgaccagcagcgagaccccacccagccggctgaccggcctgaagaggctgagcagcttcatcggggccggcagccccagcctggtgaaggcctgtgacagcagcccccctcatgccacccagaggaggagcctgcccaaggtggaggccttcagccagcaccacattgatgagctgcccccacccagccaggagctgctggatgacatcgagctgctgaagcagcagcagggcagcagcacagtgctgcacgagaacacagccagtgatggcggcggcacagccaatgaccagaggcacctggaggagcaggagacagacagcaagaaggaggacagctccatgctgctgagcaaggagacagaggacctgggggaggacacagagcgggcccacagcaccctggatgaggacctggagcgctggctgcagcccccagaggagagcgtggagctgcaggacctgcccaagggcagcgagcgggagaccaacatcaaggaccagaaggtgggggaggagaagaggaagagagaagattccatcaccccagagaggaggaagtcagaaggagtgctgggcaccagcgaggaggatgagctgaagagctgcttctggaagaggctgggctggagcgagagcagccgcatcatcgtgctggaccagagcgacctgagtgactag

SEQ ID NO: 221401 - DNA, 4356 bp, Artificial Sequence
  derived and/or modified sequence
atgagccgggccgtgcggctgcccgtgccctgccccgtgcagctgggcacactacggaacgacagtctagaggcccagctacacgaatacgttaagcaaggaaattatgtcaaggtgaaaaaaattttaaaaaagggcatttacgttgatgcagtgaactcccttggtcagaccgcactctttgtggccgccctgctggggcttagaaagttcgtggatgtgctcgtggactacgggtcagacccaaatcaccgctgcttcgatggctccactcctgtccacgctgcagctttctctggaaatcaatggattctgagtaaactgttagatgccggtggggatctgagactgcatgacgagcggggacagaacccaaagacttgggcacttaccgccggtaaggaaaggagcacccaaattgtggaatttatgcagaggtgcgcgtctcacatgcaggcaataattcaaggatttagctatgacctcttgaaaaaaatcgactcgccacaaagactggtttattccccaagctggtgtggaggtttggtgcagggaaacccaaacggaagccccaacagactcttgaaggccggagtgataagcgctcaaaatatctactcattcggcttcggtaaattctacttaactggagcaacccagatggcttacctgggcagcctgcccgtaatcggggagaaggaagttatacaagctgacgatgagcccactttctcttttttctcaggcccgtacatggttatgacaaatctggtgtggaacggaagtcgcgtaactgtcaaagaattgaacctgcctacacaccctcactgcagtcggttacggctagcggacctcctgattgctgagcaagaacactccagcaagctgcgccacccataccttctgcagctgatggccgtctgcctgtctcaagacttagagaagacccgcctggtgtatgagcgcattacaattggaacgctgtttagcgtgctccatgagcggcgcagtcagttccctgtgttacatatggaagtgatcgtccacctgttgctgcagatcagtgatgcacttaggtatctccacttccaaggcttcattcataggagtctaagtagttatgccgtgcacataatctcacccggcgaggcaaggctcacaaatctggagtacatgttggagagtgaagatagaggcgtgcaacgagacctcacccgagtccctctgcccactcagctatataactgggccgcacccgaggtgattttacaaaaggccgcgacagtgaagagtgatatctatagcttttctatgattatgcaggagatccttactgatgacattccctggaagggcttggacggatcagttgtcaaaaaagctgttgtgtccggaaattacctggaggccgatgtgagactgcccaagccctactacgacatcgtaaagagcggaattcatgtgaagcagaaggaccgtaccatgaacctgcaagacatccgctacattctaaagaacgacctgaaagactttactggggcacagcgtacacagcccaccgaaagccctagggtgcagaggtatgggctgcaccctgatgttaatgtttatcttggccttacctcggagcatccccgggaaacccctgatatggagattatagagctgaaggaaatggggtcccaacctcattccccgcgagtacactccctcttcacagagggcactctggacccccaggcaccagatccgtgtctaatggcgcgtgaaactcagaaccaagatgccccgtgtcctgcccctttcatggcagaggaagcaagctcaccaagtacgggtcagccttcactgtgctcattcgaaatcaacgaaatctactccggatgcctgatcctggaggatgatatcgaggaacctcccggggctgcttcctccttggaggctgatggccccaaccaggtggacgagctcaaatcaatggaggaagaactggacaagatggaacgtgaggcctgttgcttcggttcagaggatgagagttcatccaaggcagaaacagagtactcgttcgacgactgggattggcaaaatgggtccctttcttccttgtctctgccagaatccacgagggaggcaaagtctaatctcaacaatatgagcactacagaagaatatctcatcagtaagtgcgttttggacctaaaaatcatgcaaacgatcatgcacgagaatgatgataggctgaggaacatagagcagatccttgatgaagtggagatgaagcagaaagaacaagaggagagaatgtctctctgggcaacgtctcgagaattcacaaatgcttacaagcttccgttggcagtaggcccacctagcctgaactatatccctcccgtgctgcagctgagcggcggtcaaaaacctgataccagcggtaattaccccaccctccccaggtttcctagaatgctgccaactttatgcgatcctggcaaacaaaacacggacgaacagtttcagtgtacgcagggggcaaaggattcattggaaacgagccggattcagaatacttcatcacaagggcgaccacgggagtccactgctcaggccaaagccacgcagtttaattccgccctattcaccctctcctcacaccgacagggaccgtccgcaagccccagctgccactgggactctactagaatgagcgtcgagcccgtcagctccgaaatttataacgctgaatcaagaaacaaggatgacggaaaagttcacttaaaatggaaaatggaagtcaaagaaatggctaaaaaagctgccactggccaactaactgtacctccttggcaccctcagagctccctgacactcgagagcgaggcggagaatgaacctgacgcgctcctccagccgcctatcaggtctcccgagaacaccgactggcagcgagtgatcgaataccatcgtgagaatgacgagccccgagggaacggaaaatttgacaagaccggcaataatgattgtgattccgaccagcatggccggcagccaaggctgggttcttttacctccatcagacaccctagcccacgccagaaagaacagccagagcattccgaggctttccaggccagcagtgataccctggtggcagtggaaaaaagttactcaacttccagccctattgaagaagacttcgagggaatacagggcgctttcgcgcaacctcaggtgtccggtgaagagaagtttcagatgcggaaaattctagggaagaatgcagaaattctcccccggtcccagttccagcccgttcgcagcacagaggatgaacaggaggaaaccagcaaagaatctcccaaggagctgaaggaaaaagacatttcacttacggacatccaggatctgagttctatcagctacgagccggattcttccttcaaggaagccagctgcaagactccgaagatcaaccatgctcctaccagtgtatccactcccctgtcccctggcagtgtgtccagcgccgcctcccagtataaagactgcctggagagtataactttccaggttaagacggaattcgctagctgctggaatagtcaagagtttattcagaccctgtctgatgattttatttccgtgcgggagcgggctaaaaaactggattcccttttgacgtcctctgaaactcccccatcacggctgaccggtctcaagagacttagctctttcatcggcgcggggtcgcctagtctggtcaaagcttgtgacagcagtcctccacatgctacccagcgcagaagcttacccaaagtggaggccttcagccaacatcacattgatgagctgccccctccctcccaggaactgctcgacgacatcgagcttctcaaacagcagcagggaagcagcactgttctgcatgaaaacactgccagcgatggtgggggcacggccaacgatcagcggcacctggaggaacaagagaccgatagcaaaaaagaggacagttcaatgctgttaagtaaagagacagaggatctgggagaagatactgaacgtgcccattccacactggacgaagatctcgaaaggtggttacagccacccgaggagtctgttgaactccaagacctcccaaaaggatccgagagagagaccaatatcaaggatcaaaaagtcggcgaggaaaagcgaaaacgagaagatagcattacccccgaaaggcggaaaagcgagggtgtcctcggtacgtctgaagaagacgagctgaagagctgtttttggaaaaggctgggatggagtgagtcctccaggataatcgtgctcgatcaaagtgacttatccgactag

SEQ ID NO: 221402 - DNA, 4356 bp, Artificial Sequence
  derived and/or modified sequence
atgagtcgggctgtccggttgcccgtgccctgtccagtgcagctggggactctcagaaacgattccctggaagcacagctgcacgaatatgttaaacaggggaactacgtgaaggtcaagaagattctgaagaaagggatctatgtggacgcagtgaactctttgggccaaaccgccctgttcgtggctgccttgctcgggcttaggaagttcgtcgacgtgttggtagattacggctctgatcctaaccacaggtgcttcgatggcagcacccccgtgcacgccgcagcattctcggggaatcagtggattttgagcaagttactggatgctggtggagatcttaggttgcatgatgaacgaggccaaaaccctaaaacatgggctctgaccgcagggaaagaaaggtcaactcagatcgtggaatttatgcaaagatgtgcttcacatatgcaggcaatcatccagggctttagctatgatctgctgaagaagatcgacagccctcagcgtctcgtctacagcccttcatggtgtggcggactcgtccaaggtaaccccaatggctcccctaaccgactcctgaaggcaggggtcatatctgctcagaacatttacagcttcggctttggtaaattttacttgactggcgcaacgcaaatggcctacctggggtctttgccagtcattggagagaaagaggtgatacaagccgacgatgagccgacattcagtttctttagcggcccttacatggtgatgacaaacctcgtgtggaacggttcccgcgtgaccgtgaaggagctaaatttgcctacacatccacattgtagtcgtcttcgcctcgctgacctacttatcgccgaacaagagcactcttcgaagctgaggcacccctaccttttacagctcatggccgtctgcctgtcacaagatctcgagaaaaccagactcgtgtatgaaaggatcaccatcggaaccctattcagtgttcttcacgaaagacgctcacagtttcccgtgttgcatatggaagtgatcgtccacttgctgctgcagatttcagacgcactgaggtacctgcactttcagggcttcatccatagatccctctcatcatacgccgtccacataatttctcctggagaagcacgcctgactaacctggaatacatgctggagagcgaggacagaggagtgcagagggaccttacgagggtcccattgccaacacaactgtacaactgggccgctcctgaggttatcctccaaaaagcagctacagtgaagagtgacatttacagcttttcaatgataatgcaagagatccttaccgatgatatcccatggaagggcttagacggatctgtggttaaaaaagccgttgtctctggcaattatctcgaagccgacgtgcgcctgccaaagccctactatgacattgtcaagagtggtattcatgtcaagcagaaagatagaactatgaatctgcaagatatccgctatatcctgaaaaacgatcttaaagactttaccggagcacagagaacccagcctaccgagtctcccagggtccagaggtatgggctccaccccgacgttaatgtctatctcggacttacaagtgaacaccctcgggagacaccagatatggagataattgagcttaaagaaatggggagccaaccccattcccccagagtccattctctgttcactgagggaacgttagacccacaagcccctgacccctgtctgatggctcgtgagactcagaaccaagatgcaccctgtcccgcacccttcatggctgaggaagcttcgagtccctccaccggccagccctccctttgctcatttgagatcaatgaaatttactcaggatgtctgatcctggaggatgacatagaagaaccacccggtgccgctagcagtttggaagccgacggccctaaccaagtagatgaacttaagagcatggaggaggagttggacaaaatggagagggaggcgtgctgcttcggaagtgaagacgagtcatcgtcaaaggctgagacagaatattccttcgacgactgggattggcagaacggtagcctttctagcctatccctgccagaaagtacacgggaagcgaaaagtaacctcaataatatgtccaccactgaagagtatctaatctccaaatgcgtgctcgatctgaaaataatgcagacaatcatgcatgagaacgacgataggctgagaaatatcgagcagatcctggacgaggtggagatgaaacagaaggagcaagaagaaaggatgagtctctgggccaccagcagggaatttaccaacgcctacaaactccccttggctgtggggcctcctagcctgaactacatcccaccagtgctgcagctctcaggcggacaaaagcctgatacctcggggaattacccaactcttccaagatttcctcgcatgctaccaaccctctgtgaccccggtaagcagaacaccgacgaacaatttcaatgtacacagggtgctaaggactcacttgaaacctctcggatccagaacacatcctcacagggcagacccagagaatcgacagcccaggccaaggcaacacagttcaactctgccctcttcacgctttccagccaccgccaaggaccgtcagcgagtccttcctgccactgggactctacgagaatgagcgttgaacctgtgtcttctgagatctacaatgctgagagtagaaataaagatgacgggaaagtacacctgaagtggaagatggaggttaaggagatggcaaagaaggccgcaaccggacagctaactgtgcctccatggcatccacagtcgtccctgactctggagagcgaggccgagaacgaacctgacgccctgctccagccacccattaggagtcctgagaacaccgattggcaacgtgtgatcgagtatcaccgggaaaacgacgagcctcgcggaaatgggaaatttgacaaaactggcaataacgactgtgactcagatcaacacggaagacagccaaggttgggcagtttcacatccatacgacacccgtccccgagacagaaagagcaacccgaacatagcgaagccttccaggcatcttctgacaccctcgtagctgtcgagaagagctattccacgagctctccgatcgaagaggactttgagggaattcagggtgcatttgcgcagccccaggtttcaggcgaggagaaatttcagatgagaaagatcctgggaaagaatgccgaaatactacctagatctcagttccagcccgtgaggtctactgaagatgaacaggaggaaacatccaaagagagtcccaaggagctcaaggagaaggatatttctctcacagatatacaggatctcagctccatctcatacgagcctgattccagtttcaaggaagcctcctgcaagacgccgaagatcaatcatgcccctacctcggtttcaacgcccctttcccccggttcagtgtccagtgccgctagccagtacaaagactgtttggaatctattacttttcaggtcaagaccgaattcgcctcttgctggaatagccaggaatttatacagacactgtccgacgattttataagcgtaagggaaagggctaaaaagcttgattcccttttgacatcttccgaaacgccaccaagccgacttaccggtctcaagaggttgtccagttttataggggcaggctctccttcacttgttaaggcctgcgactcctccccaccccatgcaacacagcgcagatcccttccaaaggttgaggcattcagtcagcaccacatcgacgagttaccccctccgtcccaagaattactggacgacattgaattactcaagcagcagcagggctccagcacagtgctgcatgagaacactgcctccgacggcggaggtacagctaatgatcagaggcacctcgaggagcaagaaaccgatagcaaaaaagaagacagcagcatgcttctgtcaaaagaaactgaggacctcggagaggacacagagcgagctcactccacgttagatgaagatctggaacggtggcttcagccaccagaagaatccgtcgagctccaggatctgccaaagggcagtgagcgcgagaccaatattaaagatcagaaagtcggagaggaaaaacgaaaacgcgaagactccataacccctgaaaggaggaagtctgaaggagtgcttgggacgtcagaggaggatgaactcaaaagctgcttctggaagcggctcggatggagcgagtcaagccggattatcgttctggaccagagcgatctatcagattag

SEQ ID NO: 221403 - DNA, 4804 bp, Artificial Sequence
  derived and/or modified sequence
atcagtccgcattccccgcacccacccacgtcttcccgggagtcgtatcccgagcatggaggttactgagaccgttatttcttcatggcctgcctagcttaagcagtagctggaaaagatgtctcgggctgttcgtcttccagtcccctgtcctgttcaacttggtaccttaagaaatgactccctggaagctcagcttcatgagtatgtcaaacaagggaactatgtgaaagtgaagaaaattcttaagaaaggaatttatgttgatgcagttaactccttgggccaaacagcactttttgttgcggcgttattgggccttaggaaattcgttgatgttctggtggattatggatcagatccaaatcaccgctgctttgatgggagcacccctgtccatgcagcagcattttcgggcaatcagtggatccttagcaaactgctggatgcaggaggtgacctgcgactccacgatgagaggggtcaaaacccgaagacttgggctttgacagcaggaaaggagcgtagcacccagatagtggagttcatgcagcgctgtgcctcacacatgcaggccatcatccagggcttctcttacgacctcctgaagaagatagactccccgcagcggcttgtctacagcccgtcctggtgtgggggcctcgtgcagggaaaccctaatggctctcctaaccgactgcttaaagctggagtcatttctgctcaaaatatctacagctttggttttgggaagttttatcttactggggcgacacagatggcctatctaggatctcttccggtcattggagaaaaggaagtgattcaagctgatgatgagcccaccttctctttcttcagcggcccctacatggtcatgaccaacctagtgtggaatgggagcagggtcacagtgaaagagctgaatctccccacccacccacactgcagcaggctgcggctggccgacttgttaattgccgagcaggaacacagcagcaagctgcggcacccctacttgctacagttgatggctgtgtgtctctcccaggacctagagaaaacccgccttgtgtacgagcgcatcactatcggcacattgttcagtgtccttcatgaacgacggtcccagttcccagtgctgcacatggaggtgattgtgcacctgctgctccagatatctgatgccctgagatacctgcatttccaggggtttatccaccgctccctcagctcctatgctgtccatatcatctccccaggtgaagcgaggctgaccaacctggagtacatgttggaaagcgaggacagaggtgtacagagggacctgactcgagtgccccttcctacgcagctatacaactgggccgcaccagaagtgatcttacagaaggcagccacagtgaaatcagacatctacagcttttctatgatcatgcaggagattttaacagatgacataccctggaagggcttagatggctcagttgttaaaaaagccgtagtctcggggaattatttagaagctgatgtcaggcttccgaaaccttactatgatattgttaagtcaggcatccacgtcaagcagaaagaccgaactatgaaccttcaagatatccggtatattctgaagaatgacttaaaggattttactggagcccagagaactcaaccaaccgagagccccagagtgcagagatacggactccatcccgatgtcaatgtctatctaggactgacttcagaacaccccagagagacacctgacatggaaatcatagaactaaaggaaatgggcagtcaacctcattcaccaagggttcactctttattcactgaggggacactagatcctcaggccccagatccatgtctgatggccagggagactcagaatcaagatgctccttgccctgctccatttatggcagaagaggccagcagccccagcacaggtcagccaagcctctgcagtttcgaaatcaacgagatctactcaggctgcttgattttggaagatgacatagaagagcctccaggagctgcttcatctttggaggcagacggacctaaccaggtagatgaactgaaatccatggaagaagagctggataagatggagagagaggcgtgttgttttggcagtgaggatgagagctcttcaaaagctgagacagagtactcttttgatgactgggactggcaaaacggttcactcagttcactcagccttcctgagtcaaccagagaagccaagagcaatttgaacaacatgtccacgactgaggagtatctcatcagtaagtgtgtgctggatctaaagattatgcagacaataatgcacgagaatgatgataggctgaggaatatcgagcagatattagatgaagtcgagatgaaacagaaggaacaggaagagcgcatgtctttatgggccacttcaagagagtttacaaatgcctacaagttacctctggccgtgggccctccatctttaaactatattcctcctgtcctacagctttcagggggtcagaagccagacaccagtggcaactacccaaccctaccaagatttccaagaatgctgccgactctttgtgaccctggaaaacagaacacagatgaacaatttcagtgcactcaaggagccaaggacagtttggaaacaagcaggatccaaaataccagtagccagggaagacctagagagtccactgcccaagccaaagccacacagtttaatagtgcactcttcactctgtcaagccaccggcagggaccttctgcatcacccagctgtcactgggactctaccaggatgagtgtggaacctgtttcttctgaaatctataatgcagagtccagaaataaagatgatggaaaggtacacttaaaatggaaaatggaggtgaaagaaatggcaaagaaagcagctactggacagctcacagtacctccttggcatcctcagagtagtctgactttagagagcgaggctgaaaatgagcccgacgccctgctgcagccccccattaggagcccagaaaacacggattggcagcgagttattgagtatcatagggaaaatgatgagcccagaggaaatggcaagtttgacaagacgggcaacaatgactgtgacagtgaccagcatggcagacagcccaggcttggaagcttcaccagtatcaggcacccatctcccagacaaaaggagcaaccagagcatagtgaagccttccaagcaagttctgacacattggtggctgtagagaaatcttacagtacctcgagtcccatagaagaggactttgaaggaatacaaggtgcatttgcccaacctcaagtctctggtgaggaaaagttccaaatgagaaaaattcttggaaagaatgctgagattttgcccaggtctcaatttcaacctgtacgaagtactgaagatgaacaagaagagacatcaaaggagtcaccaaaggaactgaaagagaaagacatatcattgacggatattcaagacctgtctagtatctcctatgaaccagacagctcttttaaggaagcttcatgcaaaacacccaaaataaaccatgcacctaccagtgtcagcactccactcagcccagggtccgtttcttcagctgccagtcagtataaagactgccttgaaagtatcacatttcaggttaagacagagtttgcctcttgctggaacagtcaagaatttattcaaactttgtctgatgactttataagtgtccgagagagagcaaagaaactggattctctccttacttcctctgaaactcccccttcaagactgactggtcttaaaagattgtcttcatttattggggctggatcccccagccttgttaaggcatgtgactcatcaccaccccatgccacccagagaaggagcctgcctaaagtagaagccttctcacagcatcacattgatgagctgccaccaccatctcaggagctacttgatgacattgagctcttgaaacagcagcagggctcatccacggtgttgcatgagaacacagcaagtgatggaggaggcactgcaaatgatcaaaggcacttagaagaacaagaaactgacagtaaaaaagaagatagtagtatgcttttgtccaaagaaactgaagatcttggagaggacacagagagagctcactctactctggatgaggacctggaaagatggctgcagccacctgaggagagcgtggagctacaagaccttcccaagggctctgaaagggagacaaatatcaaagatcaaaaagttggtgaagagaaaagaaaaagggaagatagcattacaccagaaagaaggaaatcagagggtgttctagggacttctgaagaagatgaactaaaatcctgtttttggaagcgactaggttggtccgaatcatccaggataatcgtgctggatcagagtgacttgtcagactgattggaattggatcatagacggactcctggcctgagtttgagtgtcctggttgtaagctcctttcttctctttctgcttcagttgctgtcagggcagcagttccagttctgtaagtctcactttgttcagctgccacaatagacatcatcgtttggccctctctgttagcagcacattcaaccatttgttttcagtcagatttctgaaaagtgagaggtagttttgatagtaaaaatttttggttgtgcctagaatggctttggttttgttgatgttaattttcaaaaactttaactcttgttatataataaaatgtttaattttaataac

SEQ ID NO: 221404 - protein, 925 aa, Artificial Sequence
  derived and/or modified sequence
MDNDDFFSMDFKEVVENLVTNDNSPNIPEAIDRLFSDIANINRESMAEITDIQIEEMAVNLWNWALTIGGGWLVNEEQKIRLHYVACKLLSMCEASFASEQSIQRLIMMNMRIGKEWLDAGNFLIADECFQAAVASLEQLYVKLIQRSSPEADLTMEKITVESDHFRVLSYQAESAVAQGDFQRASMCVLQCKDMLMRLPQMTSSLHHLCYNFGVETQKNNKYEESSFWLSQSYDIGKMDKKSTGPEMLAKVLRLLATNYLDWDDTKYYDKALNAVNLANKEHLSSPGLFLKMKILLKGETSNEELLEAVMEILHLDMPLDFCLNIAKLLMDHERESVGFHFLTIIHERFKSSENIGKVLILHTDMLLQRKEELLAKEKIEEIFLAHQTGRQLTAESMNWLHNILWRQAASSFEVQNYTDALQWYYYSLRFYSTDEMDLDFTKLQRNMACCYLNLQQLDKAKEAVAEAERHDPRNVFTQFYIFKIAVIEGNSERALQAIITLENILTDEESEDNDLVAERGSPTMLLSLAAQFALENGQQIVAEKALEYLAQHSEDQEQVLTAVKCLLRFLLPKIAEMPESEDKKKEMDRLLTCLNRAFVKLSQPFGEEALSLESRANEAQWFRKTAWNLAVQCDKDPVMMREFFILSYKMSQFCPSDQVILIARKTCLLMAVAVDLEQGRKASTAFEQTMFLSRALEEIQTCNDIHNFLKQTGTFSNDSCEKLLLLYEFEVRAKLNDPLLESFLESVWELPHLETKTFETIAIIAMEKPAHYPLIALKALKKALLLYKKEEPIDISQYSKCMHNLVNLSVPDGASNVELCPLEEVWGYFEDALSHISRTKDYPEMEILWLMVKSWNTGVLMFSRSKYASAEKWCGLALRFLNHLTSFKESYETQMNMLYSQLVEALSNNKGPVFHEHGYWSKSD

SEQ ID NO: 221405 - DNA, 2778 bp, Artificial Sequence
  derived and/or modified sequence
atggacaacgacgacttcttcagcatggacttcaaggaggtggtggagaacctggtgaccaacgacaacagccccaacatccccgaggccatcgacagactgttcagcgacatcgccaacatcaacagagagagcatggccgagatcaccgacatccagatcgaggagatggccgtgaacctgtggaactgggccctgaccatcggcggcggctggctggtgaacgaggagcagaagatcagactgcactacgtggcctgcaagctgctgagcatgtgcgaggccagcttcgccagcgagcagagcatccagagactgatcatgatgaacatgagaatcggcaaggagtggctggacgccggcaacttcctgatcgccgacgagtgcttccaggccgccgtggccagcctggagcagctgtacgtgaagctgatccagagaagcagccccgaggccgacctgaccatggagaagatcaccgtggagagcgaccacttcagagtgctgagctaccaggccgagagcgccgtggcccagggcgacttccagagagccagcatgtgcgtgctgcagtgcaaggacatgctgatgagactgccccagatgaccagcagcctgcaccacctgtgctacaacttcggcgtggagacccagaagaacaacaagtacgaggagagcagcttctggctgagccagagctacgacatcggcaagatggacaagaagagcaccggccccgagatgctggccaaggtgctgagactgctggccaccaactacctggactgggacgacaccaagtactacgacaaggccctgaacgccgtgaacctggccaacaaggagcacctgagcagccccggcctgttcctgaagatgaagatcctgctgaagggcgagaccagcaacgaggagctgctggaggccgtgatggagatcctgcacctggacatgcccctggacttctgcctgaacatcgccaagctgctgatggaccacgagagagagagcgtgggcttccacttcctgaccatcatccacgagagattcaagagcagcgagaacatcggcaaggtgctgatcctgcacaccgacatgctgctgcagagaaaggaggagctgctggccaaggagaagatcgaggagatcttcctggcccaccagaccggcagacagctgaccgccgagagcatgaactggctgcacaacatcctgtggagacaggccgccagcagcttcgaggtgcagaactacaccgacgccctgcagtggtactactacagcctgagattctacagcaccgacgagatggacctggacttcaccaagctgcagagaaacatggcctgctgctacctgaacctgcagcagctggacaaggccaaggaggccgtggccgaggccgagagacacgaccccagaaacgtgttcacccagttctacatcttcaagatcgccgtgatcgagggcaacagcgagagagccctgcaggccatcatcaccctggagaacatcctgaccgacgaggagagcgaggacaacgacctggtggccgagagaggcagccccaccatgctgctgagcctggccgcccagttcgccctggagaacggccagcagatcgtggccgagaaggccctggagtacctggcccagcacagcgaggaccaggagcaggtgctgaccgccgtgaagtgcctgctgagattcctgctgcccaagatcgccgagatgcccgagagcgaggacaagaagaaggagatggacagactgctgacctgcctgaacagagccttcgtgaagctgagccagcccttcggcgaggaggccctgagcctggagagcagagccaacgaggcccagtggttcagaaagaccgcctggaacctggccgtgcagtgcgacaaggaccccgtgatgatgagagagttcttcatcctgagctacaagatgagccagttctgccccagcgaccaggtgatcctgatcgccagaaagacctgcctgctgatggccgtggccgtggacctggagcagggcagaaaggccagcaccgccttcgagcagaccatgttcctgagcagagccctggaggagatccagacctgcaacgacatccacaacttcctgaagcagaccggcaccttcagcaacgacagctgcgagaagctgctgctgctgtacgagttcgaggtgagagccaagctgaacgaccccctgctggagagcttcctggagagcgtgtgggagctgccccacctggagaccaagaccttcgagaccatcgccatcatcgccatggagaagcccgcccactaccccctgatcgccctgaaggccctgaagaaggccctgctgctgtacaagaaggaggagcccatcgacatcagccagtacagcaagtgcatgcacaacctggtgaacctgagcgtgcccgacggcgccagcaacgtggagctgtgccccctggaggaggtgtggggctacttcgaggacgccctgagccacatcagcagaaccaaggactaccccgagatggagatcctgtggctgatggtgaagagctggaacaccggcgtgctgatgttcagcagaagcaagtacgccagcgccgagaagtggtgcggcctggccctgagattcctgaaccacctgaccagcttcaaggagagctacgagacccagatgaacatgctgtacagccagctggtggaggccctgagcaacaacaagggccccgtgttccacgagcacggctactggagcaagagcgactag

SEQ ID NO: 221406 - DNA, 2778 bp, Artificial Sequence
  derived and/or modified sequence
atggataacgatgacttcttcagcatggattttaaagaggtcgttgaaaatctggtgaccaacgataattccccaaacatccccgaagcaatcgatcgactgttctccgatatcgccaatatcaaccgcgagtccatggctgagatcaccgatattcagatagaggagatggccgtcaacctctggaactgggccttaaccattggtggggggtggttagtcaacgaagaacagaagataaggctccactacgtggcctgtaagcttctttccatgtgcgaggcctcgttcgcatctgaacagtccattcagagattgataatgatgaacatgagaattgggaaagagtggctcgacgctgggaactttctaattgcggacgagtgcttccaggcggccgtggcttcactggaacaactttacgttaaactcatacaaagatcctctcctgaagccgacctaaccatggaaaagatcacggtggagtccgatcactttcgggtgctgagctatcaggccgaatctgctgtggctcagggtgattttcagcgagcctccatgtgcgttctgcaatgcaaggacatgttgatgagactgccacaaatgactagttctctgcaccacttatgctacaatttcggtgtagagactcagaagaataacaagtacgaggagtcatccttttggctgtcccagagctacgatattggcaaaatggacaaaaaatctactggccccgaaatgctggccaaagtcctcaggctgctcgccaccaattacctagattgggacgacaccaagtattacgacaaggccctcaatgctgtgaacctggctaacaaagaacacctgagctctcccgggttattcctcaaaatgaaaattctgctgaaaggggaaacaagtaacgaagagctgctggaggccgtcatggagatcctccatctcgacatgcctctcgatttctgcctaaacatcgctaaactactcatggaccatgagcgagagagtgttggtttccattttctgaccattatccacgagcgcttcaagagctccgaaaatatcggtaaggtgctgatcttacatacagacatgttacttcaaaggaaggaggaactgctggccaaggaaaaaattgaggagattttcctcgcccaccagaccgggcgacagcttaccgcagagtccatgaattggctgcataacattctttggaggcaggctgcttcatcctttgaggtccaaaactacacagatgcacttcaatggtactactacagcctgcggttctactccacagatgaaatggatctcgactttaccaagttgcaaaggaatatggcttgctgctacctgaacctgcaacagctggataaagcaaaagaggctgtggccgaggccgaaaggcacgatccaagaaatgtgtttacacagttttacattttcaagattgcagtaatcgaaggtaactccgagcgcgccctccaggctatcatcacacttgaaaacatccttacagatgaggagtccgaggacaatgatctggtggcagagcgcgggtcgcctacaatgctacttagcttggctgctcagttcgctctcgaaaatggccagcagattgtggcagaaaaggcgctcgagtacctcgcgcagcactctgaagatcaggaacaggttttaactgctgtgaagtgcttactgcgtttcctcttgcctaagatcgcagagatgcccgagtctgaagacaagaaaaaagagatggaccgactactgacgtgtcttaatcgggcctttgttaagcttagccagccttttggtgaagaggcactgtctcttgagtcccgtgccaatgaggcccagtggttccgaaagactgcatggaatctcgccgtgcagtgtgataaggaccctgtaatgatgcgagaattcttcatcctgagctataagatgtctcaattttgtccatccgaccaggtgatattaatagccaggaaaacttgcctactcatggctgtggccgtggatcttgagcagggacgaaaagcatccaccgcttttgagcagacgatgttcctctcaagggcactcgaggagattcagacatgcaacgatattcacaattttttgaagcaaactgggaccttctccaatgatagctgcgaaaaactactcctcctctacgaatttgaagtgagagccaagttgaacgatcccctcctcgagagcttccttgaatcagtatgggaactgccccacctcgagactaagacatttgaaacaattgccattattgctatggagaagcccgcacactaccccttgatcgctttaaaagccctgaaaaaggcattactgctgtacaagaaagaggagcccatcgacattagtcagtacagtaaatgtatgcataacctggtcaacctgagcgtgcccgatggcgcaagtaacgtagaactgtgcccactagaagaagtctggggatacttcgaggatgccctgtcacacatctctcggaccaaggattatccagagatggagatcctgtggctcatggttaagtcatggaacaccggagtgctgatgttcagtcgttctaagtacgcatccgctgaaaaatggtgcggtttggccctccggtttctcaaccatctgacgtccttcaaagaatcttacgaaacccagatgaacatgttatacagtcaactggtggaagcgctctctaacaataaggggcctgtcttccatgagcatggatactggtccaagtctgactag

SEQ ID NO: 221407 - DNA, 2778 bp, Artificial Sequence
  derived and/or modified sequence
atggacaatgatgacttcttctccatggacttcaaggaggtggtggagaacctggtgaccaatgacaacagccccaacatccctgaggccatcgacaggctcttcagtgacatcgccaacatcaaccgggagagcatggccgagatcacagacatccagatcgaggagatggctgtgaacctgtggaactgggccctgaccatcggcggcggctggctggtgaatgaggagcagaagatccggctgcactacgtggcctgcaagctgctgtccatgtgtgaggccagctttgccagcgagcagagcatccagaggctcatcatgatgaacatgagaattggcaaggagtggctggatgctggcaacttcctgattgctgatgagtgcttccaggccgctgtggccagcctggagcagctgtatgtgaagctgatccagaggagcagccctgaggccgacctgaccatggagaagatcaccgtggagagtgaccacttccgggtgctgagctaccaggccgagagcgctgtggcccagggcgacttccagagggcctccatgtgtgtgctgcagtgcaaggacatgctgatgaggctgccccagatgaccagcagcctgcaccacctgtgctacaactttggagtggagacccagaagaacaacaagtatgaggagagcagcttctggctgagccagagctatgacatcggcaagatggacaagaagagcacaggccctgagatgctggccaaggtgctgcggctgctggccaccaactacctggactgggatgacaccaagtactatgacaaggccctgaatgctgtgaacctggccaacaaggagcacctgagcagccctggcctcttcctgaagatgaagatcctgctgaagggggagaccagcaatgaggagctgctggaggccgtgatggagatcctgcacctggacatgcccctggacttctgcctgaacatcgccaagctgctgatggaccacgagcgggagagcgtgggcttccacttcctgaccatcatccacgagcgcttcaagagcagcgagaacatcggcaaggtgctgatcctgcacacagacatgctgctgcagaggaaggaggagctgctggccaaggagaagattgaggagatcttcctggcccaccagacaggccggcagctgacagctgagagcatgaactggctgcacaacatcctgtggaggcaggccgccagcagctttgaggtgcagaactacacagatgccctgcagtggtactactacagcctgcgcttctacagcacagatgagatggacctggacttcaccaagctgcagaggaacatggcctgctgctacctgaacctgcagcagctggacaaggccaaggaggccgtggccgaggccgagagacatgaccccagaaatgtgttcacccagttctacatcttcaagattgctgtgattgagggcaacagcgagcgggccctgcaggccatcatcaccctggagaacatcctgacagatgaggagagcgaggacaatgacctggtggccgagcggggcagccccaccatgctgctgagcctggccgcccagtttgccctggagaatggccagcagatcgtggccgagaaggccctggagtacctggcccagcacagcgaggaccaggagcaggtgctgacagctgtgaagtgcctgctgcgcttcctgctgcccaagattgctgagatgcctgagagcgaggacaagaagaaggagatggaccggctgctgacctgcctgaacagagcctttgtgaagctgagccagccctttggagaggaggccctgagcctggagagccgggccaatgaggcccagtggttcaggaagacagcctggaacctggccgtgcagtgtgacaaggaccctgtgatgatgagggagttcttcatcctgagctacaagatgagccagttctgccccagcgaccaggtgatcctgattgccaggaagacctgcctgctgatggctgtggccgtggacctggagcagggcaggaaggccagcacagcctttgagcagaccatgttcctgagccgggccctggaggagatccagacctgcaatgacatccacaacttcctgaagcagacaggcaccttcagcaatgacagctgtgagaagctgctgctgctgtatgaatttgaggtgcgggccaagctgaatgaccccctgctggagagcttcctggagagcgtgtgggagctgccccacctggagaccaagacctttgagaccatcgccatcatcgccatggagaagccagcccactaccccctcatcgccctgaaggccctgaagaaggccctgctgctgtacaagaaggaggagcccatcgacatcagccagtacagcaagtgcatgcacaacctggtgaacctgtctgtgcctgatggagccagcaatgtggagctgtgccccctggaggaggtgtggggctactttgaagatgccctgagccacatcagcaggaccaaggactacccagagatggagatcctgtggctgatggtgaagtcctggaacacaggagtgctgatgttcagccgcagcaaatatgccagcgctgagaagtggtgtggcctggccctgcgcttcctgaaccacctgaccagcttcaaggagagctatgagacccagatgaacatgctgtacagccagctggtggaggccctgagcaacaacaagggccctgtgttccacgagcacggctactggagcaagagtgactag

SEQ ID NO: 221408 - DNA, 2778 bp, Artificial Sequence
  derived and/or modified sequence
atggacaacgacgacttcttcagcatggacttcaaggaggtggtggagaatctcgtcaccaacgacaactcaccaaatatcccggaggcaatcgacaggttgttctccgatattgctaatattaacagagaatctatggccgagattactgatattcagatcgaggaaatggctgtgaatctgtggaactgggccctgaccatcggcgggggatggctggtgaatgaggagcaaaagatacgtctccactacgtggcttgtaaactgttatctatgtgcgaggcctcatttgcctccgaacagagcatccaacggctgattatgatgaacatgcggatcggaaaggagtggctggacgccggtaactttctgatcgctgacgagtgcttccaggcagccgtcgcgagcctggaacagctttacgttaagctgatccaaagatcctcccctgaggccgacctgaccatggagaagattaccgtggaatctgatcactttcgggttctgtcttatcaggcagagtcagccgttgcccagggagatttccagagggcctcaatgtgtgtgcttcagtgcaaggatatgctaatgaggctcccacagatgacttcaagtctccaccatctgtgttataatttcggggtcgagacacagaaaaacaataagtatgaggagtcttcattttggttgtctcaaagttacgacatcggtaagatggataagaagagtacaggacctgaaatgctggccaaggtcctccggctcctggccacaaactatcttgattgggacgacacaaaatattatgataaggcgttaaatgcagttaacctggccaataaggagcacctctcttccccaggactgttcctcaaaatgaagattctccttaagggcgagacgagcaacgaggaactcttagaggccgtgatggaaatcctgcatctggacatgccgctggacttctgcctcaatatagccaagctcctgatggaccacgaaagggagtctgtcggattccatttcctgacgatcatccacgaacgattcaagtcaagtgaaaatatagggaaagtgctgatcctccataccgacatgctgctgcaaagaaaggaagaactcctagccaaggagaaaattgaagaaattttcctggcacaccaaaccggacgtcagttgaccgccgagtcgatgaattggcttcacaacatcctgtggaggcaggcagcctcctccttcgaggtccagaattatactgatgccctgcaatggtactattacagccttcggttctattcaaccgatgagatggatctggactttactaaactccagagaaacatggcgtgttgttatcttaatttgcagcaattggacaaggccaaggaggccgtcgccgaagccgaacggcacgatccgaggaacgtgtttacgcaattttacatctttaagattgctgtgatagaaggaaatagtgagcgggctctacaggccatcatcacacttgagaatatccttactgacgaagaatccgaggataacgatctggtggcagagcgaggtagcccaacaatgttgctgtcgcttgctgcccagttcgctcttgagaatggtcaacagatagtagcagaaaaagcactggagtatctggcgcagcattcggaagatcaagagcaagtcctcactgcagtcaagtgtttgctgagattcctgcttcccaagatcgccgagatgcctgaatctgaagataagaaaaaggaaatggaccgcttgctcacatgcttgaatcgtgccttcgtgaaactgtcccagcctttcggcgaagaagccctatcacttgagagtcgcgccaacgaggcacagtggtttagaaaaactgcctggaatttggctgtccagtgtgataaagaccctgtaatgatgagagagtttttcattctgtcgtacaaaatgtctcaattttgtccctccgatcaggtaatcttgatcgctcgaaagacctgcttactgatggctgtcgcggtagatctggagcagggcaggaaggcatcaaccgccttcgagcaaaccatgtttctgtcgagggcattagaggagatccagacctgcaacgacattcacaactttctgaagcagaccggcaccttcagcaacgactcctgcgagaaactcctgctgctgtatgagttcgaggtccgagccaagctgaacgatccactcctagagtcatttctcgaatcagtttgggagttgccacatctggaaaccaaaacttttgaaactatcgcaatcattgctatggaaaagcccgcacattacccactgattgccttaaaggcactgaagaaggcacttctgctgtataagaaggaggaacccatcgacatctctcagtacagcaaatgtatgcacaatctcgtaaacctgagcgtccctgatggtgcgtccaatgtggaactgtgtccactcgaggaggtgtggggctactttgaggatgcattgtcacacatttcacgaacaaaggactaccccgaaatggagatcctgtggcttatggtgaaatcctggaacactggcgtcctgatgttttcccgctccaaatatgcgtcggccgaaaagtggtgcggcctggccctgcggtttctcaatcatctaaccagttttaaggaatcctacgagacccaaatgaatatgctgtattcacagctcgtggaggcattgagtaacaataagggccccgtcttccatgagcacggatattggtctaagtctgactag

SEQ ID NO: 221409 - DNA, 2778 bp, Artificial Sequence
  derived and/or modified sequence
atggacaatgatgacttcttcagcatggactttaaggaggtggtggagaacttagttactaacgacaactctcccaacattcctgaagcgatagaccggttattctccgatatcgcaaatattaatcgcgagagcatggccgaaatcacggacattcagatagaggaaatggctgtgaacctgtggaattgggcattaaccattgggggaggttggttggtcaacgaggagcaaaaaatacggctgcattatgtcgcctgtaagctgctgtcaatgtgcgaggccagttttgctagtgaacaaagcattcagaggctgatcatgatgaatatgagaatcgggaaagagtggttggacgcaggaaattttctgatcgccgacgagtgttttcaagccgctgtcgccagcctggagcaactctatgtcaagctgattcagagaagttcacctgaagcagatctgaccatggaaaagataaccgttgagagcgaccacttcagggtcctgtcatatcaagccgaatcagctgtggcacagggggactttcagagagcctctatgtgtgtgttgcagtgtaaagacatgctgatgcgcttgcctcagatgacaagctctctgcatcacttgtgttataacttcggggtcgagacacagaaaaataataagtatgaggagtctagtttctggttgtctcaaagctatgatatcggaaaaatggataaaaagtctacaggccctgagatgctagcaaaagtactgagactcctggcaacaaactatcttgactgggacgataccaaatactacgataaggcactcaatgcagtgaacctcgcgaacaaggaacacctgtccagccccggactctttctgaagatgaagatcctgctcaaaggcgaaacctcaaacgaggagctactggaagcagtgatggaaattctccatctggatatgcccctagacttttgcctcaacatcgcaaaactgttgatggaccacgaaagggaaagcgtgggatttcacttcctgactattatccatgagagattcaaatccagcgagaatatcggtaaagtcttgattctgcacacagacatgctattacagcgcaaagaagagctcctcgcaaaggagaaaatcgaggagatcttcctggcccatcagacaggcaggcagttaacagccgaatccatgaactggctgcataacatcctttggcgtcaggccgcttcttcattcgaggtgcaaaactacacggatgccttgcaatggtattattactccctcagattttactcaaccgacgagatggacttagatttcactaagctccagcggaacatggcctgctgctatctaaacctacaacagcttgacaaagccaaggaggccgttgcggaggcggagcgtcacgatcccagaaacgtgttcacccagttctacatttttaagatagccgtcattgaggggaactctgagagagccctgcaggctataatcaccctggaaaacattcttactgatgaagaatcagaagacaatgacctcgtcgcagagagagggtctcctactatgcttttgagtctcgcagcacagttcgcccttgagaatggacagcagatcgtggcagagaaagccctggaatacctggctcagcatagcgaagatcaggagcaggtgttgaccgccgtcaaatgcttgcttcgctttttgctccctaagatagctgaaatgcccgaatcagaagataaaaaaaaagaaatggacaggctgcttacttgtctaaaccgggcattcgtgaagcttagtcagccttttggcgaggaggcgctttcactcgagtccagggccaatgaagctcagtggtttaggaaaacggcttggaacctagcagtccagtgtgacaaggatcccgttatgatgcgagagtttttcatactttcttataagatgtcccagttctgcccatcagatcaggtgattctgatcgcgaggaagacttgcctgttaatggctgtcgccgtcgacttagaacagggccgaaaggccagcacagctttcgagcaaaccatgtttctgtccagagcactggaggaaatacagacatgtaacgatatccataacttcctcaagcagactgggaccttttccaacgactcttgcgagaaactccttctcctgtacgaatttgaggtccgagccaaactcaatgatccgctgttggaatcttttcttgaaagcgtctgggagttacctcatctagagaccaagaccttcgagacgatcgcgatcatagccatggaaaagcctgcccactacccacttattgccttgaaggctttaaagaaggccctgcttctgtacaagaaagaggagccaatagacatcagccagtactcgaagtgtatgcataacctcgtgaacctctctgtcccagatggggctagcaatgtggagctgtgccctctggaagaggtctggggctactttgaggatgcgttgtcccacatttcaagaacaaaagactaccccgagatggagatattgtggctgatggtcaaaagttggaataccggtgttttaatgttctctcgatctaaatatgcctctgcagaaaagtggtgtggcctcgcgttaagattcctgaaccacttaacatccttcaaagagtcctacgagacccagatgaatatgctctatagccagctggtggaagcactgtcgaacaataaggggcctgtcttccacgagcacggctactggtctaagtcggactag

SEQ ID NO: 221410 - DNA, 3032 bp, Artificial Sequence
  derived and/or modified sequence
ggagttttctgaacgtcctcgtgcgctgtggacggaggttgtggagagagcagggcggcattggtggctgcggctgaggcttgagccagagatttaaaaatggacaatgatgattttttttccatggactttaaagaagttgttgaaaacctggttacaaatgataattcacctaacataccagaggcaattgatagactcttcagcgacatagcaaatatcaacagggagtctatggctgaaataacagacattcagattgaagaaatggcagtaaacctatggaactgggcacttaccataggaggaggttggcttgtaaatgaagagcagaaaattagattacattatgttgcttgcaagttgctgagtatgtgtgaagcctcatttgcctcagaacaaagtattcaacgactgattatgatgaatatgagaataggaaaagaatggttggatgctggaaattttctaatcgctgatgaatgttttcaagctgctgtggccagtctggagcaattatacgtcaaattaattcaaaggagctcccctgaggctgacttgaccatggagaagattactgttgagagtgaccacttcagagtgctttcttaccaagcagagtcagcagttgctcaaggggattttcaaagagcatctatgtgtgtactgcaatgtaaagatatgttgatgaggctcccccagatgacttcaagtcttcatcatctctgttacaactttggagtagaaacccagaagaataataaatatgaagaaagttctttctggcttagccaaagctatgatattgggaagatggataagaaatctactgggccagaaatgctggctaaagttctacggctattagccacgaattatttggattgggatgacaccaaatattatgataaggctctcaatgctgtaaacctagcaaacaaggaacatttaagttctcctgggcttttcttaaaaatgaaaatcctcttgaaaggcgaaacatctaatgaagaactccttgaagctgtcatggaaatactacatcttgacatgcccttagacttctgtctgaacattgctaaactgctgatggatcatgaaagagaatctgttgggtttcatttcctgacgattattcatgaacgttttaagtcatcggaaaatattggaaaagttctgatactccatactgacatgcttttacaaaggaaggaagaacttcttgccaaggagaagattgaagaaatctttttagctcaccaaacaggaagacaactgacagcagaatcaatgaactggttacacaacattctgtggagacaagctgccagtagttttgaggtacaaaattacactgatgccctacaatggtactattattctctgaggttttattcaactgatgaaatggatctggacttcaccaagctgcagaggaacatggcttgctgttacctgaatttgcaacaacttgataaggccaaagaggcagtggcagaagctgaacgacatgaccctaggaacgttttcactcaattttatatattcaagattgcagtcatagagggcaactctgaaagagctttgcaggcaataattactttagagaatatattaacagatgaagagtcagaagataatgatctagttgcagagagaggttcacctaccatgcttctaagtttagctgcccagtttgctctagagaatggacaacaaattgtggcagaaaaagctttggaatatttagctcaacattcagaagaccaggaacaagttcttacagctgtaaagtgtttgcttcgttttcttcttccaaaaattgctgaaatgccggaatctgaagataagaagaaagaaatggatcgacttttgacttgcctgaatagagcctttgtgaaactttctcagccttttggtgaagaagccttaagtttggagtcaagagctaatgaagctcagtggtttcgaaaaacagcttggaacttggctgtgcaatgtgacaaagatccagtgatgatgagagagttttttatactttcttataagatgtcccagttttgtccttctgatcaagtaattctgattgcacggaaaacatgtttacttatggcagttgcagttgatctagagcaagggagaaaagcttcaacagcttttgaacagaccatgttcctgagtcgtgcacttgaggagatccagacatgcaatgacatccataatttcctgaaacaaacagggaccttctcaaatgattcatgtgagaaattgcttctgctgtacgagtttgaagttagagccaaattgaatgatccattactggaaagcttcctggaatcagtgtgggagttgcctcatttagaaactaaaacttttgaaacaattgcaataatagcaatggaaaagcctgcacactatcctttgattgctctcaaggccttgaaaaaggctttattgctctacaaaaaggaagaaccaattgatatatcacaatacagcaaatgtatgcacaacttggttaacctctcagtgccagatggggcgtcgaatgtagagctctgtcccctggaagaagtttggggctattttgaagatgctctgagccacattagccgcactaaagactacccagaaatggagattctctggctgatggtcaagtcctggaataccggagtacttatgtttagcaggagcaagtatgcatctgctgaaaagtggtgtggcctggccttgcgtttccttaaccaccttacctccttcaaggaaagctatgaaactcagatgaatatgctgtatagtcagcttgtggaagcattgagtaacaacaagggcccagtttttcatgaacatggctactggagcaagtcagattaggcaagctcatggccacatgaagaagatacattgtcccgagatgctgactgtttaaatttttgccagagtttctcttgagcttttgtttctgtttgctcagaccctgttttcatgttgttgaataaactttctaaaataaaagcatgctgaattta

SEQ ID NO: 221411 - protein, 499 aa, Artificial Sequence
  derived and/or modified sequence
MCELYSKRDTLGLRKKHIGPSCKVFFASDPIKIVRAQRQYMFDENGEQYLDCINNVAHVGHCHPGVVKAALKQMELLNTNSRFLHDNIVEYAKRLSATLPEKLSVCYFTNSGSEANDLALRLARQFRGHQDVITLDHAYHGHLSSLIEISPYKFQKGKDVKKEFVHVAPTPDTYRGKYREDHADSASAYADEVKKIIEDAHNSGRKIAAFIAESMQSCGGQIIPPAGYFQKVAEYVHGAGGVFIADEVQVGFGRVGKHFWSFQMYGEDFVPDIVTMGKPMGNGHPVACVVTTKEIAEAFSSSGMEYFNTYGGNPVSCAVGLAVLDIIENEDLQGNAKRVGNYLTELLKKQKAKHTLIGDIRGIGLFIGIDLVKDHLKRTPATAEAQHIIYKMKEKRVLLSADGPHRNVLKIKPPMCFTEEDAKFMVDQLDRILTVLEEAMGTKTESVTSENTPCKTKMLKEAHIELLRDSTTDSKENPSRKRNGMCTDTHSLLSKRLKT

SEQ ID NO: 221412 - DNA, 1500 bp, Artificial Sequence
  derived and/or modified sequence
atgtgcgagctgtacagcaagagagacaccctgggcctgagaaagaagcacatcggccccagctgcaaggtgttcttcgccagcgaccccatcaagatcgtgagagcccagagacagtacatgttcgacgagaacggcgagcagtacctggactgcatcaacaacgtggcccacgtgggccactgccaccccggcgtggtgaaggccgccctgaagcagatggagctgctgaacaccaacagcagattcctgcacgacaacatcgtggagtacgccaagagactgagcgccaccctgcccgagaagctgagcgtgtgctacttcaccaacagcggcagcgaggccaacgacctggccctgagactggccagacagttcagaggccaccaggacgtgatcaccctggaccacgcctaccacggccacctgagcagcctgatcgagatcagcccctacaagttccagaagggcaaggacgtgaagaaggagttcgtgcacgtggcccccacccccgacacctacagaggcaagtacagagaggaccacgccgacagcgccagcgcctacgccgacgaggtgaagaagatcatcgaggacgcccacaacagcggcagaaagatcgccgccttcatcgccgagagcatgcagagctgcggcggccagatcatcccccccgccggctacttccagaaggtggccgagtacgtgcacggcgccggcggcgtgttcatcgccgacgaggtgcaggtgggcttcggcagagtgggcaagcacttctggagcttccagatgtacggcgaggacttcgtgcccgacatcgtgaccatgggcaagcccatgggcaacggccaccccgtggcctgcgtggtgaccaccaaggagatcgccgaggccttcagcagcagcggcatggagtacttcaacacctacggcggcaaccccgtgagctgcgccgtgggcctggccgtgctggacatcatcgagaacgaggacctgcagggcaacgccaagagagtgggcaactacctgaccgagctgctgaagaagcagaaggccaagcacaccctgatcggcgacatcagaggcatcggcctgttcatcggcatcgacctggtgaaggaccacctgaagagaacccccgccaccgccgaggcccagcacatcatctacaagatgaaggagaagagagtgctgctgagcgccgacggcccccacagaaacgtgctgaagatcaagccccccatgtgcttcaccgaggaggacgccaagttcatggtggaccagctggacagaatcctgaccgtgctggaggaggccatgggcaccaagaccgagagcgtgaccagcgagaacaccccctgcaagaccaagatgctgaaggaggcccacatcgagctgctgagagacagcaccaccgacagcaaggagaaccccagcagaaagagaaacggcatgtgcaccgacacccacagcctgctgagcaagagactgaagacctag

SEQ ID NO: 221413 - DNA, 1500 bp, Artificial Sequence
  derived and/or modified sequence
atgtgcgagctctactctaagagagatacattgggcctgcgcaaaaaacatattgggcccagttgcaaagtcttctttgcctcagatccaataaagattgtgagagcccagagacagtacatgttcgatgaaaacggagagcaatatctagactgcattaacaatgtcgctcatgtcggacactgccatcccggcgtggtgaaggcggccctaaaacagatggaacttttgaacacaaactctaggttcctccatgataacatcgtggaatacgctaaacgcctcagcgctactctgccagaaaaattatctgtttgctatttcaccaattccggaagcgaagccaatgatctcgctttgcgcctggctagacaatttcgcgggcatcaagatgtaataaccctggaccacgcctatcatggacatttgtcctcattgattgaaatatctccctataagttccagaaaggcaaggacgtgaaaaaggagtttgtccacgtcgcccccacccctgatacctataggggaaaatatagggaagaccatgccgacagtgccagtgcttacgctgatgaagtaaaaaaaataattgaagatgcccacaactccgggcgaaagattgctgctttcatcgctgagtccatgcagtcttgcggcgggcaaatcatcccacccgccgggtatttccagaaagttgcagaatacgtccacggagccggaggggtctttattgcggacgaggtgcaggtgggtttcggccgagtagggaaacatttttggtcttttcagatgtacggggaggatttcgtgccagatatcgtaacaatgggaaagccaatgggcaatggccaccccgtggcctgtgttgtgacaacgaaggagatcgcagaagccttcagtagttcgggcatggaatactttaatacatacggtggtaaccccgtctcatgcgctgtgggcctcgcggttctggacatcatcgagaacgaagacctccaggggaatgctaagagggtcggcaactatctcacagaattactgaagaaacagaaggcaaagcacacactcattggggacattcgaggcataggtctgtttataggaatcgacttagtgaaggatcatcttaagcggacgccagcaacggcggaggcccagcatataatttacaagatgaaagaaaaacgcgtcctactatccgccgacggcccacatcgtaatgtattgaagatcaagccgcccatgtgttttaccgaggaagatgcaaagtttatggtggaccaattggaccggatcctcaccgtgctcgaagaagccatgggtacaaaaacggagtccgtcacctctgagaacaccccatgcaagaccaaaatgctgaaggaagcccatattgaactcctgagagactctacgacggatagtaaggaaaatccgtcacggaaaagaaatgggatgtgcaccgacacccatagccttcttagcaaacggttgaagacatag

SEQ ID NO: 221414 - DNA, 1500 bp, Artificial Sequence
  derived and/or modified sequence
atgtgtgagctgtacagcaagagggacaccctgggcctgaggaagaagcacatcggccccagctgcaaggtgttctttgccagtgaccccatcaagatcgtgcgggcccagaggcagtacatgtttgatgaaaatggagagcagtacctggactgcatcaacaacgtggcccacgtgggccactgccaccctggggtggtgaaggccgccctgaagcagatggagctgctgaacaccaacagccgcttcctgcatgacaacatcgtggagtatgccaagaggctgagcgccaccctgcctgagaagctgtctgtgtgctacttcaccaacagcggcagcgaggccaatgacctggccctgcggctggcccggcagttccggggccaccaggatgtgatcaccctggaccacgcctaccacggccacctgagcagcctgattgagatcagcccctacaagttccagaagggcaaggatgtgaagaaggagtttgtgcacgtggcccccaccccagacacctaccggggcaagtaccgggaggaccatgctgacagcgccagcgcctatgcagatgaggtgaagaagatcattgaagatgcccacaacagcggcaggaagattgctgccttcatcgccgagagcatgcagagctgtggcggccagatcatccccccagctggctacttccagaaggtggccgagtatgtgcatggagctggaggagtcttcatcgcagatgaggtgcaggtgggcttcggccgggtgggcaagcacttctggagcttccagatgtatggagaagattttgtgcctgacatcgtgaccatgggcaagcccatgggaaatggccaccctgtggcctgtgtggtgaccaccaaggagattgctgaggccttcagcagcagcggcatggagtacttcaacacctacggcggcaaccctgtgtcctgtgctgtgggcctggccgtgctggacatcattgaaaatgaagacctgcagggcaatgccaagagggtgggcaactacctgacagagctgctgaagaagcagaaggccaagcacaccctgattggagacatccggggcatcggcctcttcatcggcatcgacctggtgaaggaccacctgaagaggaccccagccacagctgaggcccagcacatcatctacaagatgaaggagaagagggtgctgctgtctgcagatggcccccacagaaatgtgctgaagatcaagccacccatgtgcttcacagaggaggatgccaagttcatggtggaccagctggaccgcatcctgactgtgctggaggaggccatgggcaccaagacagagagcgtgaccagcgagaacaccccctgcaagaccaagatgctgaaggaggcccacatcgagctgctgcgggacagcaccacagacagcaaggagaaccccagcaggaagagaaatggcatgtgcacagacacccacagcctgctgagcaagaggctgaagacctag

SEQ ID NO: 221415 - DNA, 2099 bp, Artificial Sequence
  derived and/or modified sequence
acgccaccggtgacctccgacgccccgggcaagagaacgccaggagggataacgggaggaaggccggccggggccgccaaggcagtcccaggctcgcgtaggaggcgcgcagaccttgcaccttgcaccttcgcagcgccctgcaccccgccaccatgtgcgagctgtacagtaagcgggacactctggggctgaggaagaagcacatcgggccctcatgcaaagttttctttgcatcggatcccatcaaaatagtgagagcccagaggcagtacatgtttgatgagaacggtgaacagtacttggactgcatcaacaatgttgcccatgtgggacactgtcacccaggagtggtcaaagctgccctgaaacagatggaactgctaaatacaaattctcgattcctccacgacaacattgttgagtatgccaaacgcctttcagcaactctgccggagaaactctctgtttgttattttacaaattcaggatccgaagccaacgacttagccttacgcctggctcggcagttcagaggccaccaggatgtgatcactcttgaccatgcttaccatggtcacctatcatccttaattgagattagcccatataagtttcagaaaggaaaagatgtcaaaaaagaatttgtacatgtggcaccaactccagatacttacagaggaaaatatagagaagaccatgcagactcagccagtgcttatgcagatgaagtgaagaaaatcattgaagatgctcataacagtggaaggaagattgctgcctttattgctgaatccatgcagagttgtggcggacaaataattcctccagcaggctacttccagaaagtggcagaatatgtacacggtgcagggggtgtgtttatagctgatgaagttcaagtgggctttggcagagttgggaaacatttctggagcttccagatgtatggtgaagactttgttccagacatcgtcacaatgggaaaaccgatgggcaacggccacccggtggcatgtgtggtaacaaccaaagaaattgcagaagccttcagcagctctgggatggaatattttaatacgtatggaggaaatccagtatcttgtgctgttggtttggctgtcctggatataattgaaaatgaagaccttcaaggaaatgccaagagagtagggaattatctcactgagttactgaaaaaacagaaggctaaacacactttgataggagatattaggggcattggcctttttattggaattgatttagtgaaggaccatctgaaaaggacccctgccacagctgaagctcagcacatcatctacaagatgaaagaaaaacgagtgcttctcagtgccgatggacctcatagaaatgtacttaaaataaaaccacctatgtgcttcactgaagaagatgcaaagttcatggtggaccaacttgataggattctaacagttttagaagaagctatgggaaccaaaaccgaaagtgtgacctctgagaatactccatgcaaaacaaagatgctgaaagaagcccacatagaactgcttagggacagcaccactgactccaaagaaaatcccagcagaaagagaaatggaatgtgcacggatacacattcactgctcagtaagaggctcaagacatgactgatttgcattttaaagcaagatgcgatgtccagagttacagagaatgagtagatgtgtctcatcggttaatagctctattatacctctaaaggtggaattgtcagtttagattcataaatgaaaaggtaaatgagtaatcagaataaaccaagtgataatcaaaccatgtcaagattattagttcagactctagcctgttaattttcttagttgatttctgaagctacctgatttattctattaaattgtaagcttgcaaactcaaaataaattggcagatttacctctcatgttttaatgtgtcaaattagagagcaaagtataacaggtgccttcacttttgagacttagtgccttaaaatatgtattctataatgatttcatatataaaagtatatttattgactgtaataaaataaaatatgatgtaaacaaaaaaaa

SEQ ID NO: 221416 - DNA, 1500 bp, Artificial Sequence
  derived and/or modified sequence
atgtgcgagctgtacagcaagcgggacaccctgggcctgcggaagaagcacattggtccctcatgcaaggtcttttttgcctccgatcctattaagattgtgagggcccagcgtcagtatatgttcgatgagaacggggaacagtacctagattgtattaacaatgtggctcatgtgggccattgtcatcctggggtcgtgaaggcggcattaaagcaaatggagctcctgaacacaaactcccgattcctacacgataatatagtggaatatgctaagcggctgtctgcaacactgcccgagaagttaagtgtttgctattttacaaatagtggtagcgaggccaatgacctggcactaaggctcgctcggcaattcagaggtcatcaggacgtgatcactcttgatcatgcctaccatggccacctctcctcattaatcgaaatcagcccatacaaattccagaagggaaaggacgtgaagaaagaattcgtccatgtggcccccaccccggatacgtatagaggaaaataccgggaagaccatgcagattccgcctcagcttacgctgacgaggtcaagaagatcatcgaggacgcacataactcaggccgcaagatcgctgcctttatcgccgagtcaatgcagtcatgcggtgggcagattatcccacccgccggctacttccagaaggtggcagaatatgtgcacggcgctggcggagtgttcattgccgacgaagtacaagtagggttcggacgggtaggcaagcatttttggagcttccagatgtatggggaagacttcgtgccggatatcgtaaccatgggaaaaccaatggggaatggtcatccagtggcctgtgtcgtgacaacaaaagaaatcgctgaagctttcagtagctccggtatggagtattttaacacttacggcgggaatcctgtctcgtgcgcggttgggctggcagttctggacatcatcgagaatgaggatcttcaaggcaatgcaaaacgagtcgggaactatctgactgagctgttaaaaaagcaaaaggccaaacataccctgattggggatatcaggggaattggccttttcataggaatcgacctagttaaagaccatttgaaacggaccccggcaaccgccgaggcccagcacattatctataagatgaaggagaagcgggtgctactgtcagctgacggaccccatagaaacgtcctaaagattaagcctccgatgtgcttcaccgaggaagacgctaagttcatggttgaccaattggataggattctgacggtgctggaggaagccatgggcactaaaacagagtcagtcacgtcagaaaacactccttgcaagacaaaaatgctgaaagaagcccacatcgagctgcttcgggactcaactacagactcgaaggagaaccctagcaggaagcgcaatggcatgtgcacggacacgcattcactcctgtcaaagcgcctcaaaacgtag

SEQ ID NO: 221417 - DNA, 1500 bp, Artificial Sequence
  derived and/or modified sequence
atgtgtgaactgtattccaaacgggacaccctgggactccggaaaaaacatataggcccttcttgtaaagtgttttttgcttctgaccccattaagatcgtgcgggctcagcggcagtacatgttcgatgaaaacggtgagcagtatcttgactgtattaacaatgtggcacacgttggccactgtcatcctggcgttgttaaagccgcactgaagcagatggaactcctcaatacaaactccaggttccttcacgacaatatcgtggaatacgcgaagaggctctcagccaccttaccagagaagctgtccgtttgctacttcacgaactccgggagtgaagcaaatgacctggctctacgtctggctaggcagtttcggggacatcaggacgtgataactctcgaccatgcctaccatggccacctgtccagtctgattgaaattagcccctacaagttccagaaagggaaagatgttaagaaagaattcgtgcatgtggcacctactccagacacgtatcggggtaaatatcgcgaggaccacgccgattccgccagcgcctacgcagatgaggtgaagaagattattgaggatgcacacaacagtgggagaaagatcgcagcgttcatcgcagagtccatgcagagctgtgggggtcagattataccacccgcaggctatttccaaaaagttgctgagtatgttcatggtgctgggggagtcttcattgctgatgaggtccaggtgggttttggcagagtcggcaagcacttctggtcattccagatgtatggggaggatttcgtccccgatatagtgaccatgggcaagcccatgggcaacgggcaccccgtggcttgcgtagtgaccaccaaggagatcgccgaggccttctccagtagcgggatggagtactttaatacgtacggcggtaatcctgtaagctgcgctgttggtcttgcagtattggatatcattgagaatgaggacctgcagggcaacgccaaaagagtggggaattacctcacagaactcctcaaaaagcagaaagccaagcacacactcataggcgacatacgcggaattgggttatttatcgggatagacctggttaaggaccatctcaaacgcacacccgctacagctgaagctcagcacatcatttacaaaatgaaggagaagcgtgtgttgcttagcgcagacgggccacatagaaacgtactgaaaattaaaccaccaatgtgcttcacggaagaggatgccaaattcatggtcgaccagctcgatagaatactaactgtgctagaagaagctatggggacaaaaaccgagtctgttacctccgaaaatacaccatgtaagactaaaatgctgaaagaggcccatatcgagctgctgagagattccactacagatagtaaagagaatccaagccggaaacggaatggaatgtgcactgacacacacagtcttctttctaagcgcctcaagacatag

SEQ ID NO: 221418 - protein, 977 aa, Artificial Sequence
  derived and/or modified sequence
MLLWVILLVLVPSPGQFPRTPRPIIFLQPPWTTVFQGERVTLTCKGFRFYSPQKTKWYHRYLGKEILRETPDNILEVQESGEYRCQAQGSPLSSPVHLDFSSASLILQAPLSVFEGDSVVLRCRAKAEVTLNNTIYKNDNVLAFLNKRTDFHIPHACLKDNGAYRCTGYKESCCPVSSNTVKIQVQEPFTRPVLRASSFQPISGNPVTLTCETQLSLERSDVPLRFRFFRDDQTLGLGWSLSPNFQITAMWSKDSGFYWCKAATMPYSVISDSPRSWIQVQIPASHPVLTLSPEKALNFEGTKVTLHCETQEDSLRTLYRFYHEGVPLRHKSVRCERGASISFSLTTENSGNYYCTADNGLGAKPSKAVSLSVTVPVSHPVLNLSSPEDLIFEGAKVTLHCEAQRGSLPILYQFHHEGAALERRSANSAGGVAISFSLTAEHSGNYYCTADNGFGPQRSKAVSLSVTVPVSHPVLTLSSAEALTFEGATVTLHCEVQRGSPQILYQFYHEDMPLWSSSTPSVGRVSFSFSLTEGHSGNYYCTADNGFGPQRSEVVSLFVTVPVSRPILTLRVPRAQAVVGDLLELHCEAPRGSPPILYWFYHEDVTLGSSSAPSGGEASFNLSLTAEHSGNYSCEANNGLVAQHSDTISLSVIVPVSRPILTFRAPRAQAVVGDLLELHCEALRGSSPILYWFYHEDVTLGKISAPSGGGASFNLSLTTEHSGIYSCEADNGLEAQRSEMVTLKVAVPVSRPVLTLRAPGTHAAVGDLLELHCEALRGSPLILYRFFHEDVTLGNRSSPSGGASLNLSLTAEHSGNYSCEADNGLGAQRSETVTLYITGLTANRSGPFATGVAGGLLSIAGLAAGALLLYCWLSRKAGRKPASDPARSPSDSDSQEPTYHNVPAWEELQPVYTNANPRGENVVYSEVRIIQEKKKHAVASDPRHLRNKGSPIIYSEVKVASTPVSGSLFLASSAPHR

SEQ ID NO: 221419 - protein, 977 aa, Artificial Sequence
  derived and/or modified sequence
MLLWVILLVLAPVSGQFARTPRPIIFLQPPWTTVFQGERVTLTCKGFRFYSPQKTKWYHRYLGKEILRETPDNILEVQESGEYRCQAQGSPLSSPVHLDFSSASLILQAPLSVFEGDSVVLRCRAKAEVTLNNTIYKNDNVLAFLNKRTDFHIPHACLKDNGAYRCTGYKESCCPVSSNTVKIQVQEPFTRPVLRASSFQPISGNPVTLTCETQLSLERSDVPLRFRFFRDDQTLGLGWSLSPNFQITAMWSKDSGFYWCKAATMPYSVISDSPRSWIQVQIPASHPVLTLSPEKALNFEGTKVTLHCETQEDSLRTLYRFYHEGVPLRHKSVRCERGASISFSLTTENSGNYYCTADNGLGAKPSKAVSLSVTVPVSHPVLNLSSPEDLIFEGAKVTLHCEAQRGSLPILYQFHHEGAALERRSANSAGGVAISFSLTAEHSGNYYCTADNGFGPQRSKAVSLSVTVPVSHPVLTLSSAEALTFEGATVTLHCEVQRGSPQILYQFYHEDMPLWSSSTPSVGRVSFSFSLTEGHSGNYYCTADNGFGPQRSEVVSLFVTVPVSRPILTLRVPRAQAVVGDLLELHCEAPRGSPPILYWFYHEDVTLGSSSAPSGGEASFNLSLTAEHSGNYSCEANNGLVAQHSDTISLSVIVPVSRPILTFRAPRAQAVVGDLLELHCEALRGSSPILYWFYHEDVTLGKISAPSGGGASFNLSLTTEHSGIYSCEADNGLEAQRSEMVTLKVAVPVSRPVLTLRAPGTHAAVGDLLELHCEALRGSPLILYRFFHEDVTLGNRSSPSGGASLNLSLTAEHSGNYSCEADNGLGAQRSETVTLYITGLTANRSGPFATGVAGGLLSIAGLAAGALLLYCWLSRKAGRKPASDPARSPSDSDSQEPTYHNVPAWEELQPVYTNANPRGENVVYSEVRIIQEKKKHAVASDPRHLRNKGSPIIYSEVKVASTPVSGSLFLASSAPHR

SEQ ID NO: 221420 - protein, 124 aa, Artificial Sequence
  derived and/or modified sequence
MLLWVILLVLAPVSGQFARTPRPIIFLQPPWTTVFQGERVTLTCKGFRFYSPQKTKWYHRYLGKEILRETPDNILEVQESGEYRCQAQGSPLSSPVHLDFSSEMGFPHAAQANVELLGSSDLLT

SEQ ID NO: 221421 - protein, 592 aa, Artificial Sequence
  derived and/or modified sequence
MLLWVILLVLAPVSGQFARTPRPIIFLQPPWTTVFQGERVTLTCKGFRFYSPQKTKWYHRYLGKEILRETPDNILEVQESGEYRCQAQGSPLSSPVHLDFSSASLILQAPLSVFEGDSVVLRCRAKAEVTLNNTIYKNDNVLAFLNKRTDFHIPHACLKDNGAYRCTGYKESCCPVSSNTVKIQVQEPFTRPVLRASSFQPISGNPVTLTCETQLSLERSDVPLRFRFFRDDQTLGLGWSLSPNFQITAMWSKDSGFYWCKAATMPYSVISDSPRSWIQVQIPASHPVLTLSPEKALNFEGTKVTLHCETQEDSLRTLYRFYHEGVPLRHKSVRCERGASISFSLTTENSGNYYCTADNGLGAKPSKAVSLSVTVPVSHPVLNLSSPEDLIFEGAKVTLHCEAQRGSLPILYQFHHEGAALERRSANSAGGVAISFSLTAEHSGNYYCTADNGFGPQRSKAVSLSVTVPVSHPVLTLSSAEALTFEGATVTLHCEVQRGSPQILYQFYHEDMPLWSSSTPSVGRVSFSFSLTEGHSGNYYCTADNGFGPQRSEVVSLFVTGKCWVLASHPPLAEFSLTHSFKNLFALSSFLP

SEQ ID NO: 221422 - protein, 759 aa, Artificial Sequence
  derived and/or modified sequence
MLLWVILLVLAPVSGQFARTPRPIIFLQPPWTTVFQGERVTLTCKGFRFYSPQKTKWYHRYLGKEILRETPDNILEVQESGEYRCQAQGSPLSSPVHLDFSSASLILQAPLSVFEGDSVVLRCRAKAEVTLNNTIYKNDNVLAFLNKRTDFHIPHACLKDNGAYRCTGYKESCCPVSSNTVKIQVQEPFTRPVLRASSFQPISGNPVTLTCETQLSLERSDVPLRFRFFRDDQTLGLGWSLSPNFQITAMWSKDSGFYWCKAATMPYSVISDSPRSWIQVQIPASHPVLTLSPEKALNFEGTKVTLHCETQEDSLRTLYRFYHEGVPLRHKSVRCERGASISFSLTTENSGNYYCTADNGLGAKPSKAVSLSVTVPVSHPVLNLSSPEDLIFEGAKVTLHCEAQRGSLPILYQFHHEGAALERRSANSAGGVAISFSLTAEHSGNYYCTADNGFGPQRSKAVSLSVTVPVSHPVLTLSSAEALTFEGATVTLHCEVQRGSPQILYQFYHEDMPLWSSSTPSVGRVSFSFSLTEGHSGNYYCTADNGFGPQRSEVVSLFVTVPVSRPILTLRVPRAQAVVGDLLELHCEAPRGSPPILYWFYHEDVTLGSSSAPSGGEASFNLSLTAEHSGNYSCEANNGLVAQHSDTISLSVIVPVSRPILTFRAPRAQAVVGDLLELHCEALRGSSPILYWFYHEDVTLGKISAPSGGGASFNLSLTTEHSGIYSCEADNGLEAQRSEMVTLKVAGEWALPTSSTSEN

SEQ ID NO: 221423 - DNA, 2934 bp, Artificial Sequence
  derived and/or modified sequence
atgctgctgtgggtgatcctgctggtgctggtgcccagccccggccagttccccagaacccccagacccatcatcttcctgcagcccccctggaccaccgtgttccagggcgagagagtgaccctgacctgcaagggcttcagattctacagcccccagaagaccaagtggtaccacagatacctgggcaaggagatcctgagagagacccccgacaacatcctggaggtgcaggagagcggcgagtacagatgccaggcccagggcagccccctgagcagccccgtgcacctggacttcagcagcgccagcctgatcctgcaggcccccctgagcgtgttcgagggcgacagcgtggtgctgagatgcagagccaaggccgaggtgaccctgaacaacaccatctacaagaacgacaacgtgctggccttcctgaacaagagaaccgacttccacatcccccacgcctgcctgaaggacaacggcgcctacagatgcaccggctacaaggagagctgctgccccgtgagcagcaacaccgtgaagatccaggtgcaggagcccttcaccagacccgtgctgagagccagcagcttccagcccatcagcggcaaccccgtgaccctgacctgcgagacccagctgagcctggagagaagcgacgtgcccctgagattcagattcttcagagacgaccagaccctgggcctgggctggagcctgagccccaacttccagatcaccgccatgtggagcaaggacagcggcttctactggtgcaaggccgccaccatgccctacagcgtgatcagcgacagccccagaagctggatccaggtgcagatccccgccagccaccccgtgctgaccctgagccccgagaaggccctgaacttcgagggcaccaaggtgaccctgcactgcgagacccaggaggacagcctgagaaccctgtacagattctaccacgagggcgtgcccctgagacacaagagcgtgagatgcgagagaggcgccagcatcagcttcagcctgaccaccgagaacagcggcaactactactgcaccgccgacaacggcctgggcgccaagcccagcaaggccgtgagcctgagcgtgaccgtgcccgtgagccaccccgtgctgaacctgagcagccccgaggacctgatcttcgagggcgccaaggtgaccctgcactgcgaggcccagagaggcagcctgcccatcctgtaccagttccaccacgagggcgccgccctggagagaagaagcgccaacagcgccggcggcgtggccatcagcttcagcctgaccgccgagcacagcggcaactactactgcaccgccgacaacggcttcggcccccagagaagcaaggccgtgagcctgagcgtgaccgtgcccgtgagccaccccgtgctgaccctgagcagcgccgaggccctgaccttcgagggcgccaccgtgaccctgcactgcgaggtgcagagaggcagcccccagatcctgtaccagttctaccacgaggacatgcccctgtggagcagcagcacccccagcgtgggcagagtgagcttcagcttcagcctgaccgagggccacagcggcaactactactgcaccgccgacaacggcttcggcccccagagaagcgaggtggtgagcctgttcgtgaccgtgcccgtgagcagacccatcctgaccctgagagtgcccagagcccaggccgtggtgggcgacctgctggagctgcactgcgaggcccccagaggcagcccccccatcctgtactggttctaccacgaggacgtgaccctgggcagcagcagcgcccccagcggcggcgaggccagcttcaacctgagcctgaccgccgagcacagcggcaactacagctgcgaggccaacaacggcctggtggcccagcacagcgacaccatcagcctgagcgtgatcgtgcccgtgagcagacccatcctgaccttcagagcccccagagcccaggccgtggtgggcgacctgctggagctgcactgcgaggccctgagaggcagcagccccatcctgtactggttctaccacgaggacgtgaccctgggcaagatcagcgcccccagcggcggcggcgccagcttcaacctgagcctgaccaccgagcacagcggcatctacagctgcgaggccgacaacggcctggaggcccagagaagcgagatggtgaccctgaaggtggccgtgcccgtgagcagacccgtgctgaccctgagagcccccggcacccacgccgccgtgggcgacctgctggagctgcactgcgaggccctgagaggcagccccctgatcctgtacagattcttccacgaggacgtgaccctgggcaacagaagcagccccagcggcggcgccagcctgaacctgagcctgaccgccgagcacagcggcaactacagctgcgaggccgacaacggcctgggcgcccagagaagcgagaccgtgaccctgtacatcaccggcctgaccgccaacagaagcggccccttcgccaccggcgtggccggcggcctgctgagcatcgccggcctggccgccggcgccctgctgctgtactgctggctgagcagaaaggccggcagaaagcccgccagcgaccccgccagaagccccagcgacagcgacagccaggagcccacctaccacaacgtgcccgcctgggaggagctgcagcccgtgtacaccaacgccaaccccagaggcgagaacgtggtgtacagcgaggtgagaatcatccaggagaagaagaagcacgccgtggccagcgaccccagacacctgagaaacaagggcagccccatcatctacagcgaggtgaaggtggccagcacccccgtgagcggcagcctgttcctggccagcagcgccccccacagatag

SEQ ID NO: 221424 - DNA, 2934 bp, Artificial Sequence
  derived and/or modified sequence
atgctgctgtgggtgatcctgctggtgctggcccccgtgagcggccagttcgccagaacccccagacccatcatcttcctgcagcccccctggaccaccgtgttccagggcgagagagtgaccctgacctgcaagggcttcagattctacagcccccagaagaccaagtggtaccacagatacctgggcaaggagatcctgagagagacccccgacaacatcctggaggtgcaggagagcggcgagtacagatgccaggcccagggcagccccctgagcagccccgtgcacctggacttcagcagcgccagcctgatcctgcaggcccccctgagcgtgttcgagggcgacagcgtggtgctgagatgcagagccaaggccgaggtgaccctgaacaacaccatctacaagaacgacaacgtgctggccttcctgaacaagagaaccgacttccacatcccccacgcctgcctgaaggacaacggcgcctacagatgcaccggctacaaggagagctgctgccccgtgagcagcaacaccgtgaagatccaggtgcaggagcccttcaccagacccgtgctgagagccagcagcttccagcccatcagcggcaaccccgtgaccctgacctgcgagacccagctgagcctggagagaagcgacgtgcccctgagattcagattcttcagagacgaccagaccctgggcctgggctggagcctgagccccaacttccagatcaccgccatgtggagcaaggacagcggcttctactggtgcaaggccgccaccatgccctacagcgtgatcagcgacagccccagaagctggatccaggtgcagatccccgccagccaccccgtgctgaccctgagccccgagaaggccctgaacttcgagggcaccaaggtgaccctgcactgcgagacccaggaggacagcctgagaaccctgtacagattctaccacgagggcgtgcccctgagacacaagagcgtgagatgcgagagaggcgccagcatcagcttcagcctgaccaccgagaacagcggcaactactactgcaccgccgacaacggcctgggcgccaagcccagcaaggccgtgagcctgagcgtgaccgtgcccgtgagccaccccgtgctgaacctgagcagccccgaggacctgatcttcgagggcgccaaggtgaccctgcactgcgaggcccagagaggcagcctgcccatcctgtaccagttccaccacgagggcgccgccctggagagaagaagcgccaacagcgccggcggcgtggccatcagcttcagcctgaccgccgagcacagcggcaactactactgcaccgccgacaacggcttcggcccccagagaagcaaggccgtgagcctgagcgtgaccgtgcccgtgagccaccccgtgctgaccctgagcagcgccgaggccctgaccttcgagggcgccaccgtgaccctgcactgcgaggtgcagagaggcagcccccagatcctgtaccagttctaccacgaggacatgcccctgtggagcagcagcacccccagcgtgggcagagtgagcttcagcttcagcctgaccgagggccacagcggcaactactactgcaccgccgacaacggcttcggcccccagagaagcgaggtggtgagcctgttcgtgaccgtgcccgtgagcagacccatcctgaccctgagagtgcccagagcccaggccgtggtgggcgacctgctggagctgcactgcgaggcccccagaggcagcccccccatcctgtactggttctaccacgaggacgtgaccctgggcagcagcagcgcccccagcggcggcgaggccagcttcaacctgagcctgaccgccgagcacagcggcaactacagctgcgaggccaacaacggcctggtggcccagcacagcgacaccatcagcctgagcgtgatcgtgcccgtgagcagacccatcctgaccttcagagcccccagagcccaggccgtggtgggcgacctgctggagctgcactgcgaggccctgagaggcagcagccccatcctgtactggttctaccacgaggacgtgaccctgggcaagatcagcgcccccagcggcggcggcgccagcttcaacctgagcctgaccaccgagcacagcggcatctacagctgcgaggccgacaacggcctggaggcccagagaagcgagatggtgaccctgaaggtggccgtgcccgtgagcagacccgtgctgaccctgagagcccccggcacccacgccgccgtgggcgacctgctggagctgcactgcgaggccctgagaggcagccccctgatcctgtacagattcttccacgaggacgtgaccctgggcaacagaagcagccccagcggcggcgccagcctgaacctgagcctgaccgccgagcacagcggcaactacagctgcgaggccgacaacggcctgggcgcccagagaagcgagaccgtgaccctgtacatcaccggcctgaccgccaacagaagcggccccttcgccaccggcgtggccggcggcctgctgagcatcgccggcctggccgccggcgccctgctgctgtactgctggctgagcagaaaggccggcagaaagcccgccagcgaccccgccagaagccccagcgacagcgacagccaggagcccacctaccacaacgtgcccgcctgggaggagctgcagcccgtgtacaccaacgccaaccccagaggcgagaacgtggtgtacagcgaggtgagaatcatccaggagaagaagaagcacgccgtggccagcgaccccagacacctgagaaacaagggcagccccatcatctacagcgaggtgaaggtggccagcacccccgtgagcggcagcctgttcctggccagcagcgccccccacagatag

SEQ ID NO: 221425 - DNA, 3386 bp, Artificial Sequence
  derived and/or modified sequence
atctcagcccttggtggtccaggtcttcatgctgctgtgggtgatattactggtcctggtgccatcccctgggcaatttccaaggacacccaggcccattattttcctccagcctccatggaccacagtcttccaaggagagagagtgaccctcacttgcaagggatttcgcttctactcaccacagaaaacaaaatggtaccatcggtaccttgggaaagaaatactaagagaaaccccagacaatatccttgaggttcaggaatctggagagtacagatgccaggcccagggctcccctctcagtagccctgtgcacttggatttttcttcagcttcgctgatcctgcaagctccactttctgtgtttgaaggagactctgtggttctgaggtgccgggcaaaggcggaagtaacactgaataatactatttacaagaatgataatgtcctggcattccttaataaaagaactgacttccatattcctcatgcatgtctcaaggacaatggtgcatatcgctgtactggatataaggaaagttgttgccctgtttcttccaatacagtcaaaatccaagtccaagagccatttacacgtccagtgctgagagccagctccttccagcccatcagcgggaacccagtgaccctgacctgtgagacccagctctctctagagaggtcagatgtcccgctccggttccgcttcttcagagatgaccagaccctgggattaggctggagtctctccccgaatttccagattactgccatgtggagtaaagattcagggttctactggtgtaaggcagcaacaatgccttacagcgtcatatctgacagcccgagatcctggatacaggtgcagatccctgcatctcatcctgtcctcactctcagccctgaaaaggctctgaattttgagggaaccaaggtgacacttcactgtgaaacccaggaagattctctgcgcactttgtacaggttttatcatgagggtgtccccctgaggcacaagtcagtccgctgtgaaaggggagcatccatcagcttctcactgactacagagaattcagggaactactactgcacagctgacaatggccttggcgccaagcccagtaaggctgtgagcctctcagtcactgttcccgtgtctcatcctgtcctcaacctcagctctcctgaggacctgatttttgagggagccaaggtgacacttcactgtgaagcccagagaggttcactccccatcctgtaccagtttcatcatgagggtgctgccctggagcgtaggtcggccaactctgcaggaggagtggccatcagcttctctctgactgcagagcattcagggaactactactgcacagctgacaatggctttggcccccagcgcagtaaggcggtgagcctctccgtcactgtccctgtgtctcatcctgtcctcaccctcagctctgctgaggccctgacttttgaaggagccactgtgacacttcactgtgaagtccagagaggttccccacaaatcctataccagttttatcatgaggacatgcccctgtggagcagctcaacaccctctgtgggaagagtgtccttcagcttctctctgactgaaggacattcagggaattactactgcacagctgacaatggctttggtccccagcgcagtgaagtggtgagcctttttgtcactgttccagtgtctcgccccatcctcaccctcagggttcccagggcccaggctgtggtgggggacctgctggagcttcactgtgaggccccgagaggctctcccccaatcctgtactggttttatcatgaggatgtcaccctggggagcagctcagccccctctggaggagaagcttctttcaacctctctctgactgcagaacattctggaaactactcatgtgaggccaacaatggcctagtggcccagcacagtgacacaatatcactcagtgttatagttccagtatctcgtcccatcctcaccttcagggctcccagggcccaggctgtggtgggggacctgctggagcttcactgtgaggccctgagaggctcctccccaatcctgtactggttttatcatgaagatgtcaccctgggtaagatctcagccccctctggaggaggggcctccttcaacctctctctgactacagaacattctggaatctactcctgtgaggcagacaatggtctggaggcccagcgcagtgagatggtgacactgaaagttgcagttccggtgtctcgcccggtcctcaccctcagggctcccgggacccatgctgcggtgggggacctgctggagcttcactgtgaggccctgagaggctctcccctgatcctgtaccggttttttcatgaggatgtcaccctaggaaataggtcgtccccctctggaggagcgtccttaaacctctctctgactgcagagcactctggaaactactcctgtgaggccgacaatggcctcggggcccagcgcagtgagacagtgacactttatatcacagggctgaccgcgaacagaagtggcccttttgccacaggagtcgccgggggcctgctcagcatagcaggccttgctgcgggggcactgctgctctactgctggctctcgagaaaagcagggagaaagcctgcctctgaccccgccaggagcccttcagactcggactcccaagagcccacctatcacaatgtaccagcctgggaagagctgcaaccagtgtacactaatgcaaatcctagaggagaaaatgtggtttactcagaagtacggatcatccaagagaaaaagaaacatgcagtggcctctgaccccaggcatctcaggaacaagggttcccctatcatctactctgaagttaaggtggcgtcaaccccggtttccggatccctgttcttggcttcctcagctcctcacagatgagtccacacgtctctccaactgctgtttcagcctctgcaccccaaagttccccttgggggagaagcagcattgaagtgggaagatttaggctgccccagaccatatctactggcctttgtttcacatgtcctcattctcagtctgaccagaatgcagggccctgctggactgtcacctgtttcccagttaaagccctgactggcaggttttttaatccagtggcaaggtgctcccactccagggcccagcacatctcctggattccttagtgggcttcagctgtggttgctgttctgagtactgctctcatcacacccccacagagggggtcttaccacacaaagggagagtgggccttcaggagatgccgggctggcctaacagctcaggtgctcctaaactccgacacagagttcctgctttg

SEQ ID NO: 221426 - DNA, 5390 bp, Artificial Sequence
  derived and/or modified sequence
aattcactaatgcattctgctctttttgagagcacagcttctcagatgtgctccttggagctggtgtgcagtgtcctgactgtaagatcaagtccaaacctgttttggaattgaggaaacttctcttttgatctcagcccttggtggtccaggtcttcatgctgctgtgggtgatattactggtcctggctcctgtcagtggacagtttgcaaggacacccaggcccattattttcctccagcctccatggaccacagtcttccaaggagagagagtgaccctcacttgcaagggatttcgcttctactcaccacagaaaacaaaatggtaccatcggtaccttgggaaagaaatactaagagaaaccccagacaatatccttgaggttcaggaatctggagagtacagatgccaggcccagggctcccctctcagtagccctgtgcacttggatttttcttcagcttcgctgatcctgcaagctccactttctgtgtttgaaggagactctgtggttctgaggtgccgggcaaaggcggaagtaacactgaataatactatttacaagaatgataatgtcctggcattccttaataaaagaactgacttccatattcctcatgcatgtctcaaggacaatggtgcatatcgctgtactggatataaggaaagttgttgccctgtttcttccaatacagtcaaaatccaagtccaagagccatttacacgtccagtgctgagagccagctccttccagcccatcagcgggaacccagtgaccctgacctgtgagacccagctctctctagagaggtcagatgtcccgctccggttccgcttcttcagagatgaccagaccctgggattaggctggagtctctccccgaatttccagattactgccatgtggagtaaagattcagggttctactggtgtaaggcagcaacaatgccttacagcgtcatatctgacagcccgagatcctggatacaggtgcagatccctgcatctcatcctgtcctcactctcagccctgaaaaggctctgaattttgagggaaccaaggtgacacttcactgtgaaacccaggaagattctctgcgcactttgtacaggttttatcatgagggtgtccccctgaggcacaagtcagtccgctgtgaaaggggagcatccatcagcttctcactgactacagagaattcagggaactactactgcacagctgacaatggccttggcgccaagcccagtaaggctgtgagcctctcagtcactgttcccgtgtctcatcctgtcctcaacctcagctctcctgaggacctgatttttgagggagccaaggtgacacttcactgtgaagcccagagaggttcactccccatcctgtaccagtttcatcatgagggtgctgccctggagcgtaggtcggccaactctgcaggaggagtggccatcagcttctctctgactgcagagcattcagggaactactactgcacagctgacaatggctttggcccccagcgcagtaaggcggtgagcctctccgtcactgtccctgtgtctcatcctgtcctcaccctcagctctgctgaggccctgacttttgaaggagccactgtgacacttcactgtgaagtccagagaggttccccacaaatcctataccagttttatcatgaggacatgcccctgtggagcagctcaacaccctctgtgggaagagtgtccttcagcttctctctgactgaaggacattcagggaattactactgcacagctgacaatggctttggtccccagcgcagtgaagtggtgagcctttttgtcactgttccagtgtctcgccccatcctcaccctcagggttcccagggcccaggctgtggtgggggacctgctggagcttcactgtgaggccccgagaggctctcccccaatcctgtactggttttatcatgaggatgtcaccctggggagcagctcagccccctctggaggagaagcttctttcaacctctctctgactgcagaacattctggaaactactcatgtgaggccaacaatggcctagtggcccagcacagtgacacaatatcactcagtgttatagttccagtatctcgtcccatcctcaccttcagggctcccagggcccaggctgtggtgggggacctgctggagcttcactgtgaggccctgagaggctcctccccaatcctgtactggttttatcatgaagatgtcaccctgggtaagatctcagccccctctggaggaggggcctccttcaacctctctctgactacagaacattctggaatctactcctgtgaggcagacaatggtctggaggcccagcgcagtgagatggtgacactgaaagttgcagttccggtgtctcgcccggtcctcaccctcagggctcccgggacccatgctgcggtgggggacctgctggagcttcactgtgaggccctgagaggctctcccctgatcctgtaccggttttttcatgaggatgtcaccctaggaaataggtcgtccccctctggaggagcgtccttaaacctctctctgactgcagagcactctggaaactactcctgtgaggccgacaatggcctcggggcccagcgcagtgagacagtgacactttatatcacagggctgaccgcgaacagaagtggcccttttgccacaggagtcgccgggggcctgctcagcatagcaggccttgctgcgggggcactgctgctctactgctggctctcgagaaaagcagggagaaagcctgcctctgaccccgccaggagcccttcagactcggactcccaagagcccacctatcacaatgtaccagcctgggaagagctgcaaccagtgtacactaatgcaaatcctagaggagaaaatgtggtttactcagaagtacggatcatccaagagaaaaagaaacatgcagtggcctctgaccccaggcatctcaggaacaagggttcccctatcatctactctgaagttaaggtggcgtcaaccccggtttccggatccctgttcttggcttcctcagctcctcacagatgagtccacacgtctctccaactgctgtttcagcctctgcaccccaaagttccccttgggggagaagcagcattgaagtgggaagatttaggctgccccagaccatatctactggcctttgtttcacatgtcctcattctcagtctgaccagaatgcagggccctgctggactgtcacctgtttcccagttaaagccctgactggcaggttttttaatccagtggcaaggtgctcccactccagggcccagcacatctcctggattccttagtgggcttcagctgtggttgctgttctgagtactgctctcatcacacccccacagagggggtcttaccacacaaagggagagtgggccttcaggagatgccgggctggcctaacagctcaggtgctcctaaactccgacacagagttcctgctttgggtggatgcatttctcaattgtcatcagcctggtggggctactgcagtgtgctgccaaatgggacagcacacagcctgtgcacatgggacatgtgatgggtctccccacgggggctgcatttcacactcctccacctgtctcaaactctaaggtcggcacttgacaccaaggtaacttctctcctgctcatgtgtcagtgtctacctgcccaagtaagtggctttcatacaccaagtcccaagttcttcccatcctaacagaagtaacccagcaagtcaaggccaggaggaccaggggtgcagacagaacacatactggaacacaggaggtgctcaattactatttgactgactgactgaatgaatgaatgaatgaggaagaaaactgtgggtaatcaaactggcataaaatccagtgcactccctaggaaatccgggaggtattctggcttccctaagaaacaatggaagagaaggagcttggatgaggaaactgttcagcaagaggaagggcttctcacactttcatgtgcttgtggatcacctgaggatcctgtgaaaatacagatactgattcagtgggtctgcgtagagcctgagactgccattctaacatgttcccaggggatgctgatgctgctggccctgggactgcactgcatgcatgtgaagccctataggtctcagcagaggcccatggagagggaatgtgtggctctggctgcccagggcccaactcggttcacacggatcgtgctgctccctggccagcctttggccacagcaccaccagctgctgttgctgagagagcttcttctctgtgacatgttggctttcatcagccaccctgggaagcggaaagtagctgccactatctttgtttccccacctcaggcctcacactttcccatgaaaagggtgaatgtatataacctgagccctctccattcagagttgttctcccatctctgagcaatgggatgttctgttccgcttttatgatatccatcacatcttatcttgatctttgctcccagtggattgtacagtgatgacttttaagccccacggccctgaaataaaatccttccaagggcattggaagctcactccacctgaaccatggcttttcatgcttccaagtgtcagggccttgcccagatagacagggctggctctgctgccccaacctttcaaggaggaaaccagacacctgagacaggagcctgtatgcagcccagtgcagccttgcagaggacaaggctggaggcatttgtcatcactacagatatgcaactaaaatagacgtggagcaagagaaatgcattcccaccgaggccgcttttttaggcctagttgaaagtcaagaaggacagcagcaagcataggctcaggattaaagaaaaaaatctgctcacagtctgttctggaggtcacatcaccaacaaagctcacgccctatgcagttctgagaaggtggaggcaccaggctcaaaagaggaaatttagaatttctcattgggagagtaaggtacccccatcccagaatgataactgcacagtggcagaacaaactccaccctaatgtgggtggaccccgtccagtctgttgaaggcctgaatgtaacaaaagggcttattcttcctcaagtaagggggaactcctgctttgggctgggacataagtttttctgctttcagacgcaaactgaaaaatggctcttcttgggtcttgagcttgctggcatatggactgaaagaaactatgctattggatctcctggatctccagcttgctgactgcagatcttgagatatgtcagcctctacagtcacaagagctaattcattctaataaaccaatctttctgta

SEQ ID NO: 221427 - DNA, 2934 bp, Artificial Sequence
  derived and/or modified sequence
atgctcctttgggttattctgctagtgcttgtgcctagtcctggacagttccctcgcaccccaagacccataatctttctgcagcccccctggaccacggtgttccaaggcgagcgagtaacccttacctgcaaaggattccgtttctatagtccacagaagactaagtggtaccacagataccttggaaaagaaattctacgagaaactcctgataacattttggaagtgcaggaaagtggtgagtaccgctgccaggctcaaggctcccctctctccagccccgtgcacttagatttctcctctgccagcctcatcctgcaggcgcctctttcggtgtttgagggcgactctgtagtgctccgttgcagagctaaggccgaggttacactaaacaatactatttacaagaacgacaacgtactcgcctttctaaacaaacgaacggacttccacatacctcacgcctgtctgaaagataacggagcttaccggtgcaccggctacaaggaatcctgctgccccgtgtcttccaacaccgtgaagattcaagtgcaggaaccatttaccaggccggtgcttcgggcttcgtccttccaaccaatatccggaaaccccgtcacacttacgtgtgaaacgcagctatctctagagagatctgatgtcccacttcgctttcggttcttccgggatgatcagactcttggccttggctggagtctctcccccaatttccagattacagcaatgtggagcaaagattcagggttctactggtgtaaagccgcaacaatgccttattccgtgatttcagatagtccacgatcctggatccaggtgcagatccctgcctcacacccagtactcacgctaagcccagaaaaggcactaaattttgaaggcacaaaggtcacccttcactgcgaaacacaggaagactctctccgtacgctgtaccggttctaccatgagggcgtccccctccggcacaagagcgttcgctgtgaacgtggcgcctccatttccttctcgctaaccactgaaaattccggcaactactactgtaccgctgacaacggccttggcgctaagccctctaaagctgtaagtctcagcgtcaccgtgccggtctcccatccagtgctgaacctgtcttcgccggaagacttgatcttcgagggagcaaaagtaactctgcactgcgaagcccaacggggcagccttcctattctttatcagttccatcatgagggggccgcccttgagaggcgctcagctaattccgccggtggagtggctatcagtttctctctgactgccgagcacagcgggaattactactgtacagccgataacggcttcggcccccaaagatctaaagctgtgtccttgagcgtgacagtgcccgtgtcccaccccgtcctgaccttatctagcgccgaagccctgacatttgagggcgctacagtcactttgcactgcgaagtccagaggggttctcctcagattctgtaccaattttatcacgaggacatgccactgtggagtagttcaaccccttccgtgggtagggtctctttctcatttagccttaccgagggtcatagcgggaattactactgtaccgcagataacggattcggaccacagaggtctgaagtggtgtccctttttgtcactgttcccgtcagccgcccgatcctgaccctgagagtacccagagcccaagccgtcgtaggtgacctgttggaactgcactgtgaagcaccgcgcggaagtcccccaattctttactggttttaccacgaagacgtgaccttgggctcttcatccgccccctcagggggtgaagcctcatttaacttgagcctgacagccgagcactctggtaattacagttgtgaagcaaataatggcttggtcgcacagcactcggacacgataagcctgagcgttattgttccagtgagccgtccgattctgacgttccgcgcccctcgtgcgcaagctgtggtgggcgacttgctggagctccactgtgaggctttgagaggcagcagtcccattttatactggttctaccacgaagatgttacactggggaagatttccgcgccctccggcggcggcgcttcttttaatctgtccctgaccacggagcacagtggcatttactcttgcgaggctgataatgggcttgaagcccagcgtagtgaaatggttacgctgaaggtagcagtgcctgtctcacgcccagtgctgactctgcgagcccctggaacacacgccgccgtgggcgatctgttggaactgcattgcgaagcattgcgcggatccccgcttattctgtacagattcttccatgaagatgttacactgggtaacaggtcctccccatctggaggggcatcccttaatttgtcactgaccgctgagcatagtggcaattatagttgcgaagctgataacgggcttggcgcccaaaggagcgaaaccgtaacactgtacatcaccggcctgaccgcaaaccgcagcggcccatttgccacaggcgtagccggagggctgctatctatcgcaggtttagccgctggtgcactcctgctttattgttggttgtccaggaaagccgggaggaagccagcctctgatcccgcacgttctccaagtgatagtgactctcaggagcccacttaccacaacgttccagcatgggaggaactgcagccagtatacactaacgcgaatccacggggggagaacgtggtgtattcagaagtgagaatcatccaagaaaagaagaagcacgctgtggcctcagaccccaggcatttgcgcaataaaggcagcccgattatttactccgaggttaaggtggcttcaacacccgtctccggctctctgttcctggcctcttctgccccacacaggtag

SEQ ID NO: 221428 - DNA, 2934 bp, Artificial Sequence
  derived and/or modified sequence
atgttgttgtgggttatcctgttggtactggccccggtctccgggcagttcgctcgtacaccgagaccgattattttcctgcagccaccatggacaactgtgtttcaaggcgaacgagtgacactgacttgtaagggtttcagattttactcaccgcagaagacaaaatggtatcacagatacttgggtaaggagattctgagggaaacgccggataacatcctggaagtgcaagagtccggcgaatatagatgtcaagctcaggggagccccctcagttcaccagtgcatcttgatttctctagtgcttccctgatcctgcaggctcccctaagtgtctttgagggtgattccgttgttctccgctgtcgggctaaagccgaagtaacccttaacaataccatatacaaaaacgacaatgttctcgccttcctcaataagcgaaccgattttcacattccccacgcttgtttgaaagacaacggcgcctaccgatgtaccggctacaaagagagctgttgccctgtgagctccaacaccgtgaagatccaggtgcaagaacccttcacacgacccgtgctccgagcatcgtccttccaacccatcagcggaaatcctgtcactttaacatgcgagacgcagctgagcttggaaaggagcgacgtgcctttgcgcttccggttctttagagacgaccagactctggggttggggtggtcactgagtcctaacttccagatcactgcaatgtggagcaaagatagtggcttctattggtgtaaggcagcaactatgccttattctgtgatttccgattcaccgagatcctggatccaagtacagatacccgcgtcgcacccggttctgacattgtctcccgagaaggcactgaactttgaggggacaaaggtgacgctccactgcgaaacacaagaggactcacttcgaactctgtataggttctatcatgagggagtgcccctgcggcacaaatccgtgcgctgtgagcgaggcgcaagtattagtttcagtcttactaccgaaaatagtggcaattactattgtaccgccgacaacggcctgggtgcaaagccgagcaaagccgtgagcctatctgtgacagtgcccgtttctcatcccgtgctaaatctctcttctccagaagacctcatctttgaaggggcaaaggtcaccctgcattgcgaagcccagcgtggatcactgccaattttgtaccaatttcaccacgagggcgccgccctggaacgaagaagcgccaattcagccgggggtgtggctatctcctttagcctgacagctgaacatagcggcaattactactgtactgcagacaatggcttcggcccacagagaagcaaggctgtatcgctgagcgtaacagtaccagtcagtcaccccgtgctgactctgagctctgcggaggccctgacgttcgagggggcgacggtaacgctccattgtgaggtgcagcggggctccccacagatcctttaccaattctatcacgaggatatgcctctgtggagttcatctacaccaagcgtcgggagggtgagcttcagcttttcactaaccgagggccactctgggaattattactgtactgcagacaacggatttggcccccaacggtctgaggtcgtttctctattcgtgactgtgcctgtctcccgtcctatccttaccctacgcgtgccccgggcccaagccgtcgtaggagacctgcttgaactgcactgcgaggccccgcgggggtccccccccattctttattggttctaccatgaggatgtgacgctgggatcaagttcagctccaagcggtggggaggcctcttttaatttgagcctgacggcagagcatagcggaaactactcctgtgaagccaacaatggtttagtcgctcagcactctgatacaatctcactgagcgtgattgtgccagtcagcaggccaatcttaacttttcgggccccaagagctcaggccgtggtcggtgacttgttggagctccactgcgaggctttaagaggctctagccctattctctattggttttatcatgaagacgtaactctcggtaaaatctctgcaccaagtggcggaggggccagcttcaatttaagtctgacaaccgaacactccggtatttattcgtgtgaggcagataacgggctcgaggctcagcgctcggagatggtcactctgaaagtggctgtgcctgtttctcgccccgtgcttactctcagagcgccagggacccacgctgcagtgggtgacctcctggagctgcactgtgaggccctgagaggctctcccctcatcctgtaccgatttttccatgaggacgtgaccttaggcaacagaagttctccaagcggtggagcctccctgaatctcagtctgacagccgaacatagcggcaactacagctgcgaagctgacaacggtttaggtgctcagagatctgagactgtcaccctttatattactggtctaaccgccaacaggtcaggcccatttgccactggcgtggcgggcggcttgctgagcatcgcagggctggcggcgggcgcgctgctgttatactgctggctgagccgtaaagcaggccgaaagccagccagcgaccctgcacgtagtcctagcgactctgactcacaagagcccacctaccataatgtgccagcttgggaagaactccagcccgtgtacaccaacgctaacccaaggggagagaatgttgtctacagcgaggtgaggataatccaggagaagaaaaaacacgccgtggctagtgatccacggcatttgagaaacaagggaagccctatcatttattctgaagtcaaagtggcgtccacgcccgtgagcggtagtctgtttctggcatctagcgctccacatagatag

SEQ ID NO: 221429 - DNA, 2934 bp, Artificial Sequence
  derived and/or modified sequence
atgctgctgtgggtgatcctgctggtgctggtgcccagccctggccagttccccaggaccccccggcccatcatcttcctgcagcccccctggaccaccgtcttccagggcgagcgggtgaccctgacctgcaagggcttccgcttctacagcccccagaagaccaagtggtaccaccgctacctgggcaaggagatcctgcgggagaccccagacaacatcctggaggtgcaggagagcggggagtaccgctgccaggcccagggcagccccctgagcagccctgtgcacctggacttcagcagcgccagcctcatcctgcaggcccccctgtctgtgtttgaaggagacagcgtggtgctgcgctgccgggccaaggccgaggtgaccctgaacaacaccatctacaagaatgacaacgtgctggccttcctgaacaagaggacagacttccacatcccccacgcctgcctgaaggacaatggagcctaccgctgcaccggctacaaggagagctgctgccctgtgagcagcaacacagtgaagatccaggtgcaggagcccttcaccaggcctgtgctgcgggccagcagcttccagcccatcagcggcaaccctgtgaccctgacctgtgagacccagctgagcctggagaggagtgatgtgcccctgcgcttccgcttcttcagagatgaccagaccctgggcctgggctggagcctgagccccaacttccagatcacagccatgtggagcaaggacagcggcttctactggtgcaaggccgccaccatgccctacagcgtcatcagtgacagccccaggtcctggatccaggtgcagatcccagccagccaccctgtgctgaccctgagccctgagaaggccctgaactttgagggcaccaaggtgaccctgcactgtgagacccaggaggacagcctgcggaccctgtaccgcttctaccatgaaggagtgcccctgcggcacaagtctgtgcgctgtgagcggggggccagcatctccttcagcctgaccacagagaacagcggcaactactactgcacagctgacaatggcctgggcgccaagcccagcaaggctgtgtccctgtctgtgacagtgcctgtgagccaccctgtgctgaacctgagcagccctgaggacctgatctttgagggcgccaaggtgaccctgcactgtgaggcccagaggggcagcctgcccatcctgtaccagttccaccacgagggcgccgccctggagaggagaagtgccaacagcgctggaggagtggccatctccttcagcctgacagctgagcacagcggcaactactactgcacagctgacaatggcttcggcccccagaggagcaaggctgtgtccctgtctgtgacagtgcctgtgagccaccctgtgctgaccctgagcagcgctgaggccctgacctttgaaggagccaccgtgaccctgcactgtgaggtgcagaggggcagcccccagatcctgtaccagttctaccacgaggacatgcccctgtggagcagcagcaccccatctgtgggccgggtgtccttctccttcagcctgacagagggccacagcggcaactactactgcacagctgacaatggatttggcccccagaggtctgaggtggtgtccctgtttgtgacagtgcctgtgtcccggcccatcctgaccctgcgggtgccccgggcccaggccgtggtgggggacctgctggagctgcactgtgaggccccccggggcagcccccccatcctgtactggttctaccatgaagatgtgaccctgggcagcagcagcgcccccagcggcggggaggccagcttcaacctgagcctgacagctgagcacagcggcaactacagctgtgaggccaacaacggcctggtggcccagcacagcgacaccatcagcctgtctgtgattgtgcctgtgtcccggcccatcctgaccttccgggccccccgggcccaggccgtggtgggggacctgctggagctgcactgtgaggccctgcggggcagcagccccatcctgtactggttctaccatgaagatgtgaccctgggcaagatcagcgcccccagcggcggcggggccagcttcaacctgagcctgaccacagagcacagcggcatctacagctgtgaggccgacaatggcctggaggcccagaggtctgagatggtgaccctgaaggtggccgtgcctgtgtccaggcctgtgctgaccctgcgggcccctggcacccatgctgctgtgggggacctgctggagctgcactgtgaggccctgcggggcagccccctcatcctgtaccgcttcttccatgaagatgtgaccctgggcaacagaagcagccccagcggcggggccagcctgaacctgagcctgacagctgagcacagcggcaactacagctgtgaggccgacaatggcctgggcgcccagaggtctgagaccgtgaccctgtacatcaccggcctgacagccaacagaagtggcccctttgccaccggggtggccggcggcctgctgagcattgctggcctggccgccggggccctgctgctgtactgctggctgagcaggaaggccggcaggaagccagccagtgaccctgcccggagccccagcgacagcgacagccaggagcccacctaccacaacgtgcctgcctgggaggagctgcagcctgtgtacaccaatgccaaccccagaggagaaaatgtggtgtacagcgaggtgcgcatcatccaggagaagaagaagcatgctgtggccagtgaccccaggcacctgaggaacaagggcagccccatcatctacagcgaggtgaaggtggccagcacccctgtgtctggcagcctcttcctggccagcagcgccccccacaggtag

SEQ ID NO: 221430 - DNA, 2934 bp, Artificial Sequence
  derived and/or modified sequence
atgctgctgtgggtgatcctgctggtgctggcccctgtgtctggccagtttgcccggaccccccggcccatcatcttcctgcagcccccctggaccaccgtcttccagggcgagcgggtgaccctgacctgcaagggcttccgcttctacagcccccagaagaccaagtggtaccaccgctacctgggcaaggagatcctgcgggagaccccagacaacatcctggaggtgcaggagagcggggagtaccgctgccaggcccagggcagccccctgagcagccctgtgcacctggacttcagcagcgccagcctcatcctgcaggcccccctgtctgtgtttgaaggagacagcgtggtgctgcgctgccgggccaaggccgaggtgaccctgaacaacaccatctacaagaatgacaacgtgctggccttcctgaacaagaggacagacttccacatcccccacgcctgcctgaaggacaatggagcctaccgctgcaccggctacaaggagagctgctgccctgtgagcagcaacacagtgaagatccaggtgcaggagcccttcaccaggcctgtgctgcgggccagcagcttccagcccatcagcggcaaccctgtgaccctgacctgtgagacccagctgagcctggagaggagtgatgtgcccctgcgcttccgcttcttcagagatgaccagaccctgggcctgggctggagcctgagccccaacttccagatcacagccatgtggagcaaggacagcggcttctactggtgcaaggccgccaccatgccctacagcgtcatcagtgacagccccaggtcctggatccaggtgcagatcccagccagccaccctgtgctgaccctgagccctgagaaggccctgaactttgagggcaccaaggtgaccctgcactgtgagacccaggaggacagcctgcggaccctgtaccgcttctaccatgaaggagtgcccctgcggcacaagtctgtgcgctgtgagcggggggccagcatctccttcagcctgaccacagagaacagcggcaactactactgcacagctgacaatggcctgggcgccaagcccagcaaggctgtgtccctgtctgtgacagtgcctgtgagccaccctgtgctgaacctgagcagccctgaggacctgatctttgagggcgccaaggtgaccctgcactgtgaggcccagaggggcagcctgcccatcctgtaccagttccaccacgagggcgccgccctggagaggagaagtgccaacagcgctggaggagtggccatctccttcagcctgacagctgagcacagcggcaactactactgcacagctgacaatggcttcggcccccagaggagcaaggctgtgtccctgtctgtgacagtgcctgtgagccaccctgtgctgaccctgagcagcgctgaggccctgacctttgaaggagccaccgtgaccctgcactgtgaggtgcagaggggcagcccccagatcctgtaccagttctaccacgaggacatgcccctgtggagcagcagcaccccatctgtgggccgggtgtccttctccttcagcctgacagagggccacagcggcaactactactgcacagctgacaatggatttggcccccagaggtctgaggtggtgtccctgtttgtgacagtgcctgtgtcccggcccatcctgaccctgcgggtgccccgggcccaggccgtggtgggggacctgctggagctgcactgtgaggccccccggggcagcccccccatcctgtactggttctaccatgaagatgtgaccctgggcagcagcagcgcccccagcggcggggaggccagcttcaacctgagcctgacagctgagcacagcggcaactacagctgtgaggccaacaacggcctggtggcccagcacagcgacaccatcagcctgtctgtgattgtgcctgtgtcccggcccatcctgaccttccgggccccccgggcccaggccgtggtgggggacctgctggagctgcactgtgaggccctgcggggcagcagccccatcctgtactggttctaccatgaagatgtgaccctgggcaagatcagcgcccccagcggcggcggggccagcttcaacctgagcctgaccacagagcacagcggcatctacagctgtgaggccgacaatggcctggaggcccagaggtctgagatggtgaccctgaaggtggccgtgcctgtgtccaggcctgtgctgaccctgcgggcccctggcacccatgctgctgtgggggacctgctggagctgcactgtgaggccctgcggggcagccccctcatcctgtaccgcttcttccatgaagatgtgaccctgggcaacagaagcagccccagcggcggggccagcctgaacctgagcctgacagctgagcacagcggcaactacagctgtgaggccgacaatggcctgggcgcccagaggtctgagaccgtgaccctgtacatcaccggcctgacagccaacagaagtggcccctttgccaccggggtggccggcggcctgctgagcattgctggcctggccgccggggccctgctgctgtactgctggctgagcaggaaggccggcaggaagccagccagtgaccctgcccggagccccagcgacagcgacagccaggagcccacctaccacaacgtgcctgcctgggaggagctgcagcctgtgtacaccaatgccaaccccagaggagaaaatgtggtgtacagcgaggtgcgcatcatccaggagaagaagaagcatgctgtggccagtgaccccaggcacctgaggaacaagggcagccccatcatctacagcgaggtgaaggtggccagcacccctgtgtctggcagcctcttcctggccagcagcgccccccacaggtag

SEQ ID NO: 221431 - DNA, 2934 bp, Artificial Sequence
  derived and/or modified sequence
atgctgctgtgggtgatcctgctggtgctggtgcccagccccggccagtttccccgcacccctaggcctatcatttttcttcagcccccatggacgacggtgttccagggagaacgggtcacgctgacatgcaagggctttcggttctacagcccccaaaagaccaaatggtaccatagatatctaggaaaagagatcctgagagaaacgcctgacaacatcctcgaagttcaggagtctggcgaatatcgatgtcaggcccagggcagccccctttccagccctgtgcatctggatttttcctcagcttcccttattctccaagcgcctctctctgtgtttgaaggtgacagtgttgtactgaggtgtagagcgaaagccgaggttactctgaacaataccatctacaaaaatgataatgtcctggcgttcctgaataagcggacagatttccatatccctcacgcctgtctgaaggacaacggagcttaccggtgcactggctacaaggagtcatgctgcccagtatcctccaatacggtgaagatccaggtgcaggagccatttaccagacccgtgctccgcgcgtcttcattccagcccatttctgggaaccctgtgaccttgacttgtgaaacacagctcagcctggaacggtctgatgtgcccctgagatttcggttctttagggacgaccagaccctcggactggggtggagcctatccccgaacttccaaatcacagccatgtggagcaaagattcggggttttactggtgtaaggcggctactatgccatacagcgtgataagcgatagcccacgatcttggattcaggtccaaattccagcctcgcatccggtactcacgctctctcctgaaaaagccctcaatttcgagggcacaaaagtgactctgcactgtgagactcaagaagattccctacgaaccttgtacaggttttaccacgaaggcgtccccctgagacacaagagcgttagatgtgagcgcggagccagcatctccttctctctcactaccgagaatagcggcaattactattgcactgcggacaacggcctcggggcaaagccctcgaaagcggtgagcctgtctgtaacagtgcctgttagtcatcccgtgctgaacctcagcagtcctgaagacctcatttttgagggagctaaggttacgctgcactgtgaagcacagcggggcagcctgccaatcctttatcagtttcaccacgaaggcgccgccctggaaaggagaagtgccaacagcgctggcggggtggcaatttctttctctcttaccgccgagcatagtggtaattactactgcacagcagacaatggcttcggacctcagaggtccaaggccgtttcactcagcgtcactgtccctgtgtcgcatcccgtgctgacattgagctcagctgaggctcttacctttgaaggagctaccgtgacacttcattgcgaagtgcagaggggctccccccagattctttaccagttctaccatgaggatatgcctctgtggtccagcagcaccccatctgtggggagagtttctttttcattcagtcttactgagggacactctgggaattactattgtacagccgataacggttttggcccacaacggagtgaagttgtgtcactcttcgttactgttcccgtctctcgacctatcctcactcttcgtgtaccacgcgcccaggccgtggttggcgacttgctggaactgcactgcgaagcaccacgaggttcaccgcctattttgtattggttctatcacgaggacgtgaccctgggttccagcagcgcgccaagcggcggagaggctagtttcaacctgtctctcaccgcagaacatagtggaaactactcctgtgaggccaacaacgggctggttgctcaacactcagacacgatctctctgagcgtgatcgtgccagtgtctaggccaattctgactttccgtgctcccagagctcaggcagtcgtgggcgatctgctggagctgcactgtgaggcattacgcggatccagtcctattctgtattggttttaccatgaagatgtcactttgggaaaaattagcgccccatccggcgggggcgcttcctttaacctgtctctgaccactgaacatagcggaatttactcatgcgaagctgataacgggttggaagcccagcgttccgaaatggtgaccttgaaggttgccgtacctgtgagcaggcctgtgctgacactccgcgctcctggcacgcatgcggcggttggggacctattggaactgcattgcgaagctctccggggctccccgctgatcctgtaccgattcttccacgaggatgtcactcttgggaatcgcagctccccctccggaggtgccagtctcaatctcagcctgacagctgaacacagtggaaattattcctgcgaggctgataatggtctcggcgcccagaggtctgaaacagtgaccctgtatattacgggacttacagcaaacaggagtgggccctttgctaccggcgtcgcaggaggtctgctctccattgccggcctcgcagcaggggctctccttctgtactgctggctctctcgaaaggccggcaggaagcctgcttcagatcccgcaaggagtcccagtgatagtgactcccaggagcctacatatcacaacgttcccgcatgggaagaacttcagccagtctatacaaatgccaacccaagaggggagaatgtagtctacagcgaagttcgcattattcaggaaaagaaaaaacatgccgttgcatctgatccacgtcacctccgcaataagggatctcctatcatctacagtgaggtcaaggtcgcctctacgccagtgtcaggaagcctctttttagccagctcagccccacatagatag

SEQ ID NO: 221432 - DNA, 2934 bp, Artificial Sequence
  derived and/or modified sequence
atgctgctgtgggtgatcctgctggtgctggcccccgtgagcggccaatttgccagaacaccgcggccgattatctttctgcagcctccatggactaccgtctttcagggagaacgagtgactctcacttgcaagggatttcgattttattcgccacagaaaaccaagtggtatcatcgctacttaggcaaggagattcttagagaaacacccgataacatccttgaggtacaggaatcaggggagtacagatgccaggctcaaggatctcccctctccagccccgttcacttggacttcagttcagctagtctgattctacaggcacctctctctgtgttcgaaggcgacagtgtagtgctcaggtgccgggccaaggctgaagtgaccctgaacaacacaatctacaaaaacgataatgtgctggcttttttaaacaagcgaactgacttccatattccacacgcatgtttgaaagacaatggcgcctatcgctgcaccggctataaagagagttgctgccctgtgagttccaacaccgtcaagatacaggtacaggagcccttcactagaccggtccttagagctagttcattccagccaatcagtggcaacccggttacactgacctgcgaaacacaactctcactagagcgctctgacgtgccactgcggtttaggttctttcgagacgatcagacactcggtcttggatggtccctcagccctaacttccagattacagcaatgtggagcaaggactccggattttactggtgtaaggcggctaccatgccgtactctgttatctccgattcgcccaggtcttggatccaagttcaaatccctgccagtcatcctgttctgactctcagtcctgagaaggcacttaacttcgagggcacaaaggttaccctgcattgcgagacccaggaggactcactgcggaccctttatagattctaccacgaaggggtgcccttgcgccataagtccgttagatgcgaaaggggcgcttctattagtttcagtttgaccaccgaaaacagcggcaactactactgcaccgccgataacggattgggagctaagccttcgaaagccgtcagtctcagtgtcaccgtccccgtgagccatccggtgctgaacctttcatcaccggaggatcttatctttgaaggtgccaaagtcaccttacattgtgaggctcaaagagggtccctgccaattctctatcagtttcaccatgaaggagcggcacttgaacggagatcagctaacagtgcaggcggtgtcgctatcagtttttctttaactgccgagcattcggggaattactactgtacagctgacaacggctttggacctcagcgctcaaaagccgtgtcactcagcgtaaccgtgccagtctcacaccctgttcttacgctgtcatcagctgaggcccttaccttcgagggagccactgtcacccttcattgtgaagttcagagggggtctccccagattctgtatcaattttatcacgaggacatgcccctgtggtcctctagtactccaagtgtgggccgcgttagtttttccttctccctcactgagggccactcaggcaattactactgcaccgcagacaatgggttcggaccccagagatctgaagtcgtgtctctgtttgtaacagtgcctgtctcccggccaattcttaccttacgggtccccagggcacaggccgtggtgggcgacttgctggagctgcactgcgaggcaccccgaggcagcccccccattctctactggttctaccatgaggatgttactcttggaagttcatcggcgccaagtggtggagaagcttccttcaacttgagcttgactgccgagcactccgggaattattcctgcgaggcgaataatgggctggtagcccagcacagcgacacaataagcctgtcagtcattgtcccagtgagtcggccaatcctaacttttcgggctccaagggcgcaggccgtagtgggagacctcctggagcttcactgtgaagccctgcgcggttcatcccctattctctattggttttaccacgaagacgtcaccctcggcaagatatcagcgccttccggcggaggcgcctcattcaatctctctctcacaacagagcacagtgggatatatagctgcgaggccgacaacgggttagaagctcagcggtctgagatggtcactctgaaggtggctgtgccggtgtcaaggccagtgctgacccttcgggctccaggaactcatgcggctgtgggcgacttgctggagttgcattgtgaggctcttagagggtctcccttgatactgtaccggtttttccacgaagacgtgaccctggggaataggtcgtcaccttctggcggggcaagcctaaacctgtcccttacagcggagcacagcggaaactacagttgcgaagccgataatgggttgggtgctcaaaggagcgagaccgtgaccttatacattacaggcttgacagccaacagatccggccccttcgccacaggcgtggccggcggcctgctgtcaattgctggactggcagccggcgccctgttgctgtattgctggctgtcccggaaggcagggagaaagcccgctagtgaccccgcccggtctccctcggattcagactcgcaggaacccacataccacaacgtgcccgcttgggaggaactccagcccgtgtacacgaacgctaatcccaggggcgaaaatgttgtctattcggaggttaggattatacaggagaagaaaaaacatgcagtggcctccgacccaagacacctcaggaacaaaggaagtcctataatctactcagaagttaaagtcgcctccacgcctgttagcggcagtctgtttctggccagtagcgctccgcacagatag

SEQ ID NO: 221433 - DNA, 2934 bp, Artificial Sequence
  derived and/or modified sequence
atgctactgtgggtaatactgcttgtcctggtgccgagccctgggcagttccctcgaactccgaggcctataatttttctccaacctccctggactaccgtcttccagggcgaacgggtgactctgacttgcaagggctttaggttctatagccctcaaaagaccaagtggtatcaccggtacttaggaaaagagatcctccgcgagacaccggataacatcttagaagtacaggaaagcggggagtatagatgtcaggcacaagggtcgccactcagcagtcccgtccatctggacttttcttccgcttccctgattctgcaggccccactatcagtgttcgagggcgactcagttgtgctcagatgtcgcgcaaaggctgaggtgaccttgaacaacacaatttataagaatgacaacgtgctggctttccttaacaaaagaactgacttccacatccctcatgcttgcttgaaggacaacggtgcctaccgttgcaccgggtacaaggaaagctgctgtcctgtttcatctaatactgtgaagatccaggtgcaggagccttttaccagacccgtactaagagcaagttcctttcagcctatttctgggaatcccgtgactctgacttgcgagacccagttaagcctggaacgaagtgatgtgcccctccgattcagattcttcagagatgaccagaccctggggctggggtggagcctgagccctaacttccagatcacggccatgtggtccaaagattctggcttctattggtgcaaggccgctactatgccctatagcgtgatcagtgattcacccaggagctggattcaggtccaaatacccgcaagccaccctgtgcttactctgtctcccgagaaggctctcaactttgagggtactaaggtgaccctccactgcgagactcaggaggatagtttacggaccttgtaccggttttatcacgaaggagtcccattacggcataaatcagtgagatgcgagaggggcgctagcataagcttctccctgaccaccgaaaattccggcaactactactgtaccgctgacaacggcctcggggctaagccctctaaagctgtatctctgtccgtgacggtgcccgtgtcccaccccgtgttgaaccttagcagtcccgaggatctgatcttcgagggggcaaaagtgaccttacactgtgaggcacagaggggctccttgcccatcctctaccagttccatcacgagggagctgctctggagagacgcagcgccaactcggccggtggcgttgccattagcttctcactgaccgccgagcacagcggtaactattattgcacggccgacaacggcttcggcccacaaaggagtaaagccgtgtcactttctgttacagtccctgtgagtcatcccgtgttgaccttgtcctcagctgaggctctcacattcgagggtgctactgtgacactgcactgcgaggttcaaagaggtagcccccagatcctgtaccagttctaccacgaggatatgccactgtggagcagtagtactccatccgttgggagagtcagtttttccttcagtttaactgagggacatagcggtaattactattgcacagcggacaatggatttggaccacagcggagcgaagttgtgagcctattcgtgactgtcccggtctcccgtcccatccttactctgcgggtccccagggctcaggccgtagtcggggatctgctcgagctgcattgcgaggcccctcggggatcaccgccaattttatactggttctatcacgaggacgtgaccctcggttctagttccgcaccatctggcggtgaggcctctttcaatctttctctgacagccgagcattcagggaattacagctgtgaagccaacaatggtctggtagcacagcattccgacactatctcactgagtgttattgtccctgtgtctcgcccaatcctcaccttccgcgcaccacgggctcaggccgtggttggcgaccttcttgaactgcactgcgaggcactcaggggctcctcccccatcctctactggttctaccacgaggacgtcactcttgggaagataagtgccccttccggtggaggggcatcctttaacctgtccctgaccaccgaacacagtggcatatattcgtgcgaagcggataatggcctcgaagcacagagatctgagatggtgactcttaaggtggcagtccccgtctcccgcccagttttaacgctgagggccccaggcacacatgcggcagtgggagacttactggagctgcattgtgaagccctgagggggagtcctttgattctctaccgattcttccatgaagatgtcacccttgggaaccggtcctcacctagcggcggtgcctcactgaatctgtccttgacagccgaacactcgggcaattacagctgtgaagcagataacgggctgggcgctcagcgatccgagaccgttactctatacataacagggctgaccgctaatagaagtggacctttcgctaccggcgttgccggtggacttttgtctatagctgggctggcggctggggctctcttgctctattgttggttgtctcgaaaggccggtcggaagccggctagcgatcctgcccgatcacccagcgactctgactcacaggagccgacatatcacaatgtcccagcatgggaagaacttcagccggtttacaccaacgccaatcctcggggagagaacgtcgtatactccgaggtacggattatccaggaaaagaagaaacacgccgtggcctccgatcctagacacctgcggaacaaggggagccccattatatattccgaagttaaagtagccagcacccccgtgagcggatctctgtttttggcgtccagcgcacctcacaggtag

SEQ ID NO: 221434 - DNA, 2934 bp, Artificial Sequence
  derived and/or modified sequence
atgcttctgtgggtcatcctgctcgtactcgcccctgtgtccgggcagttcgcacggactccccgtcctataatcttcttacaacctccgtggacaacggttttccagggggagagagttactctaacctgcaagggcttccgcttttattcgccccagaaaaccaaatggtaccacaggtacctcggaaaagaaattctccgcgaaacacccgacaacatcctggaagtgcaagagtctggggaatatcgatgccaggcccagggctcacccctgagcagtcccgtgcatttggacttcagctctgccagcctgattcttcaagcacctctatccgtgtttgagggcgacagcgtcgtactgcgatgcagagccaaagctgaggtgaccctgaacaacacgatctataaaaacgataacgtgttggcattccttaataagcgaactgatttccatattccgcacgcttgtctgaaggataacggtgcctaccgctgtaccggctacaaagagtcatgttgccctgtgtcaagtaatacggtgaagatacaggtgcaggagcccttcacgagaccggtgttgcgggcaagctcctttcagcccatctcaggcaatcccgttacccttacctgcgaaacgcaactgagcttggagcgcagcgacgtgcctctgcgctttcgcttcttcagggacgatcagacactcggccttggctggagtctgtctcccaatttccaaatcactgctatgtggtcaaaggattctggattctattggtgcaaggccgcaaccatgccctattcagtgatctctgacagcccgcgtagctggatacaggttcaaatccccgcatcacacccagtccttaccctgtctccagagaaggctctgaattttgagggaactaaggtcactcttcactgtgaaacacaagaggactccctgaggaccctgtaccgcttctatcatgaaggcgtaccactgcgccataagagtgttcggtgcgagagaggtgcgagcatcagcttcagcctgactaccgagaattccggaaattactactgcacggctgataatgggctgggagccaagccatccaaagctgtttctttgagtgtcacagtgcccgttagccaccctgtgctgaacctctcatcccctgaggacttaatcttcgagggcgctaaagtcacgctccattgcgaagcgcagaggggtagtctccctatcctgtaccaattccaccacgaaggggctgctctggaaaggcgctccgctaattccgcaggtggcgtggcaatctcttttagcttgactgctgaacacagtggaaattattattgtactgctgacaatggatttggtcctcagcgttctaaagcggtctccctgagcgtcactgtgccagtatcgcatcccgtgctcactctttcaagtgccgaagccctgactttcgaaggcgcaacagtgacgctccactgcgaagtgcaaagaggctcgcctcagatcctataccagttctaccatgaggacatgcccttatggtcatcttccacaccctctgtcgggagggtctcattttctttttccctgacagagggccactctggcaattattactgcactgcagacaacgggtttggaccccagaggagtgaagtcgtaagtctctttgtaacagtaccagtaagccgacccatactgacgctccgggtcccacgcgctcaggccgtggtgggcgacttgttggaactgcattgcgaggcaccacgtggttcccctcccattctatattggttttatcacgaggatgtgactctgggctcttcttccgccccttcaggtggggaagcatccttcaatcttagcttgactgccgaacattcagggaactacagctgcgaggccaacaacggcctggtggcccagcatagcgacaccatcagtctgtccgtgatagtaccagtcagccggcctattctgactttccgcgcacccagagctcaggccgtggttggtgacctgttagaactccactgtgaggctttgcgcggatcaagccccatcttgtattggttctatcatgaggacgtaaccttgggcaagatctccgcgccatccggcggaggcgctagcttcaatctttctctcaccactgagcattccggaatttacagttgtgaagcagataatggccttgaagcacagagatcagaaatggtaaccctcaaagtcgcggtgccagtatctagacccgttttaacccttagggcccctggcacgcatgccgctgtgggggatcttctggaactccactgcgaggcactgcgcggatcccctctaatactatatagattctttcatgaagatgtcactctcgggaatcgctcaagtccatccggcggtgcgagccttaacttgtctcttaccgccgagcactccggcaactattcgtgcgaggccgacaatggcctgggggctcagcggagcgagactgtgaccttgtatatcacgggtcttactgcgaaccgcagtgggcctttcgccacaggggtcgccggaggcctgcttagcatcgcaggactggcggctggagccctgctgctgtattgttggctgagtaggaaggctggacgcaaacctgcctctgacccggcaagatctccctctgacagtgattcacaagaaccgacctatcacaacgtcccggcttgggaggagctgcagccagtgtacacaaacgctaatccccgtggcgaaaacgtggtgtattctgaagtgcggatcatacaggagaaaaaaaaacacgctgtggcctctgaccctcgccatctcagaaacaagggttcacccatcatctattctgaagtaaaggttgcttctacacccgtgagcggcagcctgtttctggcatcttctgccccacacagatag

SEQ ID NO: 221435 - protein, 515 aa, Artificial Sequence
  derived and/or modified sequence
MLLWASLLAFAPVCGQSAAAHKPVISVHPPWTTFFKGERVTLTCNGFQFYATEKTTWYHRHYWGEKLTLTPGNTLEVRESGLYRCQARGSPRSNPVRLLFSSDSLILQAPYSVFEGDTLVLRCHRRRKEKLTAVKYTWNGNILSISNKSWDLLIPQASSNNNGNYRCIGYGDENDVFRSNFKIIKIQELFPHPELKATDSQPTEGNSVNLSCETQLPPERSDTPLHFNFFRDGEVILSDWSTYPELQLPTVWRENSGSYWCGAETVRGNIHKHSPSLQIHVQRIPVSGVLLETQPSGGQAVEGEMLVLVCSVAEGTGDTTFSWHREDMQESLGRKTQRSLRAELELPAIRQSHAGGYYCTADNSYGPVQSMVLNVTVRETPGNRDGLVAAGATGGLLSALLLAVALLFHCWRRRKSGVGFLGDETRLPPAPGPGESSHSICPAQVELQSLYVDVHPKKGDLVYSEIQTTQLGEEEEANTSRTLLEDKDVSVVYSEVKTQHPDNSAGKISSKDEES

SEQ ID NO: 221436 - DNA, 1548 bp, Artificial Sequence
  derived and/or modified sequence
atgctgctgtgggccagcctgctggccttcgcccccgtgtgcggccagagcgccgccgcccacaagcccgtgatcagcgtgcaccccccctggaccaccttcttcaagggcgagagagtgaccctgacctgcaacggcttccagttctacgccaccgagaagaccacctggtaccacagacactactggggcgagaagctgaccctgacccccggcaacaccctggaggtgagagagagcggcctgtacagatgccaggccagaggcagccccagaagcaaccccgtgagactgctgttcagcagcgacagcctgatcctgcaggccccctacagcgtgttcgagggcgacaccctggtgctgagatgccacagaagaagaaaggagaagctgaccgccgtgaagtacacctggaacggcaacatcctgagcatcagcaacaagagctgggacctgctgatcccccaggccagcagcaacaacaacggcaactacagatgcatcggctacggcgacgagaacgacgtgttcagaagcaacttcaagatcatcaagatccaggagctgttcccccaccccgagctgaaggccaccgacagccagcccaccgagggcaacagcgtgaacctgagctgcgagacccagctgccccccgagagaagcgacacccccctgcacttcaacttcttcagagacggcgaggtgatcctgagcgactggagcacctaccccgagctgcagctgcccaccgtgtggagagagaacagcggcagctactggtgcggcgccgagaccgtgagaggcaacatccacaagcacagccccagcctgcagatccacgtgcagagaatccccgtgagcggcgtgctgctggagacccagcccagcggcggccaggccgtggagggcgagatgctggtgctggtgtgcagcgtggccgagggcaccggcgacaccaccttcagctggcacagagaggacatgcaggagagcctgggcagaaagacccagagaagcctgagagccgagctggagctgcccgccatcagacagagccacgccggcggctactactgcaccgccgacaacagctacggccccgtgcagagcatggtgctgaacgtgaccgtgagagagacccccggcaacagagacggcctggtggccgccggcgccaccggcggcctgctgagcgccctgctgctggccgtggccctgctgttccactgctggagaagaagaaagagcggcgtgggcttcctgggcgacgagaccagactgccccccgcccccggccccggcgagagcagccacagcatctgccccgcccaggtggagctgcagagcctgtacgtggacgtgcaccccaagaagggcgacctggtgtacagcgagatccagaccacccagctgggcgaggaggaggaggccaacaccagcagaaccctgctggaggacaaggacgtgagcgtggtgtacagcgaggtgaagacccagcaccccgacaacagcgccggcaagatcagcagcaaggacgaggagagctag

SEQ ID NO: 221437 - DNA, 3459 bp, Artificial Sequence
  derived and/or modified sequence
ctcaatcagctttatgcagagaagaagcttactgagctcactgctggtgctggtgtaggcaagtgctgctttggcaatctgggctgacctggcttgtctcctcagaactccttctccaatcctggagcaggcttccatgctgctgtgggcgtccttgctggcctttgctccagtctgtggacaatctgcagctgcacacaaacctgtgatttccgtccatcctccatggaccacattcttcaaaggagagagagtgactctgacttgcaatggatttcagttctatgcaacagagaaaacaacatggtatcatcggcactactggggagaaaagttgaccctgaccccaggaaacaccctcgaggttcgggaatctggactgtacagatgccaggcccggggctccccacgaagtaaccctgtgcgcttgctcttttcttcagactccttaatcctgcaggcaccatattctgtgtttgaaggtgacacattggttctgagatgccacagaagaaggaaagagaaattgactgctgtgaaatatacttggaatggaaacattctttccatttctaataaaagctgggatcttcttatcccacaagcaagttcaaataacaatggcaattatcgatgcattggatatggagacgagaatgatgtatttagatcaaatttcaaaataattaaaattcaagaactatttccacatccagagctgaaagctacagactctcagcctacagaggggaattctgtaaacctgagctgtgaaacacagcttcctccagagcggtcagacaccccacttcacttcaacttcttcagagatggcgaggtcatcctgtcagactggagcacgtacccggaactccagctcccaaccgtctggagagaaaactcaggatcctattggtgtggtgctgaaacagtgaggggtaacatccacaagcacagtccctcgctacagatccatgtgcagcggatccctgtgtctggggtgctcctggagacccagccctcagggggccaggctgttgaaggggagatgctggtccttgtctgctccgtggctgaaggcacaggggataccacattctcctggcaccgagaggacatgcaggagagtctggggaggaaaactcagcgttccctgagagcagagctggagctccctgccatcagacagagccatgcagggggatactactgtacagcagacaacagctacggccctgtccagagcatggtgctgaatgtcactgtgagagagaccccaggcaacagagatggccttgtcgccgcgggagccactggagggctgctcagtgctcttctcctggctgtggccctgctgtttcactgctggcgtcggaggaagtcaggagttggtttcttgggagacgaaaccaggctccctcccgctccaggcccaggagagtcctcccattccatctgccctgcccaggtggagcttcagtcgttgtatgttgatgtacaccccaaaaagggagatttggtatactctgagatccagactactcagctgggagaagaagaggaagctaatacctccaggacacttctagaggataaggatgtctcagttgtctactctgaggtaaagacacaacacccagataactcagctggaaagatcagctctaaggatgaagaaagttaagagaatgaaaagttacgagaacgtcctactcatgtgatttctcccttgtccaaagtcccaggcccagtgcagtccttgcggcccctggaatgatcaactcattccagctttctaattcttctcatgcatatgcattcactcccaggaatactcattcgtctactctgatgttgggatggaatggcctctgaaagacttcactaaaatgaccaggatccacagttaagagaagaccctgtagtatttgctgtgggcctgacctaatgtattccctagggtctgctttagagaagggggataaagagagagaaggactgttatgaaaaacagaagcacaaattttggtgaattgggatttgcagagatgaaaaagactgggtgacctggatctctgcttaatacatctacaaccattgtctcactggagactcacttgcatcagtttgtttaactgtgagtggctgcacaggcactgtgcaaacaatgaaaagccccttcacttctgcctgcacagcttacactgtcaggattcagttgcagattaaagaacccatctggaatggtttacagagagaggaatttaaaagaggacatcagaagagctggagatgcaagctctaggctgcgcttccaaaagcaaatgataattatgttaatgtcattagtgacaaagatttgcaacattagagaaaagagacacaaatataaaattaaaaacttaagtaccaactctccaaaactaaatttgaacttaaaatattagtataaactcataataaactctgcctttaaaaaaagataaatatttcctacgtctgttcactgaaataattaccaaccccttagcaataagcactccttgcagagaggttttattctctaaataccattcccttctcaaaggaaataaggttgcttttcttgtaggaactgtgtctttgagttactaattagtttatatgagaataattcttgcaataaatgaagaaggaataaaagaaataggaagccacaaatttgtatggatatttcatgatacacctactggttaaataattgacaaaaaccagcagccaaatattagaggtctcctgatggaagtgtacaataccacctacaaattatccatgccccaagtgttaaaactgaatccattcaagtctttctaactgaatacttgttttatagaaaatgcatggagaaaaggaatttgtttaaataacattatgggattgcaaccagcaaaacataaactgagaaaaagttctatagggcaaatcacctggcttctataacaaataaatgggaaaaaaatgaaataaaaagaagagagggaggaagaaagggagagagaagaaaagaaaaatgaagaaaagtaattagaatattttcaacataaagaaaagacgaatatttaaggtgacagatatcccaactacgctgatttgatctttacaaattatatgagtgtatgaatttgtcacatgtatcacccccaaaaaaagagaaaaagaaaaatagaagacatataaattaaatgagacgagacatgtcgaccaaaaggaatgtgtgggtcttgtttggatcctgactcaaattaagaaaaaataaaactacctacgaaatactaagaaaaatttgtatactaatattaagaaattgttgtgtgttttggatataagtgatagtttattgtagtgatgtttttataaaagcaaaaggatattcactttcagcgcttatactgaagtattagattaaagcttattaacgta

SEQ ID NO: 221438 - DNA, 1548 bp, Artificial Sequence
  derived and/or modified sequence
atgctactttgggccagtctgttagcttttgcgcccgtgtgcgggcagagcgcagccgctcacaaaccagttatcagcgtgcatcctccttggacgaccttttttaagggagagcgcgttaccctgacatgcaatggctttcagttttacgcaacagaaaagacgacttggtatcacaggcattactggggcgagaagcttacgcttacccctggaaacaccctggaggtgagagagtccggcttataccggtgccaggcgagaggctccccgcggagcaatccagtgaggctgctgttcagcagcgactctcttatcctgcaagcaccatactcagtgtttgagggcgataccttagtactaagatgccaccggcggcggaaggaaaaactcaccgctgttaagtatacctggaacgggaatatcctgtccatctctaacaaatcatgggacttactaataccccaggcgagtagtaataacaatggcaattatcgatgtatcggctacggggacgagaatgacgtctttcgatccaacttcaagatcattaagattcaggagctgtttccccatccggaactcaaggccacagatagccaaccaactgagggtaatagcgtaaatttatcttgtgagacgcagctgcccccagaacgctcagacaccccacttcattttaatttctttcgcgatggggaagtgatcctgtcagactggtccacctaccctgagttgcagttgcccaccgtttggcgggaaaattcaggcagctactggtgtggagccgagacggtgcgcgggaatattcacaaacatagcccaagccttcagatacacgtgcagcgcattcccgttagcggcgtgctcctggagacccagccatccggtggccaagcggtggaaggtgaaatgctggtgctggtgtgtagcgttgccgaggggacaggcgacaccacctttagttggcatcgggaggacatgcaggaaagtttgggtaggaagacccaaagatcgctccgagctgagctggaattaccggctattcgacagtcccacgccggtggttactactgcaccgcagacaactcatacggtcctgtgcagtccatggtgttgaacgtgacagttcgggaaacgccaggtaacagagacgggctcgtcgctgctggtgcaaccggggggctcctgtctgccctgcttctcgctgtggccctgctctttcattgttggcgccggaggaaatccggtgtgggattcctcggggacgagacgcgtctcccccccgcacctggccctggggagtcctcgcattcgatttgccccgcacaagtggaactgcagtccctgtacgtcgacgttcaccctaagaaaggtgacctggtttattcggagatccagaccactcagctgggcgaggaagaggaggccaacacgagtcgaacactcctggaagacaaagatgtttctgtcgtctactccgaggtgaagacccaacatcctgataacagtgccggaaaaatttcctcaaaggacgaggagagttag

SEQ ID NO: 221439 - DNA, 1548 bp, Artificial Sequence
  derived and/or modified sequence
atgctgctgtgggccagcctgctggcctttgcccctgtgtgtggccagagcgctgctgcccacaagcctgtgatctctgtgcaccccccctggaccaccttcttcaagggggagcgggtgaccctgacctgcaatggcttccagttctacgccacagagaagaccacctggtaccaccgccactactggggcgagaagctgaccctgaccccaggcaacaccctggaggtgcgggagagcggcctgtaccgctgccaggcccggggcagccccaggagcaaccctgtgcggctgctcttcagcagtgacagcctcatcctgcaggccccctacagcgtgtttgaaggagacaccctggtgctgcgctgccacagaagaaggaaggagaagctgacagctgtgaagtacacctggaatggaaacatcctgagcatcagcaacaagtcctgggacctgctgatcccccaggccagcagcaacaacaacggcaactaccgctgcatcggctatggagatgaaaatgatgtgttccgcagcaacttcaagatcatcaagatccaggagctgttcccccaccctgagctgaaggccacagacagccagcccacagagggcaacagcgtgaacctgagctgtgagacccagctgcccccagagaggagtgacacccccctgcacttcaacttcttcagagatggagaggtgatcctgagtgactggagcacctacccagagctgcagctgcccaccgtgtggagggagaacagcggcagctactggtgtggggctgagaccgtgcggggcaacatccacaagcacagccccagcctgcagatccacgtgcagagaattcctgtgtctggagtgctgctggagacccagcccagcggcggccaggccgtggagggggagatgctggtgctggtgtgcagcgtggccgagggcaccggggacaccaccttctcctggcaccgggaggacatgcaggagagcctgggcaggaagacccagaggagcctgcgggcagagctggagctgcctgccatccggcagagccacgccggcggctactactgcacagctgacaacagctatggccctgtgcagagcatggtgctgaatgtgacagtgcgggagaccccaggcaacagagatggcctggtggccgccggggccactggaggcctgctgagcgccctgctgctggccgtggccctgctcttccactgctggaggaggaggaagagcggcgtgggcttcctgggagatgagacccggctgcccccagcccctggccctggagagagcagccacagcatctgcccagcccaggtggagctgcagagcctgtatgtggatgtgcaccccaagaagggggacctggtgtacagcgagatccagaccacccagctgggggaggaggaggaggccaacaccagcaggaccctgctggaggacaaggatgtgtctgtggtgtacagcgaggtgaagacccagcacccagacaacagcgctgggaagatcagcagcaaggatgaggagagctag

SEQ ID NO: 221440 - DNA, 1548 bp, Artificial Sequence
  derived and/or modified sequence
atgctgctgtgggccagcctgctggccttcgcccccgtgtgcggccagtcggcagccgctcataagcctgtcatctccgttcatcctccatggacaacattctttaaaggcgagagggtgaccttgacctgtaacggcttccagttctacgcaaccgaaaagactacctggtatcatcgtcattactggggtgaaaagctcaccctgacgcccgggaacactttggaggtgagagagagtgggctgtacagatgccaagcacgcggctctcccagaagcaatcctgtgagactgcttttctcctcagattccctcatattgcaagctccttattccgtgttcgaaggcgatacactggtgttgcgctgtcaccggcgaaggaaggagaagctgactgctgtcaaatacacttggaacgggaatattctgtcgatctcaaataaaagttgggatctcctcatcccccaggccagctcaaataataacggcaactacagatgtatcgggtacggtgacgaaaatgacgtctttaggtcgaattttaaaatcatcaagattcaggagctgtttcctcaccccgaactgaaagctacagatagccagcccaccgaaggcaattccgtcaatctgagttgtgaaacacaactgccccccgagcgaagcgacacaccgttacattttaatttttttcgtgatggagaagtgatcctcagcgattggagtacttaccctgaactccagctgccgaccgtttggcgggagaactcgggatcatactggtgtggtgcggaaacggtccgcgggaacattcacaagcacagccctagcctgcagatccacgttcaacgtatccctgtgtcgggtgtactcctcgaaacccagccaagtggaggtcaggcggtggagggcgagatgttggtgttggtctgctcagtcgccgagggcacgggggatactacattttcatggcacagggaggatatgcaggagagtctggggaggaagactcagcgatctttaagggcggaattagagctgcccgccataaggcagagccacgccggaggatactactgcactgcagataacagctacgggccagtgcaaagcatggtccttaacgttaccgtgagggagacccctggcaaccgggatggacttgttgctgcaggcgcaacaggcggacttctctcagctttgcttctcgcggtggcactgctctttcattgctggcgtcgacggaaatcaggagtaggcttcttaggtgacgagacccggctgcccccggctcctgggcccggagagagctcccactcgatttgtccagctcaagttgagcttcagtctttatatgtagacgtccatcccaagaaaggggacctcgtttactccgaaatacaaaccacccagttgggtgaggaagaggaagcaaatacctctcgaacactcctcgaggacaaggacgtgagtgtggtatattcggaggtgaaaacacaacaccctgacaactccgccggaaaaatctcctccaaagacgaagaaagttag

SEQ ID NO: 221441 - DNA, 1548 bp, Artificial Sequence
  derived and/or modified sequence
atgctgttgtgggccagcttgcttgctttcgcacccgtctgtggtcaatctgccgctgctcataaacccgttattagcgttcacccaccctggactacattctttaagggtgagcgcgtgactctaacctgcaatggctttcagttttatgccacggagaaaacaacctggtatcaccggcattattggggtgaaaaactgaccctcaccccagggaacacactcgaggtccgtgaatcgggtctctaccggtgtcaggccaggggttcgcctaggtcaaatcctgtgcggctgttgttcagctctgactcactgattctgcaggctccctatagcgtgttcgaaggggacacactggtcctccgctgtcaccggaggagaaaagaaaagttaaccgctgtcaaatatacgtggaatggaaatatcttgtccattagcaataagagctgggacctgcttattccgcaggcctcatcaaataacaatggaaactacagatgcattggttatggggatgagaatgatgtttttaggtccaactttaagattattaagatccaagaattgtttcctcatcccgaactaaaggccactgactcacagcccacggaggggaatagcgtaaatctcagctgcgagacgcagctgccgccagagcgtagcgacactcccctgcactttaacttttttcgggacggggaagtcatattatcggactggagcacttatccggagttgcagcttccaaccgtgtggagagagaacagcggctcttactggtgtggagctgaaactgtaagaggcaacatacataaacactcccccagccttcagattcatgtccaacggattccagtcagtggagtccttcttgaaactcagccgagcgggggtcaggcagtggaaggagaaatgctcgtcctcgtgtgctcagtggccgaaggcactggcgacacgacattttcgtggcaccgcgaggacatgcaggaaagcctgggccgtaaaactcagaggtcactgagagctgagctggagctacccgctattcgccagtctcatgccggaggatactactgtaccgctgacaattcttatggaccagttcagagtatggtgcttaacgtaacagtgagggagaccccaggcaatcgggacggcttggtggctgcaggagctacaggaggtctactatcagctctgctcctggctgttgccctgctgtttcattgctggaggaggcgcaaatccggggtaggattcctgggggacgagacgcgtctgccacccgctccaggacccggtgagagttcgcactctatctgcccagcccaggttgagttgcagagtctgtacgtcgatgtccatccaaaaaaaggagatctcgtgtattcggagatccagacaactcaactcggagaggaggaagaggctaatacgtcaagaactctgctcgaagataaggacgtgagcgtagtgtattccgaagtaaagacccagcatcctgacaactccgccggaaaaatatcctcgaaagacgaggagtcctag

SEQ ID NO: 221442 - protein, 588 aa, Artificial Sequence
  derived and/or modified sequence
MPQLGGGGGGGGGGSGGGGGSSAGAAGGGDDLGANDELIPFQDEGGEEQEPSSDSASAQRDLDEVKSSLVNESENQSSSSDSEAERRPQPVRDTFQKPRDYFAEVRRPQDSAFFKGPPYPGYPFLMIPDLSSPYLSNGPLSPGGARTYLQMKWPLLDVPSSATVKDTRSPSPAHLSNKVPVVQHPHHMHPLTPLITYSNDHFSPGSPPTHLSPEIDPKTGIPRPPHPSELSPYYPLSPGAVGQIPHPLGWLVPQQGQPMYSLPPGGFRHPYPALAMNASMSSLVSSRFSPHMVAPAHPGLPTSGIPHPAIVSPIVKQEPAPPSLSPAVSVKSPVTVKKEEEKKPHVKKPLNAFMLYMKEMRAKVVAECTLKESAAINQILGRKWHNLSREEQAKYYELARKERQLHSQLYPTWSARDNYGKKKKRKREKQLSQTQSQQQVQEAEGALASKSKKPCVQYLPPEKPCDSPASSHGSMLDSPATPSAALASPAAPAATHSEQAQPLSLTTKPETRAQLALHSAAFLSAKAAASSSGQMGSQPPLLSRPLPLGSMPTALLASPPSFPATLHAHQALPVLQAQPLSLVTKSAH

SEQ ID NO: 221443 - DNA, 1767 bp, Artificial Sequence
  derived and/or modified sequence
atgccgcaactgggagggggtggaggcggcgggggcgggggctcgggcggcggcgggggctcatctgctggcgccgctgggggtggtgacgacctgggagctaacgatgagctgatacctttccaggatgagggcggggaagagcaggagccatcgtcagactcggcatcagcccaacgtgatctggatgaagtgaagtccagcctcgtgaacgaaagcgagaatcagagcagcagctcggactccgaggcggagagacgcccccagcccgtaagggacacattccaaaagccccgcgactactttgccgaggtgcgccgcccccaggacagcgctttctttaaggggccaccctatccgggttacccatttctaatgatccctgatttgtctagtccctatctgagtaacgggccccttagcccgggcggggcaaggacttatcttcagatgaagtggccactgcttgatgtaccatcctctgctacggtcaaggatacgcgtagtcctagcccggcgcatctgtcaaataaggtgccagtagtccagcacccacatcacatgcatcctctgacacccctgataacgtacagtaacgaccacttctctcccggttccccaccaacgcacctcagccccgaaatcgatccaaagacaggaattccaaggcccccgcaccccagtgaactgtccccttactatcccctcagccctggagcggtgggacaaattccgcatcctttgggctggcttgtgccacagcagggtcaacctatgtactccctgccgccgggaggattcaggcacccatacccagcattggccatgaacgcttccatgtcctcgcttgtttctagtcgtttctccccacatatggtcgcacccgcacaccccgggctgcctaccagcggaatacctcaccccgccattgtctctccaattgttaaacaagagccggccccgcctagcctgtcccccgccgtctctgtaaaaagcccggtgactgttaaaaaggaggaggagaagaagccccacgtgaaaaagcctttgaacgcattcatgttgtatatgaaggaaatgcgcgcaaaggtggtggctgagtgtacattgaaggagagcgctgccatcaaccaaattctgggcaggaaatggcacaacctctcgcgagaggaacaggccaaatactacgaacttgcccgtaaagagcggcagctccacagtcagctctaccctacctggtccgcaagggacaactatggcaagaaaaaaaaacgcaaacgcgagaaacagttaagtcagactcagtcgcaacagcaggtacaagaagctgagggcgccctggcgtcgaagagcaagaagccctgtgtgcaatatcttccccctgagaaaccttgtgattcccccgcttctagccacggcagtatgctcgactcacccgccacgccttccgcagccctggcaagtcccgctgcgccggcagctacacactctgagcaggcccagcctttgtccctaaccaccaaacccgaaactcgagcacagctggccctgcactcggctgctttcttgtctgccaaggcagccgcctcttcctccgggcagatggggagccaacccccgttgttatcgcgccctctcccattgggctctatgcccaccgctctgctcgcttcccccccaagtttcccagcaactctccacgcccaccaggccctcccggttctccaagctcagcccctttcactcgtcacgaagtctgcccactag

SEQ ID NO: 221444 - DNA, 1767 bp, Artificial Sequence
  derived and/or modified sequence
atgccccagctgggcggcggcggcggcggcggcggcggcggcagcggcggcggcggcggcagcagcgctggagctgctggaggaggagatgacctgggcgccaatgatgagctgatccccttccaggatgaaggaggagaggagcaggagcccagcagtgacagcgccagcgcccagagggacctggatgaggtgaagagcagcctggtgaatgaaagtgagaaccagagcagcagcagtgacagcgaggccgagcggcggccccagcctgtgcgggacaccttccagaagccccgggactactttgctgaggtgcggcggccccaggacagcgccttcttcaagggccccccctacccaggctaccccttcctgatgatcccagacctgagcagcccctacctgagcaatggccccctgagccctgggggcgcccggacctacctgcagatgaagtggcccctgctggatgtgcccagcagcgccaccgtgaaggacaccaggagccccagccctgcccacctgagcaacaaggtgcctgtggtgcagcacccccaccacatgcaccccctgacccccctcatcacctacagcaatgaccacttcagccctggcagcccccccacccacctgagccctgagattgaccccaagacaggcatcccccggcccccccaccccagcgagctgagcccctactaccccctgagccctggagctgtgggccagatcccccaccccctgggctggctggtgccccagcagggccagcccatgtacagcctgcccccaggcggcttccgccacccctacccagccctggccatgaatgcctccatgagcagcctggtgagcagccgcttcagcccccacatggtggccccagcccaccctggcctgcccaccagcggcatcccccacccagccatcgtgagccccatcgtgaagcaggagcccgccccacccagcctgagccctgctgtgtctgtgaagagccctgtgacagtgaagaaggaggaggagaagaagccccacgtgaagaagcccctgaatgccttcatgctgtacatgaaggagatgagggccaaggtggtggctgaatgtaccctgaaggagagcgctgccatcaaccagatcctgggcaggaagtggcacaacctgagccgggaggagcaggccaagtactatgagctggccaggaaggagcggcagctgcacagccagctgtaccccacctggagcgcccgggacaactacggcaagaagaagaagaggaagcgggagaagcagctgagccagacccagagccagcagcaggtgcaggaggccgagggcgccctggccagcaagagcaagaagccctgtgtgcagtacctgcccccagagaagccctgtgacagccctgccagcagccacggctccatgctggacagccctgccaccccatctgctgccctggccagccctgctgccccagctgccacccacagcgagcaggcccagcccctgagcctgaccaccaagccagagacccgggcccagctggccctgcacagcgctgccttcctgagcgccaaggccgccgccagcagcagcggccagatgggcagccagccccccctgctgagccggcccctgcccctgggctccatgcccacagccctgctggccagccccccatccttccctgccaccctgcacgcccaccaggccctgcctgtgctgcaggcccagcccctgagcctggtgaccaagagcgcccactag

SEQ ID NO: 221445 - DNA, 1767 bp, Artificial Sequence
  derived and/or modified sequence
atgccccagctgggcggcggcggcggcggcggcggcggcggcagcggaggtggtggcggaagcagtgccggggcggccggaggcggggatgatctgggtgctaacgacgagttgattccgtttcaagacgaaggtggtgaggaacaggaaccaagctccgactctgccagtgcgcagcgagaccttgatgaggttaaatcttcgttggtgaatgaatctgaaaaccaatcctctagctctgatagcgaagccgaacgtagaccacagcctgttagagatacatttcaaaaaccacgcgactacttcgctgaagttcgtagaccacaggattctgccttcttcaagggtcccccgtacccagggtacccatttctgatgatccctgacttatcatccccttatttgagtaacggccccctctcccctggaggcgctaggacatacctgcaaatgaagtggcccctcctggatgtgccgagctcagccacggtgaaagatacccgctctcctagccctgcacatcttagtaacaaggtgccagtcgtccagcacccacaccacatgcatcctctgactcctctgattacgtatagcaatgaccacttctcgcctgggtcgccgcctacccatctgtcccccgagatagatccgaagactgggattccgcgccctccacaccctagtgagctctccccctactacccactttcacccggcgctgttgggcaaattcctcacccattgggctggttggtgcctcagcagggccagcccatgtattctctgcctccaggaggatttagacatccctaccccgccctggcgatgaatgcttccatgtcctctctggtgtcctccagattttcgccacacatggttgcccccgctcaccctggactccccacgtctggcatccctcaccctgctattgtttcccctatcgtaaaacaggagcccgctccacccagtctgtctcctgccgtcagtgtcaaatcccccgtgactgtgaaaaaggaggaggagaagaaaccccatgtgaaaaaaccccttaatgctttcatgctgtacatgaaagagatgcgcgctaaggttgttgctgagtgcaccctgaaggagtccgctgccattaatcagatcctgggcagaaagtggcacaacctatctagagaggaacaggctaagtattatgagctggctcgcaaagagcgccagctgcactctcagctttatcctacctggtccgcgcgggataactatgggaaaaagaagaaaagaaaacgcgagaagcagctgtctcagacccagagtcaacagcaggtccaggaagcggaaggagctttagcttccaaaagtaagaagccttgcgttcagtacctccctcctgagaagccttgtgattccccagctagctctcacgggtccatgctcgactcacctgcgactccttccgccgcccttgccagtcccgccgctccggctgccacccactccgaacaggctcagcccttgtctctcactacaaaacctgaaacacgcgcccagctcgccctccactccgctgcctttctatctgccaaagccgccgcaagttccagcggccagatgggctctcaacccccactcctaagcaggcctctgcctctgggaagcatgcccaccgccctgttggcatccccgccatcctttccagccactcttcatgcccatcaagccctccccgtattgcaggcgcaacccctcagtctcgtcaccaagtccgctcactag

SEQ ID NO: 221446 - DNA, 1767 bp, Artificial Sequence
  derived and/or modified sequence
atgccacagcttgggggtgggggaggcggagggggaggcggtagtggaggcggtggaggaagcagcgcgggagccgctggcggaggtgatgatctcggcgcaaacgatgagcttattccattccaggacgaaggaggcgaagagcaggaaccatcgtccgacagcgctagcgcccaacgggacctggacgaagtgaaaagtagcctggtaaacgaaagcgaaaaccagtcatccagttcagactccgaagcagagagaaggccacaacccgttcgtgacacttttcagaaacctagggattacttcgctgaagtgaggcggccacaagattccgctttcttcaaaggtccgccttatccagggtacccatttctgatgatcccagacctcagtagcccatatctctcaaatggaccattatcaccaggcggtgcccgaacgtacttacagatgaaatggcccctgctcgatgtgccttcctccgcgaccgtaaaagatacacggtcgccctcacccgcacatttgtcaaacaaagtgcccgttgtacagcatccacatcacatgcatccacttacaccccttatcacatattctaatgatcactttagtcctgggtcacctccaacacatttgagtccagagattgacccaaaaacaggaatccctcggccaccccatccaagcgagctgagtccttattatccactttcacctggcgcagttggtcagattccacaccccctcggttggctggtaccgcagcagggtcagcccatgtactccctgccacccggaggtttccggcatccctatcccgcattagccatgaatgcctcgatgtcaagtctagtgtcaagtagatttagcccacatatggttgcaccagcccacccagggctgccgacctcaggcattcctcaccccgctattgtgtctcctatcgtaaagcaggagcctgcccctccaagcctgagccccgctgtgtccgtgaagtctcctgtaactgtaaaaaaggaggaggagaaaaaaccgcacgtaaagaagcctttgaatgcttttatgctatacatgaaagagatgagagccaaggtggtggccgagtgcactctgaaagagagtgccgctattaaccagatactgggaagaaagtggcataacctcagcagggaggaacaagcgaagtactacgagcttgccagaaaggaaaggcagttgcattcgcaactgtacccaacctggagcgccagagataattatggaaagaagaaaaagcggaagcgcgagaaacaactgtctcaaacccagtcacagcagcaagtccaagaggccgagggggcactagcctcaaagagtaaaaaaccatgcgtgcagtacctgccacctgaaaaaccgtgcgacagccctgctagtagccacggctccatgctggactcaccagcgactccatcagccgctcttgcctctccggctgcaccagccgcaactcacagcgagcaggcccaaccactgtccttgactaccaaacccgaaacgagagcacagttggccctccattcagccgcattcctgtctgccaaagccgctgcatcttcctccggccagatgggatcccagccacctttactgtcaaggcctttacccttgggtagcatgcctaccgcgctgttagcatcacctccaagcttcccagctacgctccatgcgcaccaagcccttcctgtcctgcaggcccagccactgtctttggtaacaaaatctgcacactag

SEQ ID NO: 221447 - DNA, 2968 bp, Artificial Sequence
  derived and/or modified sequence
ggccaggggctgggacgccccggcggagcaggcggcggcggtggcgagttggggagccctaggctcggcgctgccggaggggcccgagccgagccgcctgcgccccggccgggcagcgccgggcccgcttcccgcggggccacgccctgtcaaactttgttgcggcggctagcgcagcgggcccgcaagcgggcgggaggggcgccgggccgggccgggcagggcgcgggcggctaggggctccgagagcggcggccccggcccgcggccccaccatgccccagctcggcggcgggggcggcggcggcggcggcggcagcgggggaggcggcggctccagcgccggggcggccggcggaggggacgacctcggggcgaacgacgagctgatccccttccaggacgaggggggcgaggagcaggagccgagcagcgatagcgcctcggcgcagcgggacctagacgaggtcaagtcgtccctggtcaacgagtcggagaaccagagcagcagctcggactcggaggcggagaggcgcccgcagcccgtccgggacactttccagaagccgcgggactatttcgccgaagtgagaaggcctcaggacagcgcgttctttaaaggacccccgtaccctgggtaccccttcctgatgatcccggacctgagcagcccgtacctctccaacggacccctgtctcccggaggagcgcgcacctacctgcagatgaaatggcccctcctcgatgtcccctccagcgccacagtcaaggacacgaggtcaccatctccagcacacttgtctaataaagttcctgtcgttcagcacccgcatcacatgcatccgctgactcccctcatcacctacagcaatgaccacttctcccccggctcccctcccacccacctctccccagagatcgatccaaagacaggaatcccccggccccctcacccatccgagctgtcaccgtattacccactctctcccggagctgtcggacaaatcccccaccccctcggctggctcgtcccacagcaaggccagcccatgtactcccttcctcccggtggcttccggcacccttaccccgccctcgccatgaacgcctcgatgtccagcctggtctccagtcggttctctcctcacatggtggctcctgcccaccctggcctgcccacctcagggatcccccaccctgccatcgtctcccccatcgtcaagcaggaaccggcaccccccagcctgagccctgcagtgagcgtgaaatcaccagtcaccgtgaaaaaggaggaggaaaagaagccccacgtgaagaagcctctgaatgccttcatgttgtatatgaaggagatgagggccaaggtggtggctgagtgcaccctgaaggaaagtgcagccattaaccagatccttggaagaaagtggcacaacctgtctcgagaagaacaggccaagtactacgagctggcccggaaggagcggcagcttcactcgcagctctacccaacctggtcagcccgggacaactatggtaagaaaaagaagaggaagagagaaaagcagctgtcccagacacagtcacagcagcaagtccaggaggcagagggtgccctggcctccaagagcaagaagccatgtgttcagtacctgccccccgagaagccctgtgacagccctgcctcctcccacgggagcatgctggactccccggccactccctctgcagctttggcctcaccagctgcccctgctgccacccattcggagcaagcccagcccctctccctcaccaccaaaccagaaacccgggcccagctggctctccactctgccgccttcctgtcggctaaggctgcagcctcctcctctgggcagatgggcagccagcctcccctcctgtcccggcccctcccccttgggtccatgcccacagctctgctggcctctcccccgtccttccccgccacgctccatgcccaccaggccctcccggtgctacaggcccagcctctttccctggtcaccaagtctgcccactaagctccccccgacccctgcaggctgtcacatgactcattgagtagtaatgattcagaagaaaaagaaaaaggagactttattggtcaatatttgaccactctggactgttctgtaaagtggctggtaacaacagcactttacagtttgtagatgtaaccagtagctgatcttaaggcttttttaaaaaacaaaacaaaacaacaaaaaaaaatctttataagaaagagaactgaaaagtagcgtgctattcgtcctgtaggtgctgtggtggatggacctgggcagagggcacttctctctcttacctctcttgcactttctgtctcctgtctcttctcgcccctgccgcctgccccagcttccccgactccatctgcagctctgccattgtgacatttcctgttacccagcccaagttttcatcgtctgctcaataccgtgggttcttcttcgtcctctgtcctctgcccagtgtgaggccatcaccatgtgagaagacatcttggcctgatttgctgccaccagcgtcccctccctcagtgggcccgaactcgccagccccagctttcagtggagaaagcggtcctctgaaatggtttcctcccaacccccgcatttaaagggactcaaggtgcctgccacttcctcagcgaagaagtctgtgttcctccccgtccttgccagtggcgatcatcccttcacaatcccagagtggcaggcgggaccggccccatggtctggctcctgtcacctgggtccgtgccagcacaatctgccaaagttctagagaccctgttcccttccccatcacctcacatgcttcttctgtgtgtatttctttttgtttttatggtttttggagcaatttaaactcccagttgtttattttcacaaaagaaaataaaattgcagttgcaagacctttt

SEQ ID NO: 221448 - DNA, 1767 bp, Artificial Sequence
  derived and/or modified sequence
atgccccagctgggcggcggcggcggcggcggcggcggcggcagcggcggcggcggcggcagcagcgccggcgccgccggcggcggcgacgacctgggcgccaacgacgagctgatccccttccaggacgagggcggcgaggagcaggagcccagcagcgacagcgccagcgcccagagagacctggacgaggtgaagagcagcctggtgaacgagagcgagaaccagagcagcagcagcgacagcgaggccgagagaagaccccagcccgtgagagacaccttccagaagcccagagactacttcgccgaggtgagaagaccccaggacagcgccttcttcaagggccccccctaccccggctaccccttcctgatgatccccgacctgagcagcccctacctgagcaacggccccctgagccccggcggcgccagaacctacctgcagatgaagtggcccctgctggacgtgcccagcagcgccaccgtgaaggacaccagaagccccagccccgcccacctgagcaacaaggtgcccgtggtgcagcacccccaccacatgcaccccctgacccccctgatcacctacagcaacgaccacttcagccccggcagcccccccacccacctgagccccgagatcgaccccaagaccggcatccccagacccccccaccccagcgagctgagcccctactaccccctgagccccggcgccgtgggccagatcccccaccccctgggctggctggtgccccagcagggccagcccatgtacagcctgccccccggcggcttcagacacccctaccccgccctggccatgaacgccagcatgagcagcctggtgagcagcagattcagcccccacatggtggcccccgcccaccccggcctgcccaccagcggcatcccccaccccgccatcgtgagccccatcgtgaagcaggagcccgccccccccagcctgagccccgccgtgagcgtgaagagccccgtgaccgtgaagaaggaggaggagaagaagccccacgtgaagaagcccctgaacgccttcatgctgtacatgaaggagatgagagccaaggtggtggccgagtgcaccctgaaggagagcgccgccatcaaccagatcctgggcagaaagtggcacaacctgagcagagaggagcaggccaagtactacgagctggccagaaaggagagacagctgcacagccagctgtaccccacctggagcgccagagacaactacggcaagaagaagaagagaaagagagagaagcagctgagccagacccagagccagcagcaggtgcaggaggccgagggcgccctggccagcaagagcaagaagccctgcgtgcagtacctgccccccgagaagccctgcgacagccccgccagcagccacggcagcatgctggacagccccgccacccccagcgccgccctggccagccccgccgcccccgccgccacccacagcgagcaggcccagcccctgagcctgaccaccaagcccgagaccagagcccagctggccctgcacagcgccgccttcctgagcgccaaggccgccgccagcagcagcggccagatgggcagccagccccccctgctgagcagacccctgcccctgggcagcatgcccaccgccctgctggccagcccccccagcttccccgccaccctgcacgcccaccaggccctgcccgtgctgcaggcccagcccctgagcctggtgaccaagagcgcccactag

SEQ ID NO: 221449 - protein, 496 aa, Artificial Sequence
  derived and/or modified sequence
MALWRGSAYAGFLALAVGCVFLLEPELPGSALRSLWSSLCLGPAPAPPGPVSPEGRLAAAWDALIVRPVRRWRRVAVGVNACVDVVLSGVKLLQALGLSPGNGKDHSILHSRNDLEEAFIHFMGKGAAAERFFSDKETFHDIAQVASEFPGAQHYVGGNAALIGQKFAANSDLKVLLCGPVGPKLHELLDDNVFVPPESLQEVDEFHLILEYQAGEEWGQLKAPHANRFIFSHDLSNGAMNMLEVFVSSLEEFQPDLVVLSGLHMMEGQSKELQRKRLLEVVTSISDIPTGIPVHLELASMTNRELMSSIVHQVFPAVTSLGLNEQELLFLTQSASGPHSSLSSWNGVPDVGMVSDILFWILKEHGRSKSRASDLTRIHFHTLVYHILATVDGHWANQLAAVAAGARVAGTQACATETIDTSRVSLRAPQEFMTSHSEAGSRIVLNPNKPVVEWHREGISFHFTPVLVCKDPIRTVGLGDAISAEGLFYSEVHPHY

SEQ ID NO: 221450 - protein, 222 aa, Artificial Sequence
  derived and/or modified sequence
MAASCRVVTSISDIPTGIPVHLELASMTNRELMSSIVHQVFPAVTSLGLNEQELLFLTQSASGPHSSLSSWNGVPDVGMVSDILFWILKEHGRSKSRASDLTRIHFHTLVYHILATVDGHWANQLAAVAAGARVAGTQACATETIDTSRVSLRAPQEFMTSHSEAGSRIVLNPNKPVVEWHREGISFHFTPVLVCKDPIRTVGLGDAISAEGLFYSEVHPHY

SEQ ID NO: 221451 - DNA, 2565 bp, Artificial Sequence
  derived and/or modified sequence
gtagcgcttgtgtcgacatcggcgcgcgccgagcccggaagaggcgcgggctaggaaaggagttggttcgcgcaggtgcggcgcctgggtccccatggcgctgtggcgcggctccgcgtacgcgggcttcctggcgctggccgtgggctgcgtcttcctgctggagccagagctgccaggctcggcgctgcgctctctctggagctcgctgtgtctggggcccgcgcctgcgcccccgggacccgtctcccccgagggccggttggcggcagcctgggacgcgcttatcgtgcggccagtccggcgctggcgccgcgtggcagtgggagtcaatgcatgtgttgatgtggtgctctcaggggtgaagctcttgcaggcacttggccttagtcctgggaatgggaaagatcacagcattctgcattcaaggaatgatctggaagaagccttcattcacttcatggggaagggagcagctgctgagcgcttcttcagtgataaggaaacttttcacgacattgcccaggttgcgtcagagttcccaggagcccagcactatgtaggaggaaatgcagctttaattggacagaaatttgcagccaactcagatttaaaggttcttctttgcggtccagttggtccaaagctacatgagcttcttgatgacaatgtctttgttccaccagagtcattgcaggaagtggatgagttccacctcattttagagtatcaagcaggggaggagtggggccagttaaaagctccccatgccaaccgattcatcttctctcacgacctctccaacggggccatgaatatgctggaggtgtttgtgtctagcctggaggagtttcagccagacctggtggtcctctctggattgcacatgatggagggacaaagcaaggagctccagaggaagagactcttggaggttgtaacctccatttctgacatccccactggtattccagttcacctagagctggccagtatgactaacagggagctcatgagcagcattgtccatcaggtctttcccgcggtgacttcccttgggctgaatgaacaggagctgttatttctcacccagtcagcctctggacctcactcttctctctcttcctggaacggtgttcctgatgtgggcatggtcagtgacatcctcttctggatcttgaaagaacatgggaggagtaaaagcagagcctcggatctcaccaggatccatttccacacgctggtctaccacatcctggcaactgtggatggacactgggccaaccagctggcagccgtggctgcaggagctcgtgtggctgggacacaggcctgcgccacagaaaccatagacaccagccgagtgtctctgagggcaccccaagagttcatgacttcccattcggaggcaggctccaggattgtattaaacccaaacaagccagtagtagaatggcacagagagggaatatccttccacttcacaccagtattggtgtgtaaagaccccattcgaactgtaggccttggagatgccatttcagccgaaggactcttctattcggaagtacaccctcactattaggaagattcttaggggtaatttttctgaggaaggagaactagccaacttaagaattacaggaagaaagtggtttggaagacagccaaagaaataaaagcagattaaactgtatcaggtacattccagcctgttggcaactccataaaaacatttcagattttaatccgaatttagctaatgagactggatttttgttttttatgttgtgtgtcacagagctaaaaactcagttcccaaatccccagtttatgcagcgccatcaggtattttaagctaaacttcttcacccctgagagcatgtcagctggagaaaagcagttcttccttgcccacttgagaagtgcacgcccactcacccaacatcctggtctctaggaaagcctcatgtgaggttcctctttctttcagctcagtgcccatgggcaaggatcatgatttccattccgtgttacaatgacaatatttaatgagcataaccttctcagtctcctgctctcaaatttaggacagagccgctaaggacaaaacaatccctcccgtgctttatgatggcagcaggggctggggagcctctgagggactctttcattctgcagttgtctggaagcctgggtggcgtcatgagctgaaggatcatgctttcctgtcctggctccataggttataggctggctggtgaaaggttcacgtggcccaggctgaacttcattgcctagctttggatgtgctttctgccataaagactgatttttgttcgttctgagccttcaaggaatttgttttttacaactggaatatgctcctgtgtgtgttaacagatcatggatgttttatgttttcactgatcatttaaagagtttgacctcagagctccaggatcatcagtaaatttgtcatgttatatatttatttttttataaatcaagacttctgtgtgctcttaaatatattaaaaacaatttacatttcaggaaaaaaaa

SEQ ID NO: 221452 - DNA, 1491 bp, Artificial Sequence
  derived and/or modified sequence
atggcattgtggagagggtcagcatacgcaggatttttagcactggctgtaggatgcgtgtttctgcttgaacccgagcttcctggctccgccttgcgctcgctctggtcttctttgtgtctcggaccagcgcctgccccccctgggcccgtgtcccctgagggacggctggctgcagcttgggacgctctgatcgttaggccagtacgaagatggaggcgggtggcagtgggggtaaatgcctgtgttgatgtggtactctctggagtgaaactgctgcaggcactcgggctcagtcccggcaatgggaaggaccactctattctccactcacggaacgacctggaggaggcctttattcatttcatgggtaaaggtgctgccgcagagcggttctttagtgacaaggaaacttttcacgacatcgcacaagtcgcctccgagttccctggagcccaacactacgtgggcgggaacgcggcactgattggacagaaattcgctgccaactccgacctgaaggttctgctatgtggccctgttggccccaagcttcacgaactgctggacgataacgttttcgtccccccagagtctctccaggaagtcgatgaattccacctgattctcgaataccaggctggggaagaatggggccagctcaaggccccacatgccaaccgcttcatctttagccacgatttgagcaacggcgctatgaacatgttagaggtctttgtttcatctctcgaagagtttcaaccagacctggtagtgctgagcggattgcatatgatggaagggcagagtaaggaactccaacgcaagcgcttattggaagtagtcactagcattagcgatatccctaccggcattcccgttcatctagaactggcttccatgaccaatagggaactgatgagcagcatcgttcaccaggtcttccccgcagtcacgtccctaggcctgaatgagcaggaattgttgttcctgacgcagtccgcatccggcccccattcttccctgagctcctggaatggcgttccagacgtcgggatggtctcagatatcctattctggattcttaaggagcacggccgctccaagtctagggcatccgatctcaccagaatccacttccataccttggtttatcacattctcgccaccgttgacgggcactgggctaaccagctggcagccgtcgcggccggcgccagagtggccggcacccaggcctgcgctaccgaaacaatcgatacaagccgggtatctctacgtgccccccaggaattcatgacctcacactctgaggccggttctagaatcgtcttgaatcccaataagccagtggtcgaatggcaccgcgagggcatttcctttcacttcactccagtcctcgtctgcaaggacccgattcggacggtgggcctgggcgatgccatttcagcagaaggactcttttacagtgaagtacatccacattattag

SEQ ID NO: 221453 - DNA, 669 bp, Artificial Sequence
  derived and/or modified sequence
atggccgctagttgtagagtggtcacttctatttcagatattcccaccggcattcccgtacacctggaattagcttcgatgactaatagagagctcatgtctagtatcgtgcaccaggtgtttcctgcagtcacgtctctcggactgaatgaacaggagttactgttcctgacccaaagcgcatcaggcccacatagcagcctgtctagctggaatggcgtgcctgatgtaggcatggtgagcgatattcttttctggatcctgaaagaacacggcagatctaagagccgagcttctgatctgacccggatccacttccacactctggtatatcatatcctagctaccgtggacggccattgggctaaccagctcgccgcagtcgccgccggcgccagggtcgccgggacacaggcctgtgctacggagactatcgacacctctagagtctctcttcgagccccccaggaatttatgactagccactctgaagccggctccagaatagtgttgaatccaaacaagcctgtggtggagtggcaccgggaaggcattagcttccactttactcctgtactggtgtgcaaggatcctattcggaccgtgggcctgggggacgctatcagcgctgaagggctcttttacagcgaagtgcatccgcactattag

SEQ ID NO: 221454 - DNA, 2557 bp, Artificial Sequence
  derived and/or modified sequence
gtagcgcttgtgtcgacatcggcgcgcgccgagcccggaagaggcgcgggctaggaaaggagttggttcgcgcaggtgcggcgcctgggtccccatggcgctgtggcgcggctccgcgtacgcgggcttcctggcgctggccgtgggctgcgtcttcctgctggagccagagctgccaggctcggcgctgcgctctctctggagctcgctgtgtctggggcccgcgcctgcgcccccgggacccgtctcccccgagggccggttggcggcagcctgggacgcgcttatcgtgcggccagtccggcgctggcgccgcgtggcagtgggagtcaatgcatgtgttgatgtggtgctctcaggggtgaagctcttgcaggcacttggccttagtcctgggaatgggaaagatcacagcattctgcattcaaggaatgatctggaagaagccttcattcacttcatggggaagggagcagctgctgagcgcttcttcagtgataaggaaacttttcacgacattgcccaggttgcatcagagttcccaggagcccagcactatgtaggaggaaatgcagctttaattggacagaaatttgcagccaactcagatttaaaggttcttctttgcggtccagttggtccaaagctacatgagcttcttgatgacaatgtctttgttccaccagagtcattgcaggaagtggatgagttccacctcattttagagtatcaagcaggggaggagtggggccagttaaaagctccccatgccaaccgattcatcttctctcacgacctctccaacggggccatgaatatgctggaggtgtttgtgtctagcctggaggagtttcagccagacctggtggtcctctctggattgcacatgatggagggacaaagcaaggagctccagaggaagagactcttggaggttgtaacctccatttctgacatccccactggtattccagttcacctagagctggccagtatgactaacagggagctcatgagcagcattgtccatcaggtctttcccgcggtgacttcccttgggctgaatgaacaggagctgttatttctcacccagtcagcctctggacctcactcttctctctcttcctggaacggtgttcctgatgtgggcatggtcagtgacatcctcttctggatcttgaaagaacatgggaggagtaaaagcagagcctcggatctcaccaggatccatttccacacgctggtctaccacatcctggcaactgtggatggacactgggccaaccagctggcagccgtggctgcaggagctcgtgtggctgggacacaggcctgcgccacagaaaccatagacaccagccgagtgtctctgagggcaccccaagagttcatgacttcccattcggaggcaggctccaggattgtattaaacccaaacaagccagtagtagaatggcacagagagggaatatccttccacttcacaccagtattggtgtgtaaagaccccattcgaactgtaggccttggagatgccatttcagccgaaggactcttctattcggaagtacaccctcactattaggaagattcttaggggtaatttttctgaggaaggagaactagccaacttaagaattacaggaagaaagtggtttggaagacagccaaagaaataaaagcagattaaactgtatcaggtacattccagcctgttggcaactccataaaaacatttcagattttaatccgaatttagctaatgagactggatttttgttttttatgttgtgtgtcacagagctaaaaactcagttcccaaatccccagtttatgcagcgccatcaggtattttaagctaaacttcttcacccctgagagcatgtcagctggagaaaagcagttcttccttgcccacttgagaagtgcacgcccactcacccaacatcctggtctctaggaaagcctcatgtgaggttcctctttctttcagctcagtgcccatgggcaaggatcatgatttccattccgtgttacaatgacaatatttaatgagcataaccttctcagtctcctgctctcaaatttaggacagagccgctaaggacaaaacaatccctcccgtgctttatgatggcagcaggggctggggagcctctgagggactctttcattctgcagttgtctggaagcctgggtggcgtcatgagctgaaggatcatgctttcctgtcctggctccataggttataggctggctggtgaaaggttcacgtggcccaggctgaacttcattgcctagctttggatgtgctttctgccataaagactgatttttgttcgttctgagccttcaaggaatttgttttttacaactggaatatgctcctgtgtgtgttaacagatcatggatgttttatgttttcactgatcatttaaagagtttgacctcagagctccaggatcatcagtaaatttgtcatgttatatatttatttttttataaatcaagacttctgtgtgctcttaaatatattaaaaacaatttacatttcagg

SEQ ID NO: 221455 - DNA, 808 bp, Artificial Sequence
  derived and/or modified sequence
atggctgcaagctgcagggttgtaacctccatttctgacatccccactggtattccagttcacctagagctggccagtatgactaacagggagctcatgagcagcattgtccatcaggtctttcccgcggtgacttcccttgggctgaatgaacaggagctgttatttctcacccagtcagcctctggacctcactcttctctctcttcctggaacggtgttcctgatgtgggcatggtcagtgacatcctcttctggatcttgaaagaacatgggaggagtaaaagcagagcctcggatctcaccaggatccatttccacacgctggtctaccacatcctggcaactgtggatggacactgggccaaccagctggcagccgtggctgcaggagctcgtgtggctgggacacaggcctgcgccacagaaaccatagacaccagccgagtgtctctgagggcaccccaagagttcatgacttcccattcggaggcaggctccaggattgtattaaacccaaacaagccagtagtagaatggcacagagagggaatatccttccacttcacaccagtattggtgtgtaaagaccccattcgaactgtaggccttggagatgccatttcagccgaaggactcttctattcggaagtacaccctcactattaggaagattcttaggggtaatttttctgaggaaggagaactagccaacttaagaattacaggaagaaagtggtttggaagacagccaaagaaataaaagcagattaaactgtatcaggtacattccagcctgttggcaact

SEQ ID NO: 221456 - DNA, 1491 bp, Artificial Sequence
  derived and/or modified sequence
atggccctgtggaggggcagcgcctatgccggcttcctggccctggccgtgggctgtgtgttcctgctggagcctgagctgcccggcagcgccctgcggagcctgtggagcagcctgtgcctgggccctgccccagcccctcctggccctgtgtccccagagggccgcctggccgccgcctgggatgccctgattgtgcggcctgtgcggcgctggaggagagtggccgtgggcgtgaatgcctgtgtggatgtggtgctgagcggcgtgaagctgctgcaggccctgggcctgagccctggaaatggcaaggaccacagcatcctgcacagcagaaatgacctggaggaggccttcatccacttcatgggcaaaggagctgctgctgagcgcttcttcagtgacaaggagaccttccatgacatcgcccaggtggccagcgagttccctggggcccagcactacgtgggcggcaatgctgccctgattggccagaagtttgctgccaacagcgacctgaaggtgctgctgtgtggccctgtgggccccaagctgcacgagctgctggatgacaacgtgtttgtgcccccagagagcctgcaggaggtggatgagttccacctgatcctggagtaccaggccggggaggagtggggccagctgaaggcccctcatgccaaccgcttcatcttcagccatgacctgagcaatggagccatgaacatgctggaggtgtttgtgagcagcctggaggagttccagcctgacctggtggtgctgagcggcctgcacatgatggagggccagagcaaggagctgcagaggaagaggctgctggaggtggtgaccagcatcagtgacatccccaccggcatccctgtgcacctggagctggcctccatgaccaaccgggagctgatgagcagcatcgtgcaccaggtgtttcctgctgtgaccagcctgggcctgaatgagcaggagctgctcttcctgacccagagcgccagcggcccccacagcagcctgagctcctggaatggagtgcctgatgtgggcatggtgtctgacatcctcttctggatcctgaaggagcacggccgcagcaagagccgggccagtgacctgacccgcatccacttccacaccctggtgtaccacatcctggccaccgtggatggccactgggccaaccagctggccgctgtggccgccggggcccgggtggccggcacccaggcctgtgccacagagaccatcgacaccagccgggtgtccctgcgggccccccaggagttcatgaccagccacagcgaggccggcagcagaattgtgctgaaccccaacaagcctgtggtggagtggcaccgggagggcatctccttccacttcacccctgtgctggtgtgcaaggaccccatcagaacagtgggcctgggagatgccatctctgctgagggcctcttctacagcgaggtgcacccccactactag

SEQ ID NO: 221457 - DNA, 669 bp, Artificial Sequence
  derived and/or modified sequence
atggccgccagctgccgggtggtgaccagcatcagtgacatccccaccggcatccctgtgcacctggagctggcctccatgaccaaccgggagctgatgagcagcatcgtgcaccaggtgtttcctgctgtgaccagcctgggcctgaatgagcaggagctgctcttcctgacccagagcgccagcggcccccacagcagcctgagctcctggaatggagtgcctgatgtgggcatggtgtctgacatcctcttctggatcctgaaggagcacggccgcagcaagagccgggccagtgacctgacccgcatccacttccacaccctggtgtaccacatcctggccaccgtggatggccactgggccaaccagctggccgctgtggccgccggggcccgggtggccggcacccaggcctgtgccacagagaccatcgacaccagccgggtgtccctgcgggccccccaggagttcatgaccagccacagcgaggccggcagcagaattgtgctgaaccccaacaagcctgtggtggagtggcaccgggagggcatctccttccacttcacccctgtgctggtgtgcaaggaccccatcagaacagtgggcctgggagatgccatctctgctgagggcctcttctacagcgaggtgcacccccactactag

SEQ ID NO: 221458 - DNA, 1491 bp, Artificial Sequence
  derived and/or modified sequence
atggccctgtggcggggcagcgcctacgccggcttcctggccctggctgtgggctgtgtcttcctccttgagcccgaactgccgggatctgcgcttaggtccttatggagttcactatgcctcgggcccgctcccgcccctccagggcctgtcagcccagaagggcggctggccgcagcctgggacgccctgattgttagacctgtcaggcggtggaggagagtagctgtaggggtgaacgcttgtgtggatgtggttctgtctggcgtgaagttgctccaagcactggggctgtcacccggtaacgggaaggaccactctatcttgcactcacgaaacgatctcgaggaggccttcattcatttcatggggaaaggagctgctgccgaacgattcttcagcgataaggagacatttcatgatatcgcccaggtcgcctccgagttcccaggggcacaacactatgtgggcggcaacgcagccctcattggacaaaagtttgccgccaactcagacctcaaggttttgctgtgcggcccagtaggccccaaactacatgagctgctggatgacaatgtgtttgtgcctccagagagcctgcaagaagttgacgagttccacctgatcctcgagtatcaagcgggggaagaatggggccagctgaaggctccacacgcgaacaggttcatcttctctcacgacttatcgaacggagccatgaacatgctggaggttttcgtctcatccttagaggaattccagccagacctagtggtgctgagtggcttgcatatgatggaaggtcaatccaaagaactccaaagaaagcggctactggaagtggtgaccagtatctctgacattcctactggaattccagtgcatctggaacttgcttctatgactaacagagagctcatgtcttccatcgtgcaccaagtgttcccagccgtcacatcactgggactcaacgaacaagagctccttttcctaactcaaagtgccagcggccctcacagctcactgagctcatggaatggcgtgccagatgtcggaatggtgtctgacatattattttggattctgaaagagcacggacgtagcaaatcaagagcttccgacctcacccgcatacactttcatacgctggtataccatatcctggccactgtggatggccactgggcaaatcagctggccgccgtggccgccggtgcccgcgtggctggcacacaagcctgtgcaaccgaaacaatcgacacctcacgagtgagccttcgggccccacaggagttcatgacttcgcacagcgaagctggctcgaggattgtgctcaaccctaataaaccggtggttgagtggcaccgggagggaatctcctttcacttcacaccagtattagtgtgtaaagatcctattcgtacagtcggccttggcgatgctatttccgcagaaggactgttttactctgaagtgcacccacactactag

SEQ ID NO: 221459 - DNA, 669 bp, Artificial Sequence
  derived and/or modified sequence
atggccgccagctgccgggtggtgaccagcatcagcgacatccccacaggcatacccgtgcatctggaattggcaagcatgacaaacagagaactgatgtcttcaatcgtgcatcaggtgttccctgcagtcacctcactggggttgaatgagcaagaacttctctttttgactcaatctgcctccggccctcattcgagccttagttcttggaacggagttcccgatgttggcatggtttctgacattttgttttggattttgaaagagcacgggaggtccaagagccgcgcttccgacttaaccagaatccattttcacacactggtgtaccacattctggccactgtcgacggacattgggccaaccagctggccgccgttgcagctggcgccagggtggcgggcacacaagcatgtgcaacagaaaccattgacacaagcagagtatcccttagggctccacaggaattcatgacaagtcatagtgaagctggctctagaattgtgcttaacccaaataaacccgtcgtcgaatggcatagagaaggcataagcttccattttaccccagtgctggtttgcaaggatcctatccgcacggtggggctcggcgatgcgatctctgccgaggggctgttctacagtgaagtgcaccctcattactag

SEQ ID NO: 221460 - DNA, 1491 bp, Artificial Sequence
  derived and/or modified sequence
atggctctctggaggggttctgcgtatgcaggtttcttagccttggccgtcggctgtgtctttttgctcgagcctgaacttcccggatctgcactcagaagcctttggagttcactgtgtctgggcccagcaccggctcccccagggcctgtctctcccgaaggcagactcgctgccgcatgggacgcactgatcgtgcgtcccgttcggcgttggagaagagtggccgtgggcgtgaatgcttgcgtggatgtcgtactctctggggtgaagctgctgcaggctctgggactgtcccctggaaacgggaaagaccactccatcttacactctcggaacgaccttgaggaagccttcatccacttcatgggcaagggcgctgctgccgagcgattcttcagtgataaggagaccttccacgatattgcacaggtggctagcgagttcccgggagctcagcactacgtgggtggtaacgctgcacttattgggcaaaagtttgcggctaattctgatctcaaagttctactgtgtggtccagtcggccctaagcttcacgaattgttggatgataacgtctttgtcccaccggaatcactgcaagaggtggatgagtttcaccttattctggaataccaggccggtgaggaatggggtcagttgaaggcaccgcacgccaatagattcatctttagtcatgatctctccaacggtgccatgaacatgcttgaggtgttcgtcagctccctcgaagagtttcagcctgatttggtcgtgttgtccgggttacatatgatggaaggccagagtaaagagttgcagagaaaaagactgctcgaggtcgtcacctccatcagcgacatcccaacaggcatccctgtgcatctggaactcgctagtatgaccaatcgcgagcttatgagttccattgtacatcaagtgttcccggctgtgacttctctggggctgaacgaacaggaactgctgtttctaacgcagtccgcaagtggtccccacagttccctgtcatcatggaatggcgttccggacgtcggcatggtgagcgatattctgttttggatcctgaaggaacacggacgctccaaaagccgggcatcagatctcacgcgcatacatttccacaccctggtttatcacatccttgccaccgtggatgggcactgggccaaccagctggcagccgtggcagcgggtgcacgcgttgctggtacacaggcctgtgcaactgagaccattgacacatccagagtgagcctgagagcaccacaagaattcatgaccagccactctgaagcaggtagtagaatcgtgctaaatccaaacaaaccagttgtggaatggcatagagagggcatatcctttcacttcacaccagtgttggtttgtaaggacccaattcgaaccgtcgggttaggggatgctatttctgccgaaggcctcttctatagcgaggttcacccccactactag

SEQ ID NO: 221461 - DNA, 669 bp, Artificial Sequence
  derived and/or modified sequence
atggctgctagctgtagggttgtgacctcaatttctgatatccccactggtattccagtacacctcgagttggcaagcatgaccaatagggaactcatgtcatcgattgttcatcaggtctttcctgccgttaccagtcttgggctcaacgagcaggaactcctctttctcacacaaagtgccagtggaccccactccagcctttcctcctggaatggtgtgccagatgtggggatggtgtccgacattcttttctggatcctcaaggagcatggtaggtctaaaagcagagcctcagatctcaccaggatccactttcatacgctagtgtaccacatcctggctactgtggacggacactgggcgaaccagcttgccgctgtggccgcaggcgcaagggtcgccggaacgcaagcttgcgcgacagagaccatcgacacctcccgggtcagtctgagagctccacaagagttcatgacttcacattcggaggcaggtagtcggattgtgctgaaccccaataagcccgtcgtggagtggcaccgtgaaggtatatcttttcacttcaccccagtgctggtctgtaaggacccaataagaacggtcgggctgggggacgccatctccgcagagggcctattttactccgaagttcacccgcattactag

SEQ ID NO: 221462 - DNA, 1491 bp, Artificial Sequence
  derived and/or modified sequence
atggccctgtggagaggcagcgcctacgccggcttcctggccctggccgtgggctgcgtgttcctgctggagcccgagctgcccggcagcgccctgagaagcctgtggagcagcctgtgcctgggccccgcccccgccccccccggccccgtgagccccgagggcagactggccgccgcctgggacgccctgatcgtgagacccgtgagaagatggagaagagtggccgtgggcgtgaacgcctgcgtggacgtggtgctgagcggcgtgaagctgctgcaggccctgggcctgagccccggcaacggcaaggaccacagcatcctgcacagcagaaacgacctggaggaggccttcatccacttcatgggcaagggcgccgccgccgagagattcttcagcgacaaggagaccttccacgacatcgcccaggtggccagcgagttccccggcgcccagcactacgtgggcggcaacgccgccctgatcggccagaagttcgccgccaacagcgacctgaaggtgctgctgtgcggccccgtgggccccaagctgcacgagctgctggacgacaacgtgttcgtgccccccgagagcctgcaggaggtggacgagttccacctgatcctggagtaccaggccggcgaggagtggggccagctgaaggccccccacgccaacagattcatcttcagccacgacctgagcaacggcgccatgaacatgctggaggtgttcgtgagcagcctggaggagttccagcccgacctggtggtgctgagcggcctgcacatgatggagggccagagcaaggagctgcagagaaagagactgctggaggtggtgaccagcatcagcgacatccccaccggcatccccgtgcacctggagctggccagcatgaccaacagagagctgatgagcagcatcgtgcaccaggtgttccccgccgtgaccagcctgggcctgaacgagcaggagctgctgttcctgacccagagcgccagcggcccccacagcagcctgagcagctggaacggcgtgcccgacgtgggcatggtgagcgacatcctgttctggatcctgaaggagcacggcagaagcaagagcagagccagcgacctgaccagaatccacttccacaccctggtgtaccacatcctggccaccgtggacggccactgggccaaccagctggccgccgtggccgccggcgccagagtggccggcacccaggcctgcgccaccgagaccatcgacaccagcagagtgagcctgagagccccccaggagttcatgaccagccacagcgaggccggcagcagaatcgtgctgaaccccaacaagcccgtggtggagtggcacagagagggcatcagcttccacttcacccccgtgctggtgtgcaaggaccccatcagaaccgtgggcctgggcgacgccatcagcgccgagggcctgttctacagcgaggtgcacccccactactag

SEQ ID NO: 221463 - DNA, 669 bp, Artificial Sequence
  derived and/or modified sequence
atggccgccagctgcagagtggtgaccagcatcagcgacatccccaccggcatccccgtgcacctggagctggccagcatgaccaacagagagctgatgagcagcatcgtgcaccaggtgttccccgccgtgaccagcctgggcctgaacgagcaggagctgctgttcctgacccagagcgccagcggcccccacagcagcctgagcagctggaacggcgtgcccgacgtgggcatggtgagcgacatcctgttctggatcctgaaggagcacggcagaagcaagagcagagccagcgacctgaccagaatccacttccacaccctggtgtaccacatcctggccaccgtggacggccactgggccaaccagctggccgccgtggccgccggcgccagagtggccggcacccaggcctgcgccaccgagaccatcgacaccagcagagtgagcctgagagccccccaggagttcatgaccagccacagcgaggccggcagcagaatcgtgctgaaccccaacaagcccgtggtggagtggcacagagagggcatcagcttccacttcacccccgtgctggtgtgcaaggaccccatcagaaccgtgggcctgggcgacgccatcagcgccgagggcctgttctacagcgaggtgcacccccactactag

SEQ ID NO: 221464 - protein, 356 aa, Artificial Sequence
  derived and/or modified sequence
MSKLWRRGSTSGAMEAPEPGEALELSLAGAHGHGVHKKKHKKHKKKHKKKHHQEEDAGPTQPSPAKPQLKLKIKLGGQVLGTKSVPTFTVIPEGPRSPSPLMVVDNEEEPMEGVPLEQYRAWLDEDSNLSPSPLRDLSGGLGGQEEEEEQRWLDALEKGELDDNGDLKKEINERLLTARQRALLQKARSQPSPMLPLPVAEGCPPPALTEEMLLKREERARKRRLQAARRAEEHKNQTIERLTKTAATSGRGGRGGARGERRGGRAAAPAPMVRYCSGAQGSTLSFPPGVPAPTAVSQRPSPSGPPPRCSVPGCPHPRRYACSRTGQALCSLQCYRINLQMRLGGPEGPGSPLLAT

SEQ ID NO: 221465 - protein, 363 aa, Artificial Sequence
  derived and/or modified sequence
MSKLWRRGSTSGAMEAPEPGEALELSLAGAHGHGVHKKKHKKHKKKHKKKHHQEEDAGPTQPSPAKPQLKLKIKLGGQVLGTKSVPTFTVIPEGPRSPSPLMVVDNEEEPMEGVPLEQYRAWLDEDSNLSPSPLRDLSGGLGGQEEEEEQRWLDALEKGELDDNGDLKKEINERLLTARQRALLQKARSQPSPMLPLPVAEGCPPPALTEEMLLKREERARKRRLQAARRAEEHKNQTIERLTKTAATSGRGGRGGARGERRGGRAAAPAPMVRYCSGAQGSTLSFPPGVPAPTAVSQRPSPSGPPPRCSVPGCPHPRRYACSRTGQALCSLQCYRINLQMRLGGPEGPGSPLLATFESCAQE

SEQ ID NO: 221466 - DNA, 1261 bp, Artificial Sequence
  derived and/or modified sequence
ggttgttttgctggctccagtttttccgcggggcggaaaaggcgtgtctgcgtgtgtcccaaccatttctagtcccctttcctcgcaggacctcatgagtaagctgtggcggcgtgggagcacctctggggctatggaggcccctgagccgggagaagccctggagttgagcctggcgggtgcccatggccatggagtgcacaagaaaaaacacaagaagcacaagaagaaacacaagaagaaacaccatcaggaagaagacgccgggcccacgcagccgtcccctgccaagcctcagctcaaactcaaaatcaagcttgggggacaagtcctggggaccaagagtgttcctaccttcactgtgatcccagaggggcctcgctcaccctctccccttatggttgtggataatgaagaggaacctatggaaggagtcccccttgagcagtaccgtgcctggctggatgaagacagtaatctctctccctctccacttcgggacctatcaggagggttagggggtcaggaggaagaggaggaacagaggtggctggatgccctggagaagggggagctggatgacaatggagacctcaagaaggagatcaatgagcggctgcttactgctcgacagcgagctctgctccagaaggcgcggagtcaaccttcccctatgctgccgctgcctgtagctgagggctgcccacctcccgccctcacagaggagatgctgctgaagcgcgaggagcgggcgcggaagcggcggctccaggcggcgcggcgggcagaagagcacaagaaccagactatcgagcgcctcaccaagactgcggcgaccagtgggcggggaggccgggggggcgcacggggcgagcggcggggagggcgggctgcggctccggcccccatggtgcgctactgcagcggagcacagggttccaccctttccttcccacctggcgtccccgcccccacggcagtgtctcagcggccatccccctcaggcccgccgccgcgctgctctgtccccggctgtccccatccgcgccgctacgcttgctcccgcacaggccaggcactctgtagtcttcagtgctaccgcatcaacctgcagatgcggctgggggggcccgagggtcctggatccccccttttggctacgtaaggcccttaacccggactctgcgccccgtcccatgcccgctcttgagtatcttccccaccctattaaattacatccggtgcttcggcttgtacagaa

SEQ ID NO: 221467 - DNA, 2040 bp, Artificial Sequence
  derived and/or modified sequence
tttctagtcccctttcctcgcaggacctcatgagtaagctgtggcggcgtgggagcacctctggggctatggaggcccctgagccgggagaagccctggagttgagcctggcgggtgcccatggccatggagtgcacaagaaaaaacacaagaagcacaagaagaaacacaagaagaaacaccatcaggaagaagacgccgggcccacgcagccgtcccctgccaagcctcagctcaaactcaaaatcaagcttgggggacaagtcctggggaccaagagtgttcctaccttcactgtgatcccagaggggcctcgctcaccctctccccttatggttgtggataatgaagaggaacctatggaaggagtcccccttgagcagtaccgtgcctggctggatgaagacagtaatctctctccctctccacttcgggacctatcaggagggttagggggtcaggaggaagaggaggaacagaggtggctggatgccctggagaagggggagctggatgacaatggagacctcaagaaggagatcaatgagcggctgcttactgctcgacagcgagctctgctccagaaggcgcggagtcaaccttcccctatgctgccgctgcctgtagctgagggctgcccacctcccgccctcacagaggagatgctgctgaagcgcgaggagcgggcgcggaagcggcggctccaggcggcgcggcgggcagaagagcacaagaaccagactatcgagcgcctcaccaagactgcggcgaccagtgggcggggaggccgggggggcgcacggggcgagcggcggggagggcgggctgcggctccggcccccatggtgcgctactgcagcggagcacagggttccaccctttccttcccacctggcgtccccgcccccacggcagtgtctcagcggccatccccctcaggcccgccgccgcgctgctctgtccccggctgtccccatccgcgccgctacgcttgctcccgcacaggccaggcactctgtagtcttcagtgctaccgcatcaacctgcagatgcggctgggggggcccgagggtcctggatccccccttttggctaccttcgagagctgtgcccaggagtgaacaaccagccctacctctgtgagagtggtcactgctgcggggagactggctgctgcacctactactatgagctctggtggttctggctgctctggactgtcctcatcctctttagctgctgttgcgccttccgccaccgacgagctaaactcaggctgcaacaacagcagcggcagcgtgaaatcaacttgttggcctatcatggggcatgccatggggctggtcctttccctaccggttcactgcttgaccttcgcttcctcagcaccttcaagcccccagcctacgaggatgtggttcaccgcccaggcacaccaccccccccttatactgtggccccaggccgccccttgactgcttccagtgaacaaacctgctgttcctcctcatccagctgccctgcccactttgaaggaacaaatgtggaaggtgtttcctcccaccagagtgccccccctcatcaggagggtgagcccggggcaggggtgacccctgcctccacacccccctcctgccgctatcgccgtttaactggcgactccggtattgagctctgcccttgtcctgcctccggtgagggtgagccagtcaaggaggtgagggttagtgccaccctgccagatctggaggactactccccgtgtgcactacccccagagtctgtaccgcagatctttcccatggggctgtcttccagtgaaggggacatcccataagtagttttgagagggtggatgggttacttgcccaccagaaacagccctagtcccaactccttgcgttcctttggcccctccctgcctacctagaatctgcctgaaagggctggagaggggcagtattgggggactgtgctagctttacccccgcaggacatacacaggagcctttgatctcattaaagagatgtgaaccagct

SEQ ID NO: 221468 - DNA, 1092 bp, Artificial Sequence
  derived and/or modified sequence
atgagtaaactctggcgtcggggttcgaccagcggagccatggaggcaccggaacccggtgaggctctggagctgtctctcgcaggggcacacggacacggagtacataagaagaagcataagaaacataagaaaaaacacaaaaagaagcatcaccaggaggaggacgccggccctacacagcccagccctgcaaagccgcagctaaagcttaaaattaagctcggtggccaagtcctcggcaccaaatcggtcccaacctttacagttatccctgaaggcccccggtccccctccccgttaatggtggtcgacaacgaggaagagccaatggagggagttcccctggagcaataccgggcatggttggacgaagatagcaacctttctccttctccccttcgggacttgtcagggggcctgggagggcaggaggaagaggaggagcagcggtggttagacgccctcgaaaagggcgagcttgacgataacggagacctgaagaaagagataaacgagagactccttaccgccagacaaagggcgttgttacaaaaggcaagaagccaaccatcacctatgctgccactgccagtggcagaggggtgccccccaccagccttgaccgaagagatgctactgaagcgggaggaacgagcccgcaagcgaagactgcaggctgcccgccgcgccgaggagcacaagaaccagactatcgagagactgaccaagaccgccgctacttccgggcggggtggacgtggcggtgcccgtggtgagcgtcgtgggggccgggctgccgctccagcacccatggtcaggtactgctcaggcgcccaggggagcacgctatctttcccgcctggggtgcccgccccaacggccgtctctcagagaccaagcccttctgggcctcccccccgatgttcagtgccaggctgcccacatcccaggagatacgcttgctcgagaaccggacaggcgctctgctcccttcagtgttatcgcatcaacttgcagatgcggcttggtggccctgaaggtcccggttcaccgttgcttgcaacattcgagtcttgcgctcaggaatag

SEQ ID NO: 221469 - DNA, 1092 bp, Artificial Sequence
  derived and/or modified sequence
atgagcaagctgtggaggcggggcagcaccagcggggccatggaggcccctgagcctggagaggccctggagctgagcctggccggggcccacggccatggagtgcacaagaagaagcacaagaagcacaagaagaagcacaagaagaagcaccaccaggaggaggatgctggccccacccagcccagccctgccaagccccagctgaagctgaagatcaagctgggcggccaggtgctgggcaccaagtctgtgcccaccttcaccgtcatccctgagggccccaggagccccagccccctgatggtggtggacaatgaggaggagcccatggagggcgtgcccctggagcagtaccgggcctggctggatgaggacagcaacctgagccccagccccctgcgggacctgagcggcggcctgggcggccaggaggaggaggaggagcagcgctggctggatgccctggagaagggggagctggatgacaacggggacctgaagaaggagatcaatgaaaggctgctgacagcccggcagagggccctgctgcagaaggcccggagccagcccagccccatgctgcccctgcctgtggccgagggctgccccccaccagccctgacagaggagatgctgctgaagcgggaggagcgggccaggaagaggcggctgcaggccgccaggagagctgaggagcacaagaaccagaccatcgagcggctgaccaagacagctgccaccagcggccggggcggccggggcggggcccggggggagaggagaggaggccgggctgctgccccagcccccatggtgcgctactgcagcggggcccagggcagcaccctgtccttccccccaggagtgcctgcccccacagctgtgtcccagaggcccagccccagcggccccccaccccgctgcagcgtgcccggctgcccccacccccggcgctatgcctgcagcaggacaggccaggccctgtgcagcctgcagtgctaccgcatcaacctgcagatgaggctgggcggccctgagggccctggcagccccctgctggccacctttgagagctgtgcccaggagtag

SEQ ID NO: 221470 - DNA, 1092 bp, Artificial Sequence
  derived and/or modified sequence
atgagcaagctgtggcggcggggcagcaccagcggcgccatggaggctccagagcctggcgaagccctcgagttgagcctggcaggcgcccacggccacggcgtccacaagaagaaacataagaagcacaagaaaaagcataaaaaaaaacatcaccaagaagaggatgccggtccaactcagccatctccagcaaagcctcagctgaagctcaagattaagctcggcggacaggttcttgggaccaagagcgtgccaacgttcactgttattcctgaaggacctcgcagcccctcaccgcttatggtggtcgacaacgaagaggagccaatggaaggggtccccctcgagcaatatcgggcatggctcgatgaggacagtaatctgtcaccatctcctttgagagatttgtcgggtggccttggcggtcaggaagaggaggaagaacagcgctggctggacgccctcgaaaagggagagctagatgataatggcgacctcaaaaaagagatcaatgaacgcttgttgaccgcccgccagcgcgcccttcttcaaaaggcaagaagccaacctagccctatgctgccccttcccgtggcagaaggttgtccccctccagccctgaccgaagagatgctgctaaagcgtgaggaacgagcccgcaaaagaaggctccaggcggctcggcgggcagaggaacacaagaatcagacaatagagagattgaccaaaacagctgcaacttctgggcgaggcggcaggggaggggccagaggcgaaagaagaggcggcagagccgcggctcctgccccgatggtgcggtattgcagcggtgctcagggctccaccctgtccttcccgcctggggtgcccgcccccacagctgtatcccaacgcccctctccatccggcccccccccccgctgtagcgttcctggctgcccccacccacgcagatacgcatgctcccgcacgggacaagcactgtgttcactgcagtgttaccgtattaatttgcaaatgagattgggtggcccagagggaccgggaagccccctcctggccacctttgaatcttgtgcccaagagtag

SEQ ID NO: 221471 - DNA, 1092 bp, Artificial Sequence
  derived and/or modified sequence
atgagcaagttatggcgtcgcggatccaccagcggggctatggaggcgcctgagcctggggaggccttagagctttccctggccggagcccatggccacggagtgcacaagaagaagcacaaaaaacacaagaaaaagcacaaaaaaaaacatcaccaggaggaggatgccggtccaacccagcccagtcccgcaaaaccccaactgaagctcaagataaagctcggaggtcaggtgctcggaacaaagtctgtgcccacttttacggtcattcctgagggtcctcggagtccatctcctctcatggtcgtggacaatgaagaagagccaatggagggcgtgccactggagcagtaccgggcatggctggacgaggactcaaacctatcaccctctccactgcgcgacctgtccggcggactcgggggtcaggaagaagaggaagaacagcggtggttagacgctcttgagaagggagaattagacgacaacggcgacttgaagaaagagataaatgaacgactactgaccgccagacagcgcgctctccttcaaaaagccaggtcacaaccctctccgatgcttccactgccagtcgccgaaggatgccccccacctgctctgacagaagaaatgctgctaaaacgggaagaacgggcaaggaagagacgtctccaggctgctcggagggcagaggaacataagaaccagacaattgagcgcctcaccaaaaccgcagctaccagtggcagagggggaaggggtggcgctaggggcgaaagacggggaggaagagctgccgctccggcaccgatggtgcgatactgctccggggctcaggggagcactttgagcttcccgccaggggtgccggcacctactgctgtgtcccaacgtccatccccctctggcccacctcccagatgttccgttcctggctgtccacaccctagaaggtacgcctgttcacgcacagggcaagccctctgcagcttgcagtgttataggatcaatctccagatgcggcttgggggacccgaaggtcctggtagcccgttactggctacattcgagagctgtgcacaagagtag

SEQ ID NO: 221472 - DNA, 1092 bp, Artificial Sequence
  derived and/or modified sequence
atgagcaagctgtggagaagaggcagcaccagcggcgccatggaggcccccgagcccggcgaggccctggagctgagcctggccggcgcccacggccacggcgtgcacaagaagaagcacaagaagcacaagaagaagcacaagaagaagcaccaccaggaggaggacgccggccccacccagcccagccccgccaagccccagctgaagctgaagatcaagctgggcggccaggtgctgggcaccaagagcgtgcccaccttcaccgtgatccccgagggccccagaagccccagccccctgatggtggtggacaacgaggaggagcccatggagggcgtgcccctggagcagtacagagcctggctggacgaggacagcaacctgagccccagccccctgagagacctgagcggcggcctgggcggccaggaggaggaggaggagcagagatggctggacgccctggagaagggcgagctggacgacaacggcgacctgaagaaggagatcaacgagagactgctgaccgccagacagagagccctgctgcagaaggccagaagccagcccagccccatgctgcccctgcccgtggccgagggctgccccccccccgccctgaccgaggagatgctgctgaagagagaggagagagccagaaagagaagactgcaggccgccagaagagccgaggagcacaagaaccagaccatcgagagactgaccaagaccgccgccaccagcggcagaggcggcagaggcggcgccagaggcgagagaagaggcggcagagccgccgcccccgcccccatggtgagatactgcagcggcgcccagggcagcaccctgagcttcccccccggcgtgcccgcccccaccgccgtgagccagagacccagccccagcggccccccccccagatgcagcgtgcccggctgcccccaccccagaagatacgcctgcagcagaaccggccaggccctgtgcagcctgcagtgctacagaatcaacctgcagatgagactgggcggccccgagggccccggcagccccctgctggccaccttcgagagctgcgcccaggagtag

SEQ ID NO: 221473 - DNA, 1071 bp, Artificial Sequence
  derived and/or modified sequence
atgagcaagctgtggagaagaggcagcaccagcggcgccatggaggcccccgagcccggcgaggccctggagctgagcctggccggcgcccacggccacggcgtgcacaagaagaagcacaagaagcacaagaagaagcacaagaagaagcaccaccaggaggaggacgccggccccacccagcccagccccgccaagccccagctgaagctgaagatcaagctgggcggccaggtgctgggcaccaagagcgtgcccaccttcaccgtgatccccgagggccccagaagccccagccccctgatggtggtggacaacgaggaggagcccatggagggcgtgcccctggagcagtacagagcctggctggacgaggacagcaacctgagccccagccccctgagagacctgagcggcggcctgggcggccaggaggaggaggaggagcagagatggctggacgccctggagaagggcgagctggacgacaacggcgacctgaagaaggagatcaacgagagactgctgaccgccagacagagagccctgctgcagaaggccagaagccagcccagccccatgctgcccctgcccgtggccgagggctgccccccccccgccctgaccgaggagatgctgctgaagagagaggagagagccagaaagagaagactgcaggccgccagaagagccgaggagcacaagaaccagaccatcgagagactgaccaagaccgccgccaccagcggcagaggcggcagaggcggcgccagaggcgagagaagaggcggcagagccgccgcccccgcccccatggtgagatactgcagcggcgcccagggcagcaccctgagcttcccccccggcgtgcccgcccccaccgccgtgagccagagacccagccccagcggccccccccccagatgcagcgtgcccggctgcccccaccccagaagatacgcctgcagcagaaccggccaggccctgtgcagcctgcagtgctacagaatcaacctgcagatgagactgggcggccccgagggccccggcagccccctgctggccacctag

SEQ ID NO: 221474 - DNA, 1071 bp, Artificial Sequence
  derived and/or modified sequence
atgagtaagttgtggcggaggggttctacatcgggagcgatggaagcccccgaaccaggtgaagctttagagctgagcttagccggggcgcatggccatggagtgcacaaaaaaaagcataagaaacacaagaaaaagcacaagaaaaagcaccaccaggaagaagatgccggacccacccagcccagccccgcaaaaccacaattgaagctgaagattaaactgggaggccaggtcctcggcacgaagtccgttccaactttcacagtgatcccagaaggaccccggtctccctctccattgatggttgtggacaatgaagaagagcccatggagggagtacccctggagcaatatagggcatggctcgacgaggacagtaacctgtctccgtcaccactgcgcgatctcagtggaggtcttggaggccaagaagaggaagaggagcagaggtggctcgatgctctggaaaagggtgagctggatgataatggagatctgaagaaggagatcaacgagaggctgttaaccgcacggcagcgggccctgctgcagaaggcacgcagccagcctagcccgatgctccccctgccagtggcagaaggatgtcccccacctgcccttactgaagaaatgctgttgaaaagagaagaacgggcccggaagagacggctgcaggccgccagacgcgcagaggagcacaaaaatcagacaattgagcggctgacaaagaccgcggcgacctctggaaggggtggacgtggaggtgcacgcggagaaagacgcggaggtagggccgctgctccagctcccatggtgcggtactgtagtggtgcgcagggctcgactctgagctttccccctggcgtacccgcgcccacggccgtctcccagaggccaagccctagcgggccacccccccgttgctcggtcccaggatgccctcaccctaggcgctatgcatgctcacggaccgggcaagctctgtgtagcctccagtgctacaggattaacctgcagatgcggctggggggcccagagggccccggctccccacttctggccacctag

SEQ ID NO: 221475 - DNA, 1071 bp, Artificial Sequence
  derived and/or modified sequence
atgagcaagctgtggaggcggggcagcaccagcggggccatggaggcccctgagcctggagaggccctggagctgagcctggccggggcccacggccatggagtgcacaagaagaagcacaagaagcacaagaagaagcacaagaagaagcaccaccaggaggaggatgctggccccacccagcccagccctgccaagccccagctgaagctgaagatcaagctgggcggccaggtgctgggcaccaagtctgtgcccaccttcaccgtcatccctgagggccccaggagccccagccccctgatggtggtggacaatgaggaggagcccatggagggcgtgcccctggagcagtaccgggcctggctggatgaggacagcaacctgagccccagccccctgcgggacctgagcggcggcctgggcggccaggaggaggaggaggagcagcgctggctggatgccctggagaagggggagctggatgacaacggggacctgaagaaggagatcaatgaaaggctgctgacagcccggcagagggccctgctgcagaaggcccggagccagcccagccccatgctgcccctgcctgtggccgagggctgccccccaccagccctgacagaggagatgctgctgaagcgggaggagcgggccaggaagaggcggctgcaggccgccaggagagctgaggagcacaagaaccagaccatcgagcggctgaccaagacagctgccaccagcggccggggcggccggggcggggcccggggggagaggagaggaggccgggctgctgccccagcccccatggtgcgctactgcagcggggcccagggcagcaccctgtccttccccccaggagtgcctgcccccacagctgtgtcccagaggcccagccccagcggccccccaccccgctgcagcgtgcccggctgcccccacccccggcgctatgcctgcagcaggacaggccaggccctgtgcagcctgcagtgctaccgcatcaacctgcagatgaggctgggcggccctgagggccctggcagccccctgctggccacctag

SEQ ID NO: 221476 - DNA, 1071 bp, Artificial Sequence
  derived and/or modified sequence
atgagcaagctgtggcggcggggcagcaccagcggcgccatggaggctcccgagcccggggaagccctggaactgtctctcgctggcgcacatggtcatggcgtgcataaaaaaaagcacaaaaaacacaagaagaagcacaagaaaaagcaccaccaagaggaagatgcgggacctactcagccctccccggccaaaccccagctgaagttgaaaatcaagctgggcgggcaggtgctgggaactaagagtgtgcctactttcacagtaatccccgaagggccacgtagtccgagccctctcatggtggtggacaacgaggaggagcccatggaaggcgtgcctctggagcagtatagggcttggctggacgaagacagcaacctcagccccagtccactgcgagacctgtcaggcgggctcggcgggcaggaagaggaggaggagcagaggtggttagatgcacttgagaagggcgagcttgacgacaacggtgatctcaagaaggagattaatgagagactcctaaccgcacgacaacgagctctgttgcaaaaagcgcgatctcagccctcgccaatgctcccgctccccgtagctgagggatgccctcctcctgctctaaccgaggaaatgttgctgaaacgagaggaacgagctcggaaacgcaggttgcaggcggctcgcagagctgaggaacataaaaaccagactatcgagcgactcaccaaaaccgctgccacgtccgggaggggtggtcgcggcggggcaaggggggagcgaagaggggggagggccgcagcccctgccccaatggtgcgctactgctctggagcccagggttctaccctgtcattccctcccggcgtgccagcgcccacagcggttagtcaacgcccgagcccttccggacccccaccccgctgctcagtgccgggctgcccacacccaaggcggtacgcatgctcgagaacaggtcaggcgctgtgctcactgcaatgttatcgtatcaatcttcagatgagattgggagggcctgaaggccctggatcaccactcctggccacatag

SEQ ID NO: 221477 - DNA, 1071 bp, Artificial Sequence
  derived and/or modified sequence
atgagcaaattgtggcgcaggggctctacaagtggcgcaatggaggcgcctgaacccggtgaggctctggagcttagtctggcgggtgcgcatggacatggagtgcacaagaagaagcacaaaaagcacaaaaaaaaacataaaaaaaagcaccaccaggaggaagacgccggtcccacccagcccagccctgcaaaacctcagttaaagctcaaaatcaaacttggaggtcaggtgctaggcacaaaatccgtgcctacctttactgtcatcccggaaggaccacggagtccaagccctctaatggtcgtagacaacgaggaggaacctatggagggcgtcccactcgagcagtaccgagcatggctggatgaagattctaacctgagcccatcaccactgcgagacttgtcaggcggtcttgggggacaggaggaggaagaggaacagcggtggcttgacgcgctggaaaagggcgagctcgacgacaacggggatctgaagaaggaaatcaatgaacgcctgttaactgcgcgacagagggcccttttacagaaggccaggtctcagcccagccccatgctcccactccccgtagccgagggttgcccaccaccagctttgacagaggagatgctgctaaagcgcgaggaacgcgctcgaaaacggaggttgcaagctgcaagaagggccgaggaacataagaaccagactattgagcgccttactaagacggccgctacgtcaggacgagggggaagggggggtgctagaggcgagcggcgaggcggacgcgctgcagccccagccccaatggtgcgctactgttccggtgcccaggggagtaccctgtcctttcctccgggagtccctgcgcctaccgccgtgtcccaacgcccttcaccaagcggccctcccccaaggtgcagcgtccctggttgcccacatccaagacgatatgcatgctctcgcaccggccaagcattgtgctcccttcagtgttacaggatcaacctacaaatgcgtctcggcggacccgagggacccggatcccctcttctggctacctag

SEQ ID NO: 221478 - DNA, 690 bp, Artificial Sequence
  derived and/or modified sequence
atggccgaagagatggaatcatctttggaggcgagctttagctcgagtggcgctgtttcgggcgcttctgggttccttcctccagcccggtcaaggattttcaagatcattgtgataggggactctaacgttggaaagacatgcctcacctatcggttttgtgcagggcgctttccagacaggaccgaagccacaattggcgtggacttccgggagagagccgttgagattgacggcgagagaattaagatccagctttgggatacggctggtcaggaacggttccgcaagtccatggtccagcactactaccggaatgttcacgccgtcgtcttcgtgtatgatatgactaacatggcctcgttccacagtctaccctcatggatcgaggaatgcaagcagcaccttttggctaatgacatcccccgtatactcgtcggcaacaaatgtgacctgaggtctgctatacaggtgccgaccgatcttgcccagaagtttgcggacacccacagcatgcctttattcgagacatcagctaaaaacccaaacgataatgaccatgttgaggcgatttttatgaccctcgcccacaaattaaaatctcataagcctctaatgctgagccagcctccggataacggtatcatcctaaagccagaacccaagcctgcaatgacctgctggtgttag

SEQ ID NO: 221479 - DNA, 690 bp, Artificial Sequence
  derived and/or modified sequence
atggccgaggagatggagagcagcctggaggccagcttcagcagcagcggggctgtgtctggggccagcggcttcctgcccccagcccggagccgcatcttcaagatcatcgtgattggagacagcaatgtgggcaagacctgcctgacctaccgcttctgtgccggccgcttcccagacagaacagaggccaccatcggcgtggacttccgggagagagctgtggagattgatggagagcgcatcaagatccagctgtgggacacagctggccaggagcgcttcaggaagtccatggtgcagcactactacagaaatgtgcatgctgtggtgtttgtgtatgacatgaccaacatggccagcttccacagcctgcccagctggattgaggagtgcaagcagcacctgctggccaatgacatcccccgcatcctggtgggcaacaagtgtgacctgcggagcgccatccaggtgcccacagacctggcccagaagtttgctgacacccacagcatgcccctgtttgagaccagcgccaagaaccccaatgacaatgaccacgtggaggccatcttcatgaccctggcccacaagctgaagagccacaagcccctgatgctgagccagcccccagacaatggcatcatcctgaagccagagcccaagccagccatgacctgctggtgctag

SEQ ID NO: 221480 - DNA, 690 bp, Artificial Sequence
  derived and/or modified sequence
atggccgaggagatggagagcagcctggaggccagcttcagcagcagtggagccgtgtcgggggccagtggctttctgccgcccgcacggagccggattttcaagatcattgtgattggcgactccaacgtcggtaagacctgtcttacgtaccggttttgcgcaggtcggtttcccgacagaaccgaagcaaccatcggagtggattttcgcgagcgggcggtcgagattgacggcgaaaggattaaaattcaactgtgggatacagcaggacaggagcgattcaggaaaagcatggtgcagcactactatcgcaacgtacacgctgtagtattcgtctatgatatgactaacatggctagtttccatagcctacccagctggatagaagagtgcaagcaacatcttcttgccaatgatatcccgaggattctggtgggaaacaagtgtgatttgcggtctgcaatacaggttccaaccgacctggcacaaaagttcgcagatacacacagtatgcccttgttcgaaacttccgctaagaacccgaatgataacgatcacgtggaagcaatttttatgactctagcacacaagctgaagtcccataagccactgatgctttcccaacccccggacaatggaatcatattgaaacccgagcctaagcctgcgatgacatgttggtgttag

SEQ ID NO: 221481 - DNA, 690 bp, Artificial Sequence
  derived and/or modified sequence
atggctgaggaaatggagtctagcctcgaagcgtccttctctagttctggggctgtgtcaggcgcatctggctttctgcctcctgccaggtcaagaatctttaagataatcgttatcggagacagcaacgtcgggaagacatgtctgacataccgcttctgtgcagggaggtttccagacaggactgaagccacaatcggcgttgacttccgggaaagggccgtcgagatcgatggagagaggatcaagatccaactgtgggacaccgccggtcaggagcgttttcgtaagagtatggttcaacattactaccgcaatgtgcacgctgtcgtgttcgtgtatgatatgacaaacatggcatcttttcactcactacctagttggatcgaggaatgtaaacagcatctcttagcaaacgatatccccagaatcttggtaggtaacaaatgcgatctaaggtccgctatccaggtgccgactgatctggcccagaagttcgcggacacccactccatgccactgttcgaaacatctgctaaaaatccaaacgacaatgatcacgtggaggcaatatttatgaccctggctcacaaactgaaatcacacaagcctttgatgctgtcccagccccctgacaacggcatcattctgaagccagaacctaaacctgcaatgacctgctggtgctag

SEQ ID NO: 221482 - DNA, 4562 bp, Artificial Sequence
  derived and/or modified sequence
gcttcctccagagggcgggaaccttggacgtggcggggctgggtcagtcagggcgctgggcccagcctctctgcaggctggccttccgcgctgccgtgaagcccccgacaggtcccacgcctgcctaggtagaccggcgccagcccgagtgacgcctggcgtgtggccgcgggcaggcggctccgtgcggcggggcgggcgggtgccacacctgtgcgggcaagggcggggcgggaaggtgcgcaggcgcgctcggggctggtgggcggtggctcctgggaagttgcgcagccgaactggccggctgggcgcgcgctcttgcggtggcgtaatctctcagcctttctgtgtctcctttcctccgcctcagtttggggcgggtcgggggaatggctgaggagatggagtcgtcgctcgaggcaagcttttcgtccagcggggcagtgtcaggggcctcagggtttttgcctcctgcccgctcccgcatcttcaagataatcgtgatcggcgactccaatgtgggcaagacatgcctgacctaccgcttctgcgctggccgcttccccgaccgcaccgaggccacgataggggtggatttccgagaacgagcggtggagattgatggggagcgcatcaagatccagctatgggacacagcaggacaagaacgattcagaaagagcatggttcagcactactacagaaatgtacatgctgttgtcttcgtgtatgatatgaccaacatggctagttttcatagcctaccatcttggatagaagaatgcaaacaacatttgctagccaatgatataccacggattcttgttggaaataaatgtgacttgagaagtgccatacaggtacccacagacttggcacaaaaatttgctgacacacacagtatgcctttgtttgaaacgtctgctaaaaaccccaatgataatgaccatgtggaagctatatttatgaccttggctcataagcttaagagccacaaaccattaatgcttagtcagccccctgataatggaattatcctgaagcctgaaccaaagcctgcaatgacgtgctggtgctaaataacagtctttattatattatctaattttgactaaagaaatacttttgaagtatgacagtattaagtcataagatttaatctcaactataatgggtcatcttgacactttgctgtttgtcattgtcacgcttttgtattttgtatctacttaagtttgtcactgtgacaacacaggaaaagttggttttcaggtgagattgaaaatgaagcaaagataggatgaatctgaacatctctccatctagagcccaatgaaggaagcttcaaatgagaacatgatggaatcagtaaccattcaatcttttgtcctaggattggaaaaaaatgttaaaggtttaggacacacctaatagtatgtcctttgaatgggaagtgttcttaataggataaaaactggtatttgcctctccccagagtactttttttgttttttcatagagacggggtcttgctatgttgtccaggctggccttgagctcctgggctcaagcaatcctcccacctcagcctccccagtactgggactgtaggtactcaccactgcatctggcctttctttgttttattaacatatttagttttgttattattggtatgttttagagccaagactttagttccagtgggataagaaggcatagaatgttttctggttcccagtccataaagaatgacttttccaagagttctagatgtttgattttctaattaatacttatcagatctacaaaaatcattattattttaaaagagttatttgagtttctttctttctttttttttttttttttttttgagatggagtctcgctctgtctccaggctggagtgcagtggcgtcatctcggctcactgcaacctccgcctcccaggttcaagtgattctcctgcctcagcctcccgagtagctgggattacaggcgtgcactaccacacccagctgatttttgtatttttagtatagatggggtttcaccatgttggccaggatggtctcgatctcttgacctcatgatccacccgcctcagcttcccaaagtgctgggattacaggtgtgagtcactgcacccagccgagttgctttcttactaaatcctattaaaatatgcaaaaataagtcagattttaaggcaaataaagtgacataaggtgctttatattttattttggtatatttaaacagtgaaaaactaactgaaagcacatgaagagttgtaacttgggggaaaataggtaaacatagcttctagctaacacaggagacctattcttagcctttactaatttcaagcagtgtatcccatatggtatctcttgctcttccttcaactccaataaatttaatgactaaatgccaagttaacaaatcaacttccatttggattgtaggtgtgaaggcacaactctaattgctattagtctacatgtatttctgtaatagtattgtgtcatatcaatttttaagatgtctaaattttatggtcacaagttatccctcctcagtatgaaaaataaattagatattgaaaaatgtctaaacttcagtgatggaaagaatatttcaagaagttttttaacctaaatacttttattttgaatttaagtctttgcacataaaatatagcaagcttacatattaaactatttacgtaaatggaatgtaagccatgactttaactgaagtgttcacattcactaattttgatagattgctgtccttaataattttggaggaaattaagccaaatgattattgtactacagtattttcagaatatgggaaatcaattaaaaatgtaatctaatctagtttaagatttttgtttaatcatcatggtggtcctacctggataatttaactataaagacaaagtaattctattaaatgaactaactgaaaataataattataggaagtgattattccattttaagtattagagctcaaattggctttatttgcatttagggagatcatgttttcttaatcatgctggaatttaaaaattgttttacttgtatcgaaattaaccttgatttataactatttttgtaataaaacaatgacagctgtagtaactatgatgggtgtaacaacatttttttaaagaagggaatctgtttatcgcttttcaaaatattttctaaagtgggggaagaaagtttatagactttccaagcacatttatggttttttattactattattatggttttaaaaagagtaactttatttctttttgtaaggaattaagtaatatcctttacagttctgtgaaaggacttattttttaactgtaatatttattagttttaaaatatttgtatctcatttgtaacaatttgttttaattttttatatatatgtttttatttttaaaaaacataccagttgaatggggttaaagctttcaatatcttaaaatatttataaaacatttcactgttgcaaaatcacttccaaaatgatagctatctaacaactaattactaatttttaaagaacaaatcacacatttaaaaaatctgtagaatttattttaactatgacctttaattgaaaataaataattaaaatatcagacatgttttggaaaagtcttaatttgagaacaccaaaggaaactaccccagaatctaatgtagttcgctattaataacaatgcattattgaaagtatattgcaaatacatgtttcctcatgaaatctaagtaattttgttgtggaatagtgtcactgttacatttcccccatgaagttcaataaaccagcttagccacaaagaaattgtgttttattttctttgtttggttactgggtagagtataaaataaaacaatctttttttcctcctggtttccagataatattatatatatgatacacttttgaaaacaacaaaaagcccccaacccattggacaattattttcttgtatacatttgaggtcaaagaacacttcaggaaaaaaactcaacaaagtattaaaattagctgataacacagcttttgtatttgtgtgttttagtaatccagcttgttttagaatagttcagtgcaaaaagcaaatggtgcaagaggagttgatgtgtatttagacgtaaaagcatttaacagaatgaataactatagaaagtatgagaaaagagaacgaactacgtctcaggtataagattgcagttactgatttagacaccataggattagggatgtgggggcctctgatgttgattctgcttcccctggtcagtttattttacgtataagttacccttgtgttcaaacacaaaattgacattattcatgaaggactgctttcttaatcagatattaagaagttcgtcatgtattttgggagcacgtttgctacagcctgtgtggcaagggcgaatgcacttggtttgttggaataacctgatttatcaaacatttatcaagtatgggtcatgtgttctctatttgtgttagtggagctacata

SEQ ID NO: 221483 - DNA, 690 bp, Artificial Sequence
  derived and/or modified sequence
atggccgaggagatggagagcagcctggaggccagcttcagcagcagcggcgccgtgagcggcgccagcggcttcctgccccccgccagaagcagaatcttcaagatcatcgtgatcggcgacagcaacgtgggcaagacctgcctgacctacagattctgcgccggcagattccccgacagaaccgaggccaccatcggcgtggacttcagagagagagccgtggagatcgacggcgagagaatcaagatccagctgtgggacaccgccggccaggagagattcagaaagagcatggtgcagcactactacagaaacgtgcacgccgtggtgttcgtgtacgacatgaccaacatggccagcttccacagcctgcccagctggatcgaggagtgcaagcagcacctgctggccaacgacatccccagaatcctggtgggcaacaagtgcgacctgagaagcgccatccaggtgcccaccgacctggcccagaagttcgccgacacccacagcatgcccctgttcgagaccagcgccaagaaccccaacgacaacgaccacgtggaggccatcttcatgaccctggcccacaagctgaagagccacaagcccctgatgctgagccagccccccgacaacggcatcatcctgaagcccgagcccaagcccgccatgacctgctggtgctag

SEQ ID NO: 221484 - protein, 268 aa, Artificial Sequence
  derived and/or modified sequence
MGSAKSVPVTPARPPPHNKHLARVADPRSPSAGILRTPIQVESSPQPGLPAGEQLEGLKHAQDSDPRSPTLGIARTPMKTSSGDPPSPLVKQLSEVFETEDSKSNLPPEPVLPPEAPLSSELDLPLGTQLSVEEQMPPWNQTEFPSKQVFSKEEARQPTETPVASQSSDKPSRDPETPRSSGSMRNRWKPNSSKVLGRSPLTILQDDNSPGTLTLRQGKRPSPLSENVSELKEGAILGTGRLLKTGGRAWEQGQDHDKENQHFPLVES

SEQ ID NO: 221485 - DNA, 807 bp, Artificial Sequence
  derived and/or modified sequence
atgggcagcgccaagagcgtgcccgtgacccccgccagaccccccccccacaacaagcacctggccagagtggccgaccccagaagccccagcgccggcatcctgagaacccccatccaggtggagagcagcccccagcccggcctgcccgccggcgagcagctggagggcctgaagcacgcccaggacagcgaccccagaagccccaccctgggcatcgccagaacccccatgaagaccagcagcggcgacccccccagccccctggtgaagcagctgagcgaggtgttcgagaccgaggacagcaagagcaacctgccccccgagcccgtgctgccccccgaggcccccctgagcagcgagctggacctgcccctgggcacccagctgagcgtggaggagcagatgcccccctggaaccagaccgagttccccagcaagcaggtgttcagcaaggaggaggccagacagcccaccgagacccccgtggccagccagagcagcgacaagcccagcagagaccccgagacccccagaagcagcggcagcatgagaaacagatggaagcccaacagcagcaaggtgctgggcagaagccccctgaccatcctgcaggacgacaacagccccggcaccctgaccctgagacagggcaagagacccagccccctgagcgagaacgtgagcgagctgaaggagggcgccatcctgggcaccggcagactgctgaagaccggcggcagagcctgggagcagggccaggaccacgacaaggagaaccagcacttccccctggtggagagctag

SEQ ID NO: 221486 - DNA, 807 bp, Artificial Sequence
  derived and/or modified sequence
atgggatccgcaaaatcagtccctgtaactccagctcgaccacctcctcacaataagcatctggctcgggtggccgacccgagaagtccgagcgccgggattttgcgcactcccatacaggtggagtcgtctccccagcccggactgccagctggcgaacagctagagggactgaagcacgcccaggacagtgatccacgctcccccactctaggtatcgcccgaacacctatgaagacctcttcgggagatccccccagcccactagtaaaacagctttccgaggtttttgagacagaagacagtaagtccaacctcccccccgaacctgtgcttcctccggaggccccgctgtcttccgagttagacctgcccctcgggacacagttatccgtggaggagcagatgccaccctggaaccagacggagttcccaagtaagcaggttttctctaaggaagaggcccgccagcctaccgagactcccgtcgcgtcccagagctcggataaaccaagccgcgaccccgaaacaccccgtagctcaggatccatgcgcaatcgttggaaacctaattcctccaaggtcttgggacgcagtccacttaccattctgcaagatgacaattcacctggaaccctaaccctccgacagggcaagagaccttcccctctgtcagaaaacgtgtccgagctgaaagagggcgcgattctcggcactggccggctcctgaaaactggcggccgcgcatgggagcagggtcaggatcacgacaaagagaatcaacatttcccacttgttgaatcctag

SEQ ID NO: 221487 - DNA, 807 bp, Artificial Sequence
  derived and/or modified sequence
atgggtagcgccaaatctgtcccagttacgcccgctcgccctcccccccacaataaacatctagctcgcgtggccgatccgcggtcccctagtgctggcatactgagaacaccgattcaagtcgaatccagcccccaaccagggttaccggccggggaacagcttgaagggctgaaacatgctcaggattccgaccccaggtcccccaccctgggaattgcccggactccaatgaagacctcttcaggggatccaccctccccacttgtcaaacagctgtctgaagtgtttgagacagaggacagcaaatctaacctgccacctgaaccagtgttgccacctgaagccccactgtcatctgaattagaccttcccctgggcacacagctgagcgttgaagaacaaatgcctccttggaaccagacagaattcccttctaaacaggtcttcagcaaagaggaggctcggcaaccaacagagacccccgtggcaagccagtccagtgataagccatcccgggaccccgaaacacccagatcctcagggagcatgaggaataggtggaagcccaattcttcgaaggtgttggggaggagccctcttaccatcctgcaggacgataattcccccggcaccctaactctgcgccagggcaaaaggcctagtcccctgagcgagaatgtgtccgaactcaaggagggagctatactcggcactggcagactcctgaagaccggcggaagggcatgggagcagggccaggatcatgacaaggagaaccagcacttccctctcgtggagtcatag

SEQ ID NO: 221488 - DNA, 807 bp, Artificial Sequence
  derived and/or modified sequence
atgggcagcgccaagtctgtgcctgtgaccccagcccggcccccaccccacaacaagcacctggcccgggtggccgaccccaggagccccagcgctggcatcctgcggacccccatccaggtggagagcagcccccagcccggcctgcctgctggggagcagctggagggcctgaagcacgcccaggacagcgaccccaggagccccaccctgggcatcgcccggacccccatgaagaccagcagcggggacccccccagccccctggtgaagcagctgtctgaggtgtttgaaacagaggacagcaagagcaacctgcccccagagcctgtgctgcccccagaggcccccctgagcagcgagctggacctgcccctgggcacccagctgtctgtggaggagcagatgccaccctggaaccagacagagttccccagcaagcaggtgttcagcaaggaggaggcccggcagcccacagagacccctgtggccagccagagcagtgacaagcccagccgggaccctgagacccccaggagcagcggctccatgaggaaccgctggaagcccaacagcagcaaggtgctgggccgcagccccctgaccatcctgcaggatgacaacagccctggcaccctgaccctgcggcagggcaagaggcccagccccctgtctgaaaatgtgtctgagctgaaggagggcgccatcctgggcaccggccgcctgctgaagacaggaggccgggcctgggagcagggccaggaccatgacaaggagaaccagcacttccccctggtggagagctag

SEQ ID NO: 221489 - DNA, 807 bp, Artificial Sequence
  derived and/or modified sequence
atgggcagcgccaagagcgtgcccgtgacccccgcccggccccccccacacaacaagcacctggcaagagtagccgaccctaggtccccctcggcggggattctgcggacacctattcaggtcgagtcctctccccagccaggcctaccagccggcgagcagctcgagggcctgaagcacgcgcaagacagtgacccccgtagtccaaccctaggaatcgctcggacccctatgaagacctccagcggtgatcccccgtccccgttagtgaagcagttatctgaagtttttgaaactgaggactccaagagcaaccttccccctgaaccggttctgcctccggaggccccattgtctagcgagctcgacctgccactcggcactcaactgagcgtggaagaacagatgccaccatggaaccaaaccgaattcccttccaagcaggtgttcagcaaagaggaggcaaggcaaccaacggaaaccccagtggcctcgcagagcagcgacaagcccagcagagaccctgaaacacctaggagttccggctcaatgaggaatcgatggaaaccgaactcttctaaagtattgggaagaagcccattgacaatccttcaggatgataactcacctgggaccctgactctacgacagggtaagagaccatctcctttatctgagaacgtttccgagcttaaagagggagctatcctaggcacaggtcggctgctgaaaacaggtggccgggcatgggagcagggacaggaccatgataaggaaaatcagcacttcccccttgtggagtcatag

SEQ ID NO: 221490 - DNA, 807 bp, Artificial Sequence
  derived and/or modified sequence
atgggcagcgccaagagcgtgcccgtgacccccgcccggccccccccacacaacaagcacctcgctagggtggcagatccacgttctccatccgcaggcattttgagaacacctatacaggtggagtcgagtccccaaccaggacttccagccggcgagcagctggagggactcaagcacgctcaggattcagacccacgttcacctaccttgggtatcgctaggactcctatgaagacaagctccggggaccccccttctcccctggttaagcagctgtctgaggtttttgaaactgaggattcaaagtctaatctcccccctgaacctgtgctccctcccgaagcacctctcagctccgaattagacctacccctcggcacccagctatcagtggaagagcagatgcccccctggaatcaaacagaatttccatctaaacaggtcttctctaaggaggaggcccgtcagccaacagaaacccctgtggcatcgcagagctccgacaagccttctcgcgatcccgagaccccacgtagcagcggcagcatgcggaatagatggaagccgaactccagcaaggtgctgggtagatcacctttgacgatactgcaggacgataatagtccgggcacacttacgctgcgccaggggaaacgaccttctcccctgagcgagaatgtgagcgaactcaaagagggagcaattttggggactgggcgtctcctcaaaacagggggccgggcctgggaacagggtcaggaccacgacaaggaaaatcagcattttcccctcgtggaatcatag

SEQ ID NO: 221491 - DNA, 807 bp, Artificial Sequence
  derived and/or modified sequence
atggggagtgccaagagtgtgcctgtgaccccagcgagaccacctccacataataaacacctggcccgtgtggctgatcccagatcgccctcggcaggaatcctccgaacacccatccaggtggagagctctccccagcccggattacccgctggtgaacaattggaggggctgaaacacgcgcaggattcggatcctcgcagtccaacccttgggatcgccaggactcccatgaagaccagctctggtgatcctcctagtcctctcgtaaaacagttgtctgaggttttcgagaccgaagatagtaaatcaaacctgccacctgaacctgtactcccacctgaagcccctctgagctccgagctcgatctacctctgggcactcagctttctgtggaggagcagatgcctccttggaatcagacagagttcccctccaaacaggtctttagcaaggaagaagctcgtcaaccaacggagacaccagtggcctctcaatcttctgacaagccctcccgtgaccccgaaacacccagaagtagcgggtctatgaggaaccgctggaaaccgaactcaagcaaagtcctgggcagatctcctctgaccattctacaggacgacaattccccagggacattgaccctccgccagggcaaaaggccttcccccttaagcgaaaacgtgtccgagttaaaagagggagcgatcttgggaactggtcgactccttaaaacaggcggaagggcctgggaacagggccaagaccacgacaaggaaaatcagcacttcccactggtcgagtcctag

SEQ ID NO: 221492 - DNA, 807 bp, Artificial Sequence
  derived and/or modified sequence
atgggatccgccaagtccgtgcctgtcacccccgcaaggccccctccgcacaacaaacacctggccagagtggccgatccccgaagcccatccgctgggatcctaaggacccccattcaagtggaatcatctccacagcccggactccccgctggtgagcagctggaaggcctgaaacacgcacaggactcagacccaaggagtcccactttagggatcgccagaacgcccatgaagacaagtagcggcgaccctccaagcccacttgttaagcagctgtcagaagtgttcgagacagaggactctaaatctaacctgcccccagaacccgttttgcctccagaggctcccttatccagtgagctggatttgcccttaggtacccaattatccgtggaggagcaaatgcccccttggaatcagacagagttcccttccaagcaggttttctccaaggaggaagccaggcagcccaccgaaactcccgtggctagccagtcttcagataaaccttcaagggaccctgagacccctcgttcatcaggatcaatgagaaaccgctggaaaccaaattcctctaaggtgctcgggcgatcccccctgaccatcttgcaggatgataatagccccggtactttgactctgagacagggtaagcggcctagtcccctgagcgagaacgttagtgagctgaaggagggagccatacttggtactgggcgattgctgaaaacgggaggcagggcatgggaacaggggcaggaccatgacaaggaaaaccagcactttcccctcgttgagtcatag

SEQ ID NO: 221493 - DNA, 1327 bp, Artificial Sequence
  derived and/or modified sequence
cgagctgttgtgcatccagaggtggaattggggcccggtaagtgatttgaataatttaataaataagttagagggctcagcaggcccagaacgagccattttgtcagctgcagcagtcattaactccgcagaggcctctggtccctcgccaggaagtttcttcactggaaactgggaagacagggtggtttagggttgaaggtccgacgtggaagagataagggctgagacctgagtcacttctcacaggcattccctcctcgtcccgggctggcccttgcccccaccctgcaactcctggttgagatgggctcagccaagagcgtcccagtcacaccagcgcggcctccgccgcacaacaagcatctggctcgagtggcggacccccgttcacctagtgctggcatcctgcgcactcccatccaggtggagagctctccacagccaggcctaccagcaggggagcaactggagggtcttaaacatgcccaggactcagatccccgctctcctactcttggtattgcacggacacctatgaagaccagcagtggagaccccccaagcccactggtgaaacagctgagtgaagtatttgaaactgaagactctaaatcaaatcttcccccagagcctgttctgcccccagaggcacctttatcttctgaattggacttgcctctgggtacccagttatctgttgaggaacagatgccaccttggaaccagactgagttcccctccaaacaggtgttttccaaggaggaagcaagacagcccacagaaacccctgtggccagccagagctccgacaagccctcaagggaccctgagactcccagatcttcaggttctatgcgcaatagatggaaaccaaacagcagcaaggtactagggagatcccccctcaccatcctgcaggatgacaactcccctggcaccctgacactacgacagggtaagcggccttcacccctaagtgaaaatgttagtgaactaaaggaaggagccattcttggaactggacgacttctgaaaactggaggacgagcatgggagcaaggccaggaccatgacaaggaaaatcagcactttcccttggtggagagctaggccctgcatggccccagcaatgcagtcacccagggcctggtgatatctgtgtcctctcaccccttctttcccagggatactgaggaatggcttgttttcttagactcctcctcagctaccaaactgggactcacagctttattgggctttctttgtgtcttgtgtgtttcttttatattaaaggaagtaattttaaatgttactttaaaaaggt

SEQ ID NO: 221494 - DNA, 1937 bp, Artificial Sequence
  derived and/or modified sequence
gcgcgagaatggcagttggacggagcctgcctgccggtgctccgcccctgccccgcgcttgactgacgccaatgagaagcgctcctaaggcaattgatggttgaaagaaccaatcccactcctccagggcgggagcgcacgtagagcagctaggtgggcttcggggttgcagctgctgcggctccgcagctgctccggctccgggacccttagagtccattcgcgtgccttctattgaagagcaggaactgacggttgttttaggcctctcaattccagaaagtttcctggggacctgtccggtcggaaagtcgagggacagttgtcttggtatttgtaaagggggtatccagtgaggcggagcttgagggggttgtgtcgagtgactgatacagctgtcaaccaataaagctactatcgctcgcctcaggaaaaccatcacaactccagctggatgtgcgcataatagtgtaatcactcatgattctattttgtttaataattcgttcttgagactagacgtctcgaaagcgaagactggcactcctcagcctgccacggacggctcgcaggccgatactgaacagaagtacccttatcaaggaggcgtcacccctgggcaagcctagcatcagtccattgacacctacagtcaccatgatagacgttctcccagaccaacagcttcctttggctcgaggcgggtcttacgtggagggcctatgggaactacgtcggctcagccaatagggtcagggcagggggcgtggcgggaagtttgaaactggtaacttcgggagttgagccacgagctgttgtgcatccagaggtggaattggggcccggcattccctcctcgtcccgggctggcccttgcccccaccctgcaactcctggttgagatgggctcagccaagagcgtcccagtcacaccagcgcggcctccgccgcacaacaagcatctggctcgagtggcggacccccgttcacctagtgctggcatcctgcgcactcccatccaggtggagagctctccacagccaggcctaccagcaggggagcaactggagggtcttaaacatgcccaggactcagatccccgctctcctactcttggtattgcacggacacctatgaagaccagcagtggagaccccccaagcccactggtgaaacagctgagtgaagtatttgaaactgaagactctaaatcaaatcttcccccagagcctgttctgcccccagaggcacctttatcttctgaattggacttgcctctgggtacccagttatctgttgaggaacagatgccaccttggaaccagactgagttcccctccaaacaggtgttttccaaggaggaagcaagacagcccacagaaacccctgtggccagccagagctccgacaagccctcaagggaccctgagactcccagatcttcaggttctatgcgcaatagatggaaaccaaacagcagcaaggtactagggagatcccccctcaccatcctgcaggatgacaactcccctggcaccctgacactacgacagggtaagcggccttcacccctaagtgaaaatgttagtgaactaaaggaaggagccattcttggaactggacgacttctgaaaactggaggacgagcatgggagcaaggccaggaccatgacaaggaaaatcagcactttcccttggtggagagctaggccctgcatggccccagcaatgcagtcacccagggcctggtgatatctgtgtcctctcaccccttctttcccagggatactgaggaatggcttgttttcttagactcctcctcagctaccaaactgggactcacagctttattgggctttctttgtgtcttgtgtgtttcttttatattaaaggaagtaattttaaatgttactttaaaaaggtatatgtaaaccttg

SEQ ID NO: 221495 - DNA, 807 bp, Artificial Sequence
  derived and/or modified sequence
atgggaagcgcgaagtccgtacctgttacccccgcacgccctcctccacacaataagcacctggcgagggtcgctgatcctagatctcctagcgcaggaatcttgagaacccctatccaggtggagtcatcccctcagccagggcttcctgcaggcgagcagctcgaggggttaaaacatgcccaggatagtgaccctcgttcccctacgttgggaatcgctaggacccccatgaaaacgtcctcaggagatcccccaagtccccttgtcaagcaactctctgaagtcttcgagaccgaggacagtaagtccaacctgccccctgagccagttcttcctcccgaggcccctctgtccagcgagcttgatctccccctggggacccagctctcagtcgaagaacaaatgcctccctggaaccagaccgaattcccgtccaagcaagtcttttccaaagaggaggcgcgacagccgacggaaacgcctgtggcatcacagtctagcgacaagccatcgagagaccccgagaccccccggagctccggatcaatgcggaataggtggaagccaaatagctcaaaggtcctgggccgtagtccattaaccattctgcaggatgataacagccctgggacgctgaccttgaggcagggcaaacgccctagccctctctccgagaatgtgtccgagttgaaggagggtgcaatcctcggaacgggaaggctcctcaagactgggggacgcgcgtgggaacaggggcaggatcatgataaagaaaatcaacactttccacttgtcgaaagctag

SEQ ID NO: 221496 - DNA, 807 bp, Artificial Sequence
  derived and/or modified sequence
atgggcagcgccaagagcgtgcccgtgacccccgcccggcccccccctcataacaagcacctggcacgtgttgccgacccacgatccccgtctgccggcattctaagaacccctattcaggtggagtccagccctcagccaggcctgccggccggcgagcaacttgagggtctgaaacacgcacaggacagcgatccgaggagtcctacgctgggcattgcacggacacctatgaaaacttcttccggtgatcctccttcaccactcgtgaagcagctatcagaggtgtttgaaacggaggacagcaaaagcaacctgcccccagaacccgtgctcccacctgaggccccactttcttctgagctcgacctccccttggggacccagctgtccgtcgaagagcaaatgccaccctggaaccaaaccgagttccccagcaaacaggtcttttcaaaggaagaagcacggcagcccactgagacacccgttgctagtcaatcctcggataaaccgagtcgagacccggagacaccccggtccagcggatcaatgcgaaatcggtggaaacctaacagttccaaggttttaggccgttcccccttgacaattcttcaggacgataatagccctgggaccctgacactgcggcaggggaagaggcccagcccgctatctgagaatgtttccgaattgaaagagggagccatcttgggcaccggccgtctgcttaagacaggtggacgagcctgggagcagggacaagaccatgacaaagagaaccagcattttcccctagtggaaagttag

SEQ ID NO: 221497 - DNA, 807 bp, Artificial Sequence
  derived and/or modified sequence
atggggagcgcaaagtctgtgcctgtgacaccagcacggccaccaccccataataagcatctggccagggtagctgatccgagaagcccctcagcaggcatcctgagaacgcctatccaggtcgaatcttcaccgcagcccggtctcccagcaggcgaacagctggagggcctgaagcatgcacaggactccgatcctcggagcccgacgctcggaatcgctaggacaccaatgaagactagctctggtgatccgcctagcccactcgttaagcagctgagtgaggtcttcgaaactgaggattctaaaagcaacctgccacctgaaccagtcctacccccagaagccccacttagttctgaattggaccttcctctgggcactcagctgtctgtggaagagcagatgcccccttggaaccagacagagttccctagcaaacaagttttttctaaagaggaagccaggcaaccaaccgagacccccgtcgcttcccaaagttccgacaagccctccagagatcccgagactccacggagctcggggtctatgcggaacagatggaagcccaattcaagcaaagtcctggggagatcaccccttactattctccaagacgataactcccctggcaccttaaccctgcgccagggtaaacggccttcacccctgtccgagaatgtcagcgagctaaaggagggggctattttagggacaggcaggcttctgaagaccggcggaagggcctgggagcaaggccaggatcacgataaggaaaatcagcactttccactagtagagtcctag

SEQ ID NO: 221498 - protein, 197 aa, Artificial Sequence
  derived and/or modified sequence
MEPLASNIQVLLQAAEFLERREREAEHGYASLCPHRSPGPIHRRKKRPPQAPGAQDSGRWRAQLKRCLERLKQQMPLGADCARYTTLSLLRRARMHIQKLEDQEQRARQLKERLRSKQQSLQRQLEQLRGLAGAAERERLRADSLDSSGLSSERSDSDQEELEVDVESLVFGGEAELLRGFVAGQEHSYSHGGGAWL

SEQ ID NO: 221499 - protein, 388 aa, Artificial Sequence
  derived and/or modified sequence
MEPLASNIQVLLQAAEFLERREREAEHGYASLCPHRSPGPIHRRKKRPPQAPGAQDSGRSVHNELEKRRRAQLKRCLERLKQQMPLGADCARYTTLSLLRRARMHIQKLEDQEQRARQLKERLRSKQQSLQRQLEQLRGLAGAAERERLRADSLDSSGLSSERSDSDQGECPEAEGLCGPRGEPGLLTGPLPAQRSWRWMWRAWCLGVRPSCCGASSPARSTATRTAAAPGYDVPHPGRASALYSCQAHLPGRSPPQAFRAARSHLLEWTKRTLVWEQVLPKHPAAGCQAGPLEGKGQDSSGPPWTPAGQAAWARAQAFGSAAPKGTGSLLGLFPSWTRPPAFASHKLYSIFIKSLFHNFPSIVLPNENGGTPNHRPTGRGNNISSHH

SEQ ID NO: 221500 - protein, 206 aa, Artificial Sequence
  derived and/or modified sequence
MEPLASNIQVLLQAAEFLERREREAEHGYASLCPHRSPGPIHRRKKRPPQAPGAQDSGRSVHNELEKRRRAQLKRCLERLKQQMPLGADCARYTTLSLLRRARMHIQKLEDQEQRARQLKERLRSKQQSLQRQLEQLRGLAGAAERERLRADSLDSSGLSSERSDSDQEELEVDVESLVFGGEAELLRGFVAGQEHSYSHGGGAWL

SEQ ID NO: 221501 - DNA, 1483 bp, Artificial Sequence
  derived and/or modified sequence
ccgcggcacccacgtgcagcggctgggcccggcgctttcaggggaccaccaggcccccagagcgccgtgctatgttgggggctagtcactagcacggggctggaagctgagatcaaagacgccaatgagccggcgtgggtggatgagtgaggcgggcaagaagcagcaccggttagcctgagggttcgctccagggccaggcctggagccagcgcccttacctgcccctggaaagtctgagaccactcggggcggggcggctgccggagggtgggctgcggctccgtggcgggttccagaggggcggagccaagggctgggcgttcccgcgggcggggcgtcccgggggcggggcgggcccctgtgtttgttgcaccgtgtcagttactttgtaacaaaagtgctgcagccgcttgctccggccggcaccctaggccggcccgccgccagctgtcgccgacatggaacccttggccagcaacatccaggtcctgctgcaggcggccgagttcctggagcgccgtgagagagaggccgagcatggttatgcgtccctgtgcccgcatcgcagtccaggccccatccacaggaggaagaagcgacccccccaggctcctggcgcgcaggacagcgggcggtcagtgcacaatgaactggagaagcgcaggagggcccagttgaagcggtgcctggagcggctgaagcagcagatgcccctgggggccgactgtgcccggtacaccacgctgagcctgctgcgccgtgccaggatgcacatccagaagctggaggatcaggagcagcgggcccgacagctcaaggagaggctgcgcagcaagcagcagagcctgcagcggcagctggagcagctccgggggctggcaggggcggccgagcgggagcggctgcgggcggacagtctggactcctcaggcctctcctctgagcgctcagactcagaccaagaggagctggaggtggatgtggagagcctggtgtttgggggtgaggccgagctgctgcggggcttcgtcgccggccaggagcacagctactcgcacggcggcggcgcctggctatgatgttcctcacccagggcgggcctctgccctctactcgtgccaggcccacttgccaggcaggagccctccccaagccttcagggctgctcggagtcacctgttggaatggactaaaaggacccttgtgtgggaacaggtgctccccaaacaccctgctgctggctgccaggcaggccctctggaagggaaggggcaggactcatcaggacctccctggacccctgcagggcaggcagcttgggcccgagcccaagcatttggctctgctgcccccaaggggacaggaagcctcttgggcctcttcccttcctggacaaggccccctgcctttgcctcacataaactgtacagtattttcattaaaagcctctttcataacttccaaaaaaaaaaaaaaaaaa

SEQ ID NO: 221502 - DNA, 594 bp, Artificial Sequence
  derived and/or modified sequence
atggagcccttggcctctaacatccaggttttgctccaggccgccgagttcctcgaacgcagggagcgagaggctgagcacggatacgcttcactctgcccccaccgaagccccggtcccattcatagacggaaaaaaaggcccccccaagctcccggggcgcaagatagtggcagatggcgggcccagttaaaacggtgtttagagagattaaagcagcaaatgccgctcggcgccgactgcgcgaggtacacaacactttccttgctgcgtcgggcacgcatgcatattcagaagcttgaagatcaggagcagagggccagacagcttaaagaacgcctgcgttccaagcaacagagcctacaacgccaactcgaacaactcagaggcctggcaggagcagccgagagagaacgtctacgcgcagattccctggattcatccgggctgtcatcagagcgctctgactcagatcaggaggagctcgaggtggacgtggagtctcttgtgttcggaggggaagcagaactgctcagaggcttcgtagcaggacaagaacattcctatagccacggaggcggcgcgtggctatag

SEQ ID NO: 221503 - DNA, 621 bp, Artificial Sequence
  derived and/or modified sequence
atggaacctttggctagcaatattcaggttctcctgcaagccgccgaatttttggaaagaagagagagggaggccgagcatggctacgcctccctgtgtcctcaccggtctcccggaccgattcatagacgcaagaagaggcccccccaagctcccggcgctcaggactctggtaggtccgtccataatgagctggagaagcggagacgcgcacaactgaagcgctgtttagaacgactaaagcagcagatgcccttaggcgccgattgtgctaggtacactaccctctccctgctgcgcagggcgcggatgcatatccagaaactggaagatcaggagcagcgagctcgccagctgaaggaacggctgcgttccaagcagcagagcctgcagcgccagctcgaacagctgaggggtttggccggggccgccgagcgcgagagactgagggctgatagcctggattccagtggtctgagttccgaacggagcgatagtgaccaagaggagctcgaggttgacgtggagtcattagttttcggaggcgaggccgaactattacgcggctttgtcgcaggtcaggaacattcttacagccacggagggggggcgtggctctag

SEQ ID NO: 221504 - DNA, 621 bp, Artificial Sequence
  derived and/or modified sequence
atggagccactggcctccaatattcaggtcctcctccaggctgcagagttcctggaacggcgagagcgggaggcggaacacggatacgcatccctgtgtccccaccgatcccccgggccaatacaccggaggaaaaagcgccccccccaagcacccggagcacaggacagcgggcgctccgttcacaacgagctggagaagagaaggagagcccagctgaaaaggtgtcttgagcgtctgaaacagcagatgccccttggggctgactgcgcccgatataccacactgtcactcctccgccgcgcccggatgcatatacaaaaactcgaggaccaagaacagcgcgcccgacagctgaaagagcgtcttagaagtaaacaacagagtctgcaacgccagctggagcagctgcgaggactcgccggtgccgccgaacgtgaaaggctccgggccgatagcctggactctagcggcctctctagcgaaagaagcgacagtgatcaggaggagctggaagttgacgttgagtccttggtgtttggcggggaggcagaactgctaaggggcttcgtagccgggcaagaacactcatactctcatggaggaggagcctggctctag

SEQ ID NO: 221505 - DNA, 594 bp, Artificial Sequence
  derived and/or modified sequence
atggagcccctggccagcaacatccaggtgctgctgcaggccgctgagttcctggagcggcgggagcgggaggccgagcacggctacgccagcctgtgcccccacaggagccctggccccatccacaggaggaagaagaggcctccccaggcccctggggcccaggacagcggccgctggagggcccagctgaagcgctgcctggagcggctgaagcagcagatgcccctgggcgctgactgtgcccgctacaccaccctgagcctgctgcggcgggccaggatgcacatccagaagctggaggaccaggagcagagggcccggcagctgaaggagcggctgcggagcaagcagcagagcctgcagaggcagctggagcagctgcggggcctggccggggctgctgagcgggagcggctgcgggctgacagcctggacagcagcggcctgagcagcgagaggagtgacagcgaccaggaggagctggaggtggatgtggagagcctggtgtttggaggagaggccgagctgctgcggggctttgtggccggccaggagcacagctacagccatggaggaggagcctggctgtag

SEQ ID NO: 221506 - DNA, 621 bp, Artificial Sequence
  derived and/or modified sequence
atggagcccctggccagcaacatccaggtgctgctgcaggccgctgagttcctggagcggcgggagcgggaggccgagcacggctacgccagcctgtgcccccacaggagccctggccccatccacaggaggaagaagaggcctccccaggcccctggggcccaggacagcggccgctctgtgcacaatgagctggagaagagaagaagagcccagctgaagcgctgcctggagcggctgaagcagcagatgcccctgggcgctgactgtgcccgctacaccaccctgagcctgctgcggcgggccaggatgcacatccagaagctggaggaccaggagcagagggcccggcagctgaaggagcggctgcggagcaagcagcagagcctgcagaggcagctggagcagctgcggggcctggccggggctgctgagcgggagcggctgcgggctgacagcctggacagcagcggcctgagcagcgagaggagtgacagcgaccaggaggagctggaggtggatgtggagagcctggtgtttggaggagaggccgagctgctgcggggctttgtggccggccaggagcacagctacagccacggcggcggggcctggctgtag

SEQ ID NO: 221507 - DNA, 1033 bp, Artificial Sequence
  derived and/or modified sequence
aaaagtgctgcagccgcttgctccggccggcaccctaggccggcccgccgccagctgtcgccgacatggaacccttggccagcaacatccaggtcctgctgcaggcggccgagttcctggagcgccgtgagagagaggccgagcatggttatgcgtccctgtgcccgcatcgcagtccaggccccatccacaggaggaagaagcgacccccccaggctcctggcgcgcaggacagcgggcggtggagggcccagttgaagcggtgcctggagcggctgaagcagcagatgcccctgggggccgactgtgcccggtacaccacgctgagcctgctgcgccgtgccaggatgcacatccagaagctggaggatcaggagcagcgggcccgacagctcaaggagaggctgcgcagcaagcagcagagcctgcagcggcagctggagcagctccgggggctggcaggggcggccgagcgggagcggctgcgggcggacagtctggactcctcaggcctctcctctgagcgctcagactcagaccaagaggagctggaggtggatgtggagagcctggtgtttgggggtgaggccgagctgctgcggggcttcgtcgccggccaggagcacagctactcgcacggcggcggcgcctggctatgatgttcctcacccagggcgggcctctgccctctactcgtgccaggcccacttgccaggcaggagccctccccaagccttcagggctgctcggagtcacctgttggaatggactaaaaggacccttgtgtgggaacaggtgctccccaaacaccctgctgctggctgccaggcaggccctctggaagggaaggggcaggactcatcaggacctccctggacccctgcagggcaggcagcttgggcccgagcccaagcatttggctctgctgcccccaaggggacaggaagcctcttgggcctcttcccttcctggacaaggccccctgcctttgcctcacataaactgtacagtattttcattaaaagcctctttc

SEQ ID NO: 221508 - DNA, 1483 bp, Artificial Sequence
  derived and/or modified sequence
cggccggaggccccgcccccgcggcacccacgtgcagcggctgggcccggcgctttcaggggaccaccaggcccccagagcgccgtgctatgttgggggctagtcactagcacggggctggaagctgagatcaaagacgccaatgagccggcgtgggtggatgagtgaggcgggcaagaagcagcaccggttagcctgagggttcgctccagggccaggcctggagccagcgcccttacctgcccctggaaagtctgagaccactcggggcggggcggctgccggagggtgggctgcggctccgtggcgggttccagaggggcggagccaagggctgggcgttcccgcgggcggggcgtcccgggggcggggcgggcccctgtgtttgttgcaccgtgtcagttactttgtaacaaaagtgctgcagccgcttgctccggccggcaccctaggccggcccgccgccagctgtcgccgacatggaacccttggccagcaacatccaggtcctgctgcaggcggccgagttcctggagcgccgtgagagagaggccgagcatggttatgcgtccctgtgcccgcatcgcagtccaggccccatccacaggaggaagaagcgacccccccaggctcctggcgcgcaggacagcgggcggtcagtgcacaatgaactggagaagcgcaggagggcccagttgaagcggtgcctggagcggctgaagcagcagatgcccctgggggccgactgtgcccggtacaccacgctgagcctgctgcgccgtgccaggatgcacatccagaagctggaggatcaggagcagcgggcccgacagctcaaggagaggctgcgcagcaagcagcagagcctgcagcggcagctggagcagctccgggggctggcaggggcggccgagcgggagcggctgcgggcggacagtctggactcctcaggcctctcctctgagcgctcagactcagaccaagaggagctggaggtggatgtggagagcctggtgtttgggggtgaggccgagctgctgcggggcttcgtcgccggccaggagcacagctactcgcacggcggcggcgcctggctatgatgttcctcacccagggcgggcctctgccctctactcgtgccaggcccacttgccaggcaggagccctccccaagccttcagggctgctcggagtcacctgttggaatggactaaaaggacccttgtgtgggaacaggtgctccccaaacaccctgctgctggctgccaggcaggccctctggaagggaaggggcaggactcatcaggacctccctggacccctgcagggcaggcagcttgggcccgagcccaagcatttggctctgctgcccccaaggggacaggaagcctcttgggcctcttcccttcctggacaaggccccctgcctttgcctcacataaactgtacagtattttcattaaaagcctctttcataacttcc

SEQ ID NO: 221509 - DNA, 861 bp, Artificial Sequence
  derived and/or modified sequence
gaaaaggccatttcgcgtgcctccaggtgctgcagccgcttgctccggccggcaccctaggccggcccgccgccagctgtcgccgacatggaacccttggccagcaacatccaggtcctgctgcaggcggccgagttcctggagcgccgtgagagagaggccgagcatggttatgcgtccctgtgcccgcatcgcagtccaggccccatccacaggaggaagaagcgacccccccaggctcctggcgcgcaggacagcgggcggtcagtgcacaatgaactggagaagcgcaggagggcccagttgaagcggtgcctggagcggctgaagcagcagatgcccctgggggccgactgtgcccggtacaccacgctgagcctgctgcgccgtgccaggatgcacatccagaagctggaggatcaggagcagcgggcccgacagctcaaggagaggctgcgcagcaagcagcagagcctgcagcggcagctggagcagctccgggggctggcaggggcggccgagcgggagcggctgcgggcggacagtctggactcctcaggcctctcctctgagcgctcagactcagaccaagaggagctggaggtggatgtggagagcctggtgtttgggggtgaggccgagctgctgcggggcttcgtcgccggccaggagcacagctactcgcacggcggcggcgcctggctatgatgttcctcacccagggcgggcctctgccctctactcgtgccaggcccacttgccaggcaggagccctccccaagccttcagggctgctcggagtcacctgttggaatggactaaaaggacccttgtgtgggaacaggtgctccccaaacaccc

SEQ ID NO: 221510 - DNA, 594 bp, Artificial Sequence
  derived and/or modified sequence
atggagcccctggccagcaacatccaggtgctgctgcaggccgccgagtttctggagagaagggaaagagaagctgaacacggctatgcctctctttgcccccatcgctctcctggcccaatacaccgccggaaaaagaggcctcctcaggcacctggtgcgcaggattctggccgatggagggcgcagttgaagcggtgcctcgagagactgaaacaacagatgcctctgggggcagattgcgcaagatatacaacactctctctgcttcggagggctagaatgcatatacagaagctggaagaccaggaacagcgggcacggcaacttaaggagaggctcaggtcgaagcaacaatcactgcaacgccaactggaacagttgcgaggactggcgggagcggcggagagggagagacttagggccgatagccttgatagctctggcctgtcttcagaacggtccgatagcgatcaagaggaactggaggtggacgtagaatcgctggtcttcggcggggaagctgaactgctaaggggattcgtggctggccaggagcactcttacagccatggcgggggcgcctggctttag

SEQ ID NO: 221511 - DNA, 621 bp, Artificial Sequence
  derived and/or modified sequence
atggagcccctggccagcaacatccaggtgctgctgcaggccgccgagtttcttgagcgccgagagagagaggccgaacatggatacgccagtctatgcccgcaccgctccccgggtcctattcataggagaaagaaacgccctccacaggcgccgggggctcaagactccggtcgctccgttcataatgagctcgagaagaggcgtcgtgcgcagctgaagcggtgtctggaacggctgaaacagcagatgcccctgggcgccgattgcgcgcggtatacaacacttagtcttttaaggagagctaggatgcacatccaaaaactggaagaccaggagcagagagcgagacagcttaaggagagactacgcagcaagcagcaaagtctgcagcgacagctggaacagctgcgaggattagcaggcgcagccgagcgcgagcggttgcgggcagatagtctggattcctccgggctgtccagcgagaggtcggatagcgatcaagaagagcttgaagttgacgtggaatctctggtctttggaggtgaagcagagctcctccgtggattcgtggcgggtcaggaacactcttacagccacggaggaggcgcttggctttag

SEQ ID NO: 221512 - DNA, 621 bp, Artificial Sequence
  derived and/or modified sequence
atggagcccctggccagcaacatccaggtgctgctgcaggccgccgaattcctagagcgaagggagagggaggccgagcacggatatgccagcctgtgcccccaccgaagcccagggcccattcatagacgaaagaaacgaccgccccaagccccaggtgcccaggacagtggccggagcgtccacaacgaactggaaaagcgcaggcgtgctcaactaaagcgctgtttggagcggttaaaacaacagatgcccctgggcgcagactgtgctaggtacaccacactgagtttactaaggagggcacgcatgcacattcaaaagttggaagaccaggagcaaagggcgaggcagctgaaggaacggctcagatccaagcagcagtctctgcagagacagctggagcaactccgaggtctggcaggcgcagccgagcgcgagagacttcgagctgatagtctggactcaagcggcctgtcatctgaacggtccgattcggaccaagaggaactcgaagtggacgttgaatcattagttttcggcggcgaggccgaactacttcgtgggtttgtagcaggccaggagcactcctactcccatggcggtggggcttggctgtag

SEQ ID NO: 221513 - DNA, 594 bp, Artificial Sequence
  derived and/or modified sequence
atggaaccgctggcatcgaatatacaggtgctgcttcaagcggcagaatttctggaaaggagagaacgggaggctgagcatgggtacgccagcctgtgcccacaccgatcccccggtcccatccaccgtcggaaaaagcggccacctcaggctcccggtgctcaggatagcggacgctggcgcgcacagctgaaaagatgccttgagagactaaagcagcaaatgccattgggagcagactgcgctcggtacactactctgagtcttttgcgacgggctagaatgcatatccagaaactggaggatcaggaacaacgcgcaaggcagctcaaggagaggttgcggtctaagcagcaaagcctgcagagacagctggaacagctgcgcggtctggctggggctgccgaaagagagaggttgcgggctgactcactggatagctcaggtctgtcaagcgagcggtctgattccgaccaggaggaactcgaggtggatgtggaatcacttgtctttggcggagaggccgagctgctgcgtggcttcgtggcaggacaggaacactcttattcacacggcggaggggcttggctttag

SEQ ID NO: 221514 - DNA, 621 bp, Artificial Sequence
  derived and/or modified sequence
atggaacctctcgctagcaacatccaggtgctgcttcaggccgctgaatttttggagcgaagagagcgcgaggctgagcatggctacgccagcctatgcccccacaggagtccgggtccaatacatcgacgaaagaaacgcccacctcaggctcccggagctcaggattctggccgtagcgtgcataatgaactggagaagcgcagacgtgcccagttgaaaaggtgtctcgagaggctgaaacagcagatgcccctgggggctgactgcgcgaggtatacgacactcagtctgctgaggagggccagaatgcatatacagaagctcgaagatcaggaacaacgcgctcggcagttaaaggagcgtttgcggagtaagcaacagtccctgcagagacagctggaacagttaaggggactggcaggcgcagcagagcgcgaacggctcagagcagattcattggacagctcagggcttagctctgagaggtctgatagtgaccaggaggagctggaggtcgacgttgagagcctcgtgttcggcggagaagctgaacttctgagaggttttgtggccggacaggagcactcctattctcacggagggggtgcctggctgtag

SEQ ID NO: 221515 - DNA, 621 bp, Artificial Sequence
  derived and/or modified sequence
atggaaccactggccagcaacatccaggtccttttgcaagcagccgagttcctggagagaagggagcgggaggctgagcatggttatgcatcgctctgcccccatcgctcaccaggaccaattcatcggagaaagaaaagaccaccacaggcaccgggagcccaggattcaggccgatccgtgcacaacgagctggaaaagcgaagaagggctcaactgaagaggtgtctggagaggctcaagcaacaaatgccactcggggcagattgcgctcgatacaccacattgagtttgctgaggagggccaggatgcatatccagaagcttgaagatcaagagcagcgggctagacaactcaaagagcggctgaggtccaaacagcagtctctacagaggcagctggagcagctgcgtggcttagccggagctgccgaacgagaaagattaagggctgatagcctcgacagttcaggcctaagttcggagaggtccgacagcgaccaagaggagctggaggttgatgtggagagcctagtcttcggaggggaggccgagctgctgaggggtttcgttgcaggccaggagcactcttacagccatggaggaggggcttggctgtag

SEQ ID NO: 221516 - DNA, 594 bp, Artificial Sequence
  derived and/or modified sequence
atggagcccctggccagcaacatccaggtgctgctgcaggccgccgagttcctggagagaagagagagagaggccgagcacggctacgccagcctgtgcccccacagaagccccggccccatccacagaagaaagaagagacccccccaggcccccggcgcccaggacagcggcagatggagagcccagctgaagagatgcctggagagactgaagcagcagatgcccctgggcgccgactgcgccagatacaccaccctgagcctgctgagaagagccagaatgcacatccagaagctggaggaccaggagcagagagccagacagctgaaggagagactgagaagcaagcagcagagcctgcagagacagctggagcagctgagaggcctggccggcgccgccgagagagagagactgagagccgacagcctggacagcagcggcctgagcagcgagagaagcgacagcgaccaggaggagctggaggtggacgtggagagcctggtgttcggcggcgaggccgagctgctgagaggcttcgtggccggccaggagcacagctacagccacggcggcggcgcctggctgtag

SEQ ID NO: 221517 - DNA, 621 bp, Artificial Sequence
  derived and/or modified sequence
atggagcccctggccagcaacatccaggtgctgctgcaggccgccgagttcctggagagaagagagagagaggccgagcacggctacgccagcctgtgcccccacagaagccccggccccatccacagaagaaagaagagacccccccaggcccccggcgcccaggacagcggcagaagcgtgcacaacgagctggagaagagaagaagagcccagctgaagagatgcctggagagactgaagcagcagatgcccctgggcgccgactgcgccagatacaccaccctgagcctgctgagaagagccagaatgcacatccagaagctggaggaccaggagcagagagccagacagctgaaggagagactgagaagcaagcagcagagcctgcagagacagctggagcagctgagaggcctggccggcgccgccgagagagagagactgagagccgacagcctggacagcagcggcctgagcagcgagagaagcgacagcgaccaggaggagctggaggtggacgtggagagcctggtgttcggcggcgaggccgagctgctgagaggcttcgtggccggccaggagcacagctacagccacggcggcggcgcctggctgtag

SEQ ID NO: 221518 - protein, 257 aa, Artificial Sequence
  derived and/or modified sequence
MTAAVFFGCAFIAFGPALALYVFTIATEPLRIIFLIAGAFFWLVSLLISSLVWFMARVIIDNKDGPTQKYLLIFGAFVSVYIQEMFRFAYYKLLKKASEGLKSINPGETAPSMRLLAYVSGLGFGIMSGVFSFVNTLSDSLGPGTVGIHGDSPQFFLYSAFMTLVIILLHVFWGIVFFDGCEKKKWGILLIVLLTHLLVSAQTFISSYYGINLASAFIILVLMGTWAFLAAGGSCRSLKLCLLCQDKNFLLYNQRSR

SEQ ID NO: 221519 - DNA, 774 bp, Artificial Sequence
  derived and/or modified sequence
atgacagccgcggtgttctttggttgtgctttcattgcttttgggccagccttagcactgtatgtgttcaccatcgcaaccgaacccctgcgcattatttttctaatcgctggagcattcttctggctcgtgagcctcctgatctcatctctcgtgtggttcatggcccgcgtgattattgataacaaagatggacccactcagaagtatttgctcatctttggggcctttgtcagcgtttatatccaagagatgtttcgatttgcatattacaaactgctgaagaaggcatccgagggtttgaaatcgatcaacccgggggaaacagcaccatcgatgaggcttttggcttacgtctccggccttgggtttggcataatgagcggagtgttttcttttgtcaacacactcagtgacagtctcggacccggcaccgtaggaattcacggagactcgccacagttctttctttactcagcattcatgacgctggtgatcatccttttacacgttttttggggaatcgtcttctttgatggttgcgaaaagaagaaatggggcatcctgctgattgtgttgctgactcacctgctcgtatccgcccagaccttcataagctcatactacggcattaacttagcatccgccttcattatcctggttttaatgggcacatgggccttcctggctgccggcggatcatgtaggagcctgaagctttgcctgctgtgtcaagacaaaaactttctcttgtataatcagcggtccaggtag

SEQ ID NO: 221520 - DNA, 774 bp, Artificial Sequence
  derived and/or modified sequence
atgacagctgctgtgttcttcggctgtgccttcatcgccttcggccctgccctggccctgtatgtgttcaccatcgccacagagcccctgcgcatcatcttcctgattgctggggccttcttctggctggtgtccctgctgatcagcagcctggtgtggttcatggcccgggtcatcatcgacaacaaggatggccccacccagaagtacctgctgatctttggagcctttgtgtctgtgtacatccaggagatgttccgctttgcctactacaagctgctgaagaaggccagcgagggcctgaagagcatcaaccctggagaaacagcccccagcatgaggctgctggcctacgtgtctggcctgggcttcggcatcatgtctggagtcttctcctttgtgaacaccctgagtgacagcctgggccctggcaccgtgggcatccatggagacagcccccagttcttcctgtacagcgccttcatgaccctggtgatcatcctgctgcacgtgttctggggcatcgtgttctttgatggctgtgagaagaagaagtggggcatcctgctgattgtgctgctgacccacctgctggtgtctgcccagaccttcatcagcagctactacggcatcaacctggccagcgccttcatcatcctggtgctgatgggcacctgggccttcctggccgccggcggcagctgccgcagcctgaagctgtgcctgctgtgccaggacaagaacttcctgctgtacaaccagaggagcaggtag

SEQ ID NO: 221521 - DNA, 774 bp, Artificial Sequence
  derived and/or modified sequence
atgaccgccgccgtgttcttcggctgcgccttcatcgccttcggcccagccctggcactctacgtgttcaccatagcaaccgaaccgctgcgtatcatattcctgattgccggcgcatttttttggcttgtctccctcttgatctcatctcttgtctggtttatggcacgggtgatcatcgacaacaaagacggccctacccagaaatatttgctcatcttcggggcattcgtgtccgtgtacattcaggagatgttccgattcgcgtactacaagctgctgaaaaaagcgagcgaaggccttaagtcaatcaacccaggagagaccgcccctagtatgagactgctggcctacgtcagcgggcttgggttcggaatcatgagcggagtattcagtttcgttaacacgctgtccgattcattagggcccggcactgtgggaatccatggcgattccccgcagttttttttgtattctgcatttatgactttagtgattatcctgctgcacgtgttctggggaattgtcttcttcgacggctgtgagaagaagaagtggggcattctcttgattgttttgctcacccatcttctggtgtctgcccaaacattcatctctagctactacggaatcaatttagcgagtgcgttcatcattctggttttaatgggcacctgggcttttctggccgccggtggatcttgcagaagcttaaagctgtgcttactgtgtcaggacaagaatttcctgctgtacaaccagagatcccgatag

SEQ ID NO: 221522 - DNA, 774 bp, Artificial Sequence
  derived and/or modified sequence
atgacagccgcagtgttcttcggatgcgcctttattgcttttggccctgccttggcactctatgtctttacaattgcaacagagcctctcaggatcattttcctgatcgccggagcttttttttggctggtgtctcttttaatcagttccctggtgtggtttatggccagggtaatcatcgataataaagacggccctacgcagaagtacctgctgatattcggcgcattcgtttctgtgtacattcaggaaatgttcagattcgcctattacaagctgctgaagaaagcctcagaggggctgaaatctatcaaccccggagagacagccccatcaatgcgcttgttggcttacgtgagcggactgggcttcgggataatgagtggagtgttctcttttgtgaataccctctcggactccctgggtcccggtaccgtcggcattcacggcgactcaccacaattctttctgtatagtgcctttatgactctggttatcatactgctgcatgtcttttggggcatagtgttctttgatggatgcgaaaaaaaaaagtggggaatcctgctcatagtcctgcttacacacttgcttgtctctgcccagactttcatcagtagctactatggcattaatcttgctagcgcatttatcatccttgtacttatggggacatgggccttcctggctgcgggtggatcttgcagatcattgaaactctgcctcttgtgccaagacaagaatttcttgctgtacaatcagcgcagtcgatag

SEQ ID NO: 221523 - DNA, 4189 bp, Artificial Sequence
  derived and/or modified sequence
accgaaccccgcccgcgccgggagcatctcgcgtccccaacgggcccccgggtcggtttccgcggtggccatgactgcggccgtgttcttcggctgcgccttcattgccttcgggcctgcgctcgccctttatgtcttcaccatcgccaccgagccgttgcgtatcatcttcctcatcgccggagctttcttctggttggtgtctctactgatttcgtcccttgtttggttcatggcaagagtcattattgacaacaaagatggaccaacacagaaatatctgctgatctttggagcgtttgtctctgtctatatccaagaaatgttccgatttgcatattataaactcttaaaaaaagccagtgaaggtttgaagagtataaacccaggtgagacagcaccctctatgcgactgctggcctatgtttctggcttgggctttggaatcatgagtggagtattttcctttgtgaataccctatctgactccttggggccaggcacagtgggcattcatggagattctcctcaattcttcctttattcagctttcatgacgctggtcattatcttgctgcatgtattctggggcattgtattttttgatggctgtgagaagaaaaagtggggcatcctccttatcgttctcctgacccacctgctggtgtcagcccagaccttcataagttcttattatggaataaacctggcgtcagcatttataatcctggtgctcatgggcacctgggcattcttagctgcgggaggcagctgccgaagcctgaaactctgcctgctctgccaagacaagaactttcttctttacaaccagcgctccagataacctcagggaaccagcacttcccaaaccgcagactacatctttagaggaagcacaactgtgcctttttctgaaaatccctttttctggtggaattgagaaagaaataaaactatgcagatatgcgttccattcacttggctttcacacaactgctctccgaaaggggtgctcagtggtgtgcgtcctggctgcacgagaatcacctgggacagtgtaaagccgactgattctgggctccaccttccagagctaattggcctgggcacgtggtgagttttaaaagcttcccaggtgattctgatgtgcagccatgttgagacccactggtttggtatccaaataggagcttcctgagaacaccttaagtggatgagaatctggtctttagctgtctcctaactcaactcgtgctgagcaagtaagtatctgaatgtcaaatcctggttatcttttatcttcctaagttctgaagtcacaaaaggctaaagggctatcacccctgctcactgtttgcgtgtacttcaccatcttaggagaacacggtaggttgggcttctaaatgcaataataaattacgctgactgtggtaacttagccaaagtaagatactgattaagccgtatttttctgaagtgcttccattccaggttttgctttctgaggcattacattgtttttgagtatagattacattttattaactaaaaatgattgttttgtgacttccttgggaaggtattttaaaatcaggaatttttatgcaatgtctataagcctgtttaaagctttccatgggctctgccccaaggccgttggctgcagcgttcaccatctgagtgccagttgctggactagttgaggtgaagtgcattgttttctctctgagcagctgtgcggggagctgagtgatgtgccctgggacaggcttcactggagctggtggaagtataaccagaagcacaaggaaatgagccaaaagggtgtcattgacacttttcatttgctcctgtgatactaacaacactttcacccaaatggcttaatgtaatattggaaatagatcttaaactgccaaatctcacactattgcataatccatatgctctttagatctagtcagtgtctctgggttttggtagcagatacagcgttccctttacaggaatacccaaggtgttctttcagcttccagacaggtcctttgatttcctttataaagggaaaattctggcaaatcgtgcctttactattagaaattgttcccagttgatgtcttttggggagctggtggcatgaaatgcaaatgacctatacattaaagtgatgtctcagtgaataccatacatgcagtagaacattcagaagagaggagcagcaatcctgaggggctgggggagtgacagtggcaggacggatgggcgggtttgacagattgtggtgggaagaagaatgatcatgtttaaagctaacatagccagtgttttgggctagccacacatcattccagagaccaaaaccttactcatgaactagacctttatcgatatcagtgaacccccatgtttaaaatattagaatgtttagagataaaatagagataatagagataaaagaagaggagggcttctatcaatgctgtaaacagtctgataagcgactgtggttattcccctaaagtttacttcagcactaacactagtgcttccgctggagtttgcagttttccagctttatacaggattttcctttgactggaagagtcaaggatatagagactcaacagtgacatttattgtacaacatcaaggggaataggatactcatcaaactgggattattcttatcaaaacatggtcttctttgaataagaaaaatacatagttggttattatggacttaaaactgtgttaaatggatattctgataaaatatttgctgctctgtagagtgtggaaagtctgagaatattagctttactcatcttgagctttgaggatgttctctgtacgccgatggtttcatattaactaaaaaagctgggtattgtaaaatctcatttataaaaactcagatgagaagaaaattttctttgatggtgagactgttgtcttagttcaggaaattatttaataatcctttgttacctgtgaatgaaggaactttgtaattctgatttatcgtaaaacatgagcctttccagagtcagcttagacactgttgtcgcaaatagccatgctttgccttatgccaaggaggcccagagggagggcctagtcttcctctgttgctgtacatatattgaaatgcttttttttttttattttgcatttgttatctataatgagctttctgagccctgatattatgtgagacaaacaggagttattgatgttatacactcccttccattcaggattttctgcttggagggaaatatgttgaccttagagaattgtgaatattgttgcaattcttgaatatattaccatgtgaataatagagactgtgttgctctctagtataagctatatttatttttgattcatttgaattactagttataactggagaaattttgttacctctatcctggcttgcctgactggctgtataatagcagcagcctcttttagagcatcttaatgaaaacatggatgaaaggaattaatgatgatatctgcagactgcgtagaaaatggcttttgttcccagcgttaacattttcttctcaatcacatttcaatgtttgtggagagtggcagattcacaccagaaacactaggtgttcatatccatagcatggatgcagaataagcagttgggagagaagcttcttcctacctggtactcctcccattcacctcagcccagccccagacaggcgttagcattcagtgtgggccctcaggcagccctgaagcctggctgggtcatcagatgggggcagcctgtgacgggcaccagcggcctgattccagggaagagttcctggagggtgttggctgtttttgttagctcagtttttttctgggctccaccattcctaactccaggtagacaagatagatgtcacacacaacaattttaaagtattttgcttagtgcattttgtttatgattgcagtgtttgtttcttatttaataggctttttacttcattctattaaattttagtgtttagaagaggcgggtactgtcactgtgtaaaatatgtaatattttatatgttataccatgtcatatatacttgcaatatcagaccttgcattcaatatacaatgcaattgactctttgcagacctgcatttttcagtgaacaataaaaagattgtctggcactcctca

SEQ ID NO: 221524 - DNA, 872 bp, Artificial Sequence
  derived and/or modified sequence
tttccgcggtggccatgactgcggccgtgttcttcggctgcgccttcattgccttcgggcctgcgctcgccctttatgtcttcaccatcgccaccgagccgttgcgtatcatcttcctcatcgccggccgaagggtggaaacctgtaaaaacaccgaagcacctgactgtgcgtctccttctgggagcttgagctttcttctggttggtgtctctactgatttcgtcccttgtttggttcatggcaagagtcattattgacaacaaagatggaccaacacagaaatatctgctgatctttggagcgtttgtctctgtctatatccaagaaatgttccgatttgcatattataaactcttaaaaaaagccagtgaaggtttgaagagtataaacccaggtgagacagcaccctctatgcgactgctggcctatgtttctggcttgggctttggaatcatgagtggagtattttcctttgtgaataccctatctgactccttggggccaggcacagtgggcattcatggagattctcctcaattcttcctttattcagctttcatgacgctggtcattatcttgctgcatgtattctggggcattgtattttttgatggctgtgagaagaaaaagtggggcatcctccttatcgttctcctgacccacctgctggtgtcagcccagaccttcataagttcttattatggaataaacctggcgtcagcatttataatcctggtgctcatgggcacctgggcattcttagctgcgggaggcagctgccgaagcctgaaactctgcctgctctgccaagacaagaactttcttctttacaaccagcgctccagataacctcagggaaccagcacttc

SEQ ID NO: 221525 - DNA, 774 bp, Artificial Sequence
  derived and/or modified sequence
atgaccgccgccgtgttcttcggctgcgccttcatcgccttcggccccgccctggccctgtacgtgttcaccatcgccaccgagcccctgagaatcatcttcctgatcgccggcgccttcttctggctggtgagcctgctgatcagcagcctggtgtggttcatggccagagtgatcatcgacaacaaggacggccccacccagaagtacctgctgatcttcggcgccttcgtgagcgtgtacatccaggagatgttcagattcgcctactacaagctgctgaagaaggccagcgagggcctgaagagcatcaaccccggcgagaccgcccccagcatgagactgctggcctacgtgagcggcctgggcttcggcatcatgagcggcgtgttcagcttcgtgaacaccctgagcgacagcctgggccccggcaccgtgggcatccacggcgacagcccccagttcttcctgtacagcgccttcatgaccctggtgatcatcctgctgcacgtgttctggggcatcgtgttcttcgacggctgcgagaagaagaagtggggcatcctgctgatcgtgctgctgacccacctgctggtgagcgcccagaccttcatcagcagctactacggcatcaacctggccagcgccttcatcatcctggtgctgatgggcacctgggccttcctggccgccggcggcagctgcagaagcctgaagctgtgcctgctgtgccaggacaagaacttcctgctgtacaaccagagaagcagatag

SEQ ID NO: 221526 - protein, 655 aa, Artificial Sequence
  derived and/or modified sequence
MPEDRNSGGCPAGALASTPFIPKTTYRRIKRCFSFRKGIFGQKLEDTVRYEKRYGNRLAPMLVEQCVDFIRQRGLKEEGLFRLPGQANLVKELQDAFDCGEKPSFDSNTDVHTVASLLKLYLRELPEPVIPYAKYEDFLSCAKLLSKEEEAGVKELAKQVKSLPVVNYNLLKYICRFLDEVQSYSGVNKMSVQNLATVFGPNILRPKVEDPLTIMEGTVVVQQLMSVMISKHDCLFPKDAELQSKPQDGVSNNNEIQKKATMGQLQNKENNNTKDSPSRQCSWDKSESPQRSSMNNGSPTALSGSKTNSPKNSVHKLDVSRSPPLMVKKNPAFNKGSGIVTNGSFSSSNAEGLEKTQTTPNGSLQARRSSSLKVSGTKMGTHSVQNGTVRMGILNSDTLGNPTNVRNMSWLPNGYVTLRDNKQKEQAGELGQHNRLSTYDNVHQQFSMMNLDDKQSIDSATWSTSSCEISLPENSNSCRSSTTTCPEQDFFGGNFEDPVLDGPPQDDLSHPRDYESKSDHRSVGGRSSRATSSSDNSETFVGNSSSNHSALHSLVSSLKQEMTKQKIEYESRIKSLEQRNLTLETEMMSLHDELDQERKKFTMIEIKMRNAERAKEDAEKRNDMLQKEMEQFFSTFGELTVEPRRTERGNTIWIQ

SEQ ID NO: 221527 - DNA, 1968 bp, Artificial Sequence
  derived and/or modified sequence
atgccagaagataggaattcgggcggttgtcctgcgggggcgctagctagcacccctttcattcccaaaactacttatcgccgtattaaacgttgctttagcttccggaaaggaatcttcggacagaaactggaagacaccgtgagatacgaaaaacgttacggaaatcggctcgcgcccatgttggttgaacagtgcgtggactttattaggcagcgcgggctcaaggaagaaggtctttttcggctgcctggccaggccaacctggtgaaagaacttcaggatgcctttgactgtggagagaaaccaagtttcgatagcaatactgatgttcacaccgtggcctcactcctcaagctctatctgagggaactgccagaaccagtgattccctacgctaaatacgaggatttcctcagctgtgcgaagctgctgagcaaggaggaagaagccggggtgaaggagcttgccaagcaagtgaagtctcttccggtggtaaattataatctcctgaagtacatttgtaggtttttggatgaggtgcagtcgtattcaggggtcaataagatgagcgtacagaatctggcaacggttttcggacctaacatactgaggcctaaagttgaagatcccctgaccatcatggaggggactgtggttgtacagcagcttatgagtgttatgatttcgaagcacgattgcctcttccccaaagacgcggaactccaatctaaaccacaagacggcgtctcaaacaataatgaaattcagaaaaaggcaacaatgggccaactgcagaataaggagaataataacactaaggactcccctagcagacaatgttcttgggacaagagcgagtctcctcagcgctcttccatgaacaatggatcacccactgccttaagtggcagcaagactaatagcccaaaaaattccgtgcacaaattagacgtatcaagatcaccaccattgatggtgaagaagaatccagcattcaacaaggggtctggcattgtgactaatggctcttttagcagcagcaatgctgagggactcgagaaaacccagacaactccaaatggcagcctgcaggcacggcgctcctcatcactgaaggtgtcaggaaccaagatgggcactcatagcgtgcaaaatggcaccgtgaggatgggcattctgaacagcgataccctcgggaatcctacgaatgtgcgaaatatgagctggctacccaacgggtatgtgacacttagggacaacaagcagaaggagcaggccggcgagctggggcaacataacagactgtctacgtacgacaacgttcaccagcagttctctatgatgaatctggatgacaagcagtctatagattcggcaacttggagcacatcttcttgcgagatcagcttgccagaaaacagtaattcctgccgaagttccacgaccacttgccctgagcaggacttttttggcggaaacttcgaggacccagttctggatgggccacctcaagatgatctgagccatccccgggactacgaatctaaaagtgaccataggtctgtcggcggaagaagctcccgcgcgacctccagctccgataatagcgagacatttgtcggaaacagctcatctaaccacagcgctctgcattccctggtgagttcgctgaagcaggagatgacgaagcaaaagatagagtacgagagtcgcatcaagtccctcgaacagcgtaaccttacactggaaactgaaatgatgtctttgcacgatgagctggatcaggaacgaaagaagttcactatgattgaaatcaagatgaggaacgccgagcgagcaaaggaggacgccgaaaaacgcaatgatatgctgcaaaaggagatggagcagttcttctcgacatttggcgaacttaccgtggaaccccggcgcactgagcgtgggaatacaatctggatccagtag

SEQ ID NO: 221528 - DNA, 1968 bp, Artificial Sequence
  derived and/or modified sequence
atgccagaagatagaaattctgggggctgcccagctggggccctggccagcacccccttcatccccaagaccacctaccgccgcatcaagcgctgcttctccttcaggaagggcatcttcggccagaagctggaggacacagtgcgctatgagaagagatatggcaaccggctggcccccatgctggtggagcagtgtgtggacttcatccggcagaggggcctgaaggaggagggcctcttccggctgcccggccaggccaacctggtgaaggagctgcaggatgcctttgactgtggggagaagcccagctttgacagcaacacagatgtgcacacagtggccagcctgctgaagctgtacctgcgggagctgcctgagcccgtcatcccctatgccaagtatgaggacttcctgagctgtgccaagctgctgagcaaggaggaggaggccggcgtgaaggagctggccaagcaggtgaagagcctgcctgtggtgaactacaacctgctgaagtacatctgccgcttcctggatgaggtgcagagctacagcggcgtgaacaagatgtctgtgcagaacctggccaccgtgtttggccccaacatcctgcggcccaaggtggaggaccccctgaccatcatggagggcaccgtggtggtgcagcagctgatgtctgtgatgatcagcaagcatgactgcctcttccccaaggatgctgagctgcagagcaagccccaggatggagtgagcaacaacaatgagatccagaagaaggccaccatgggccagctgcagaacaaggagaacaacaacaccaaggacagccccagccggcagtgctcctgggacaagtctgagagcccccagaggagctccatgaacaacggcagccccacagccctgagcggcagcaagaccaacagccccaagaacagcgtgcacaagctggatgtgagccgcagcccccccctgatggtgaagaagaacccagccttcaacaagggcagcggcatcgtgaccaacggcagcttcagcagcagcaatgctgagggcctggagaagacccagaccaccccaaatggcagcctgcaggcccggcgcagcagcagcctgaaggtgtctggcaccaagatgggcacccacagcgtgcagaatggcaccgtgaggatgggcatcctgaacagcgacaccctgggcaaccccaccaacgtgaggaacatgtcctggctgcccaacggctacgtgaccctgcgggacaacaagcagaaggagcaggccggggagctgggccagcacaaccggctgagcacctatgacaacgtgcaccagcagttctccatgatgaacctggatgacaagcagagcattgattctgccacctggagcaccagcagctgtgagatcagcctgcctgagaacagcaacagctgccgcagcagcaccaccacctgcccagagcaggacttctttggaggcaactttgaggaccctgtgctggatggccccccccaggatgacctgagccacccccgggactatgagagcaagagtgaccacaggtctgtgggcggccgcagcagccgggccaccagcagcagtgacaacagcgagacctttgtgggcaacagcagcagcaaccacagcgccctgcacagcctggtgagcagcctgaagcaggagatgaccaagcagaagattgaatatgagagccgcatcaagagcctggagcagaggaacctgaccctggagacagagatgatgagcctgcatgatgagctggaccaggagaggaagaagttcaccatgattgagatcaagatgagaaatgctgagcgggccaaggaggatgctgagaagagaaatgacatgctgcagaaggagatggagcagttcttcagcaccttcggggagctgactgtggagcccaggagaacagagcggggcaacaccatctggatccagtag

SEQ ID NO: 221529 - DNA, 1968 bp, Artificial Sequence
  derived and/or modified sequence
atgcccgaggaccggaacagcggcggctgccccgccggcgccctggccagtacacccttcatcccgaaaactacatacaggaggattaaacggtgcttctccttccgaaaaggaattttcggtcagaagctggaggacactgtgagatacgagaaaagatacgggaataggctggccccaatgctcgtggagcagtgtgtggattttatccgccagcgaggactaaaagaggagggcctgtttcgcctgccagggcaagctaacctggtgaaagagttgcaagacgcttttgattgcggggagaagccatcttttgactccaatactgacgtgcacaccgttgcatccctcctgaaactgtatctgagagaactgcccgagcctgtgattccgtatgctaagtacgaggacttcttgagctgcgcaaaattactgtctaaggaagaagaggcgggggtcaaagaactcgctaagcaggtgaaatcgctaccagtggtgaactacaacctcttaaaatacatttgccggttcctggatgaggtgcagtcctacagtggagtgaacaagatgagtgttcagaacctggctactgtattcggccccaatatcctgcgccctaaagtcgaggacccgctaacgatcatggagggcacagttgtggtgcagcagctgatgagcgttatgatcagcaagcatgactgcttgtttcctaaggacgccgagttgcaatccaaaccgcaggacggagtcagtaacaacaatgagatacagaaaaaggccacgatgggccagttgcaaaataaggagaataacaacacgaaggattcacccagtcgtcagtgctcctgggacaaaagcgagtccccccagagaagcagcatgaacaacggctcaccaacagccctttccgggtctaagaccaactctccgaagaatagtgtacataagctagacgttagcaggtcccctcccctcatggttaaaaagaatcccgctttcaataaggggagcggaattgtcaccaacggaagcttttcatcttcaaatgccgagggcctagaaaagacccagactacaccaaacggatccctgcaggccaggcgctcttccagcctgaaagtcagtggtactaaaatggggactcacagcgttcagaatggaaccgtgcgcatgggaatcctgaacagcgatactcttgggaaccctactaacgtgcgaaacatgtcatggcttcctaatgggtacgttacgcttcgtgacaacaaacagaaggagcaggcaggcgaactgggccaacataaccgccttagtacatacgataacgtgcatcagcagttctccatgatgaatttggatgacaaacagtcaatagactctgccacatggtctactagcagctgcgagatcagcctcccagagaattcaaatagttgtcgaagcagcacaaccacctgccccgaacaggatttctttggaggtaacttcgaggaccctgttctggatgggcctccacaggatgatttatcccaccctcgagattacgaaagcaaatctgatcaccgctctgttggtggtagatcttcacgggccacctcatcatcagataattcagagactttcgtgggtaatagttcaagcaatcactccgctcttcattctctggtgagcagcttgaagcaggagatgacaaaacagaaaatagagtacgaaagtcgaattaagagcctcgaacaaagaaatttaaccctggaaactgagatgatgagtctccatgatgaactggatcaggagaggaaaaagttcaccatgattgagattaaaatgaggaatgctgaaagggcaaaagaggacgccgaaaagaggaacgacatgctgcagaaagagatggagcagtttttcagcactttcggggagctgactgtggaaccgcgtcgcacggagagaggcaataccatttggatccagtag

SEQ ID NO: 221530 - DNA, 1968 bp, Artificial Sequence
  derived and/or modified sequence
atgccagaagatcgtaatagtgggggatgtccagccggagcactcgccagcacaccatttattcctaaaactacatatagacgcatcaagcgctgtttctcatttaggaaaggcatttttggccagaagctggaagataccgtgcggtacgaaaaacgctacggaaaccggctagcccctatgctcgtcgaacagtgcgttgacttcattcgccagaggggtctgaaagaagaagggctgtttcgcctccccggacaggccaatctcgtgaaggagctgcaggacgcgttcgactgcggggagaagccttctttcgacagtaataccgatgtccatacagtcgcatcgttgctcaaattgtaccttcgggaactacccgagcctgttataccttatgcaaagtatgaggacttcctgagttgcgccaagctgctgagtaaggaagaagaagctggcgttaaagaactcgcaaagcaggtcaagtctttgcctgtcgtcaattataacttgctgaaatacatctgccgcttccttgacgaggtacagtcctacagtggtgtcaataagatgagcgtgcagaatcttgcaacagtgttcgggcctaatatccttagacccaaagtggaagatcctctgaccatcatggaaggcactgtggtcgtccaacagctgatgtcggtgatgatctcaaaacatgactgcctctttccaaaggacgctgagctacagagtaaaccccaggatggcgtcagtaataataacgagattcaaaagaaggcaactatgggacagttgcaaaacaaggagaacaataacacaaaggactcccctagccggcagtgttcttgggacaagtctgagagcccccagcgttcttctatgaataacgggagcccaacagccttatccgggtccaagaccaattctcccaagaactccgtgcataaattggatgtgagtagaagccccccattgatggtgaagaagaatccggcattcaacaaggggtccggcattgtcacaaacgggagcttttcgtcatccaatgccgagggacttgagaagacgcaaaccaccccaaacggctcacttcaagccagacggagctcctctttgaaagtctccgggaccaagatgggcacccactccgtgcagaacggtactgtgaggatgggcatattgaattccgacaccttgggtaacccaactaacgtccgtaacatgtcgtggttgccaaatggttatgtcactctgagggacaacaagcagaaggagcaggcaggcgagctaggccagcacaacaggctgagtacatacgataacgtgcaccagcagttttctatgatgaatctcgacgataaacaaagtattgattctgccacatggtctacctcttcctgtgaaatatcccttcccgaaaatagtaatagttgccgaagcagcacaacaacctgccctgaacaggacttttttgggggtaatttcgaggatcctgtgctagacggaccaccccaggatgatttaagccacccccgtgactatgagagtaaatccgatcaccgatccgtgggaggccgatcttcccgggcaacatcctcttctgataatagtgaaacctttgttggaaattcaagctccaaccatagcgccctacacagccttgtctcctccctcaaacaggaaatgaccaagcagaagatcgaatacgagtcaaggattaaatcattagagcagaggaatctgacactagagacagagatgatgtctcttcatgatgagcttgaccaggagcggaagaaattcactatgatcgaaattaagatgaggaatgccgaacgcgcaaaggaggacgccgagaaacgcaatgatatgctacagaaggaaatggaacaatttttttccacatttggggagctgacagtggagcctcggagaacagaaaggggcaacacgatctggattcagtag

SEQ ID NO: 221531 - DNA, 4572 bp, Artificial Sequence
  derived and/or modified sequence
gggagtttgaagacagaaaggaaaggggagaaacctgcagagagcatcaaaggatggggggtgctataaaagaagcaggggggtcctttgaaagaaatctatcatgcactgaaatgctttctggagaaggtgccattattttcctcccctcttgctcagatgaaaggagccagcaaggacagtcctgaaatattcctcaggggactttttgtcattgttcctctttcctcttgcacagagctatttgctgacctttccagaggaatctcagtccagctgagaagacagttcttaataaaaacaaaaaaatgcaaaaaccaattcctgctgtttgaatgggaatggtagcttgcttgctgcagttcttttcctgtgacattttggaatgtctgcagaaacttaaaaaaaagaaaaaaaaaaccttaaaaactccctggattaggcaagagaaaaggaagtttttttttgctaaacaggagtaaatgagaggtggtaacttatccctaagccaggacctggatgatcaaaaccttcaaattctagggatcagcacttcaaaaataacaagtaaacaagcatgaggagtggctgttgggtttcgctcagaggcaggttttaaaggaagccaaaaccgggttcagaacttcaggcctgtacgatgcctgaagaccggaattctggggggtgcccggctggtgccttagcctcaactcctttcatccctaaaactacatacagaagaatcaaacggtgttttagttttcggaaaggcatttttggacagaaactggaggatactgttcgttatgagaagagatatgggaaccgtctggctccgatgttggtggagcagtgcgtggactttatccgacaaagggggctgaaagaagagggtctctttcgactgccaggccaggctaatcttgttaaggagctccaagatgcctttgactgtggggagaagccatcatttgacagcaacacagatgtacacacggtggcatcacttcttaagctgtacctccgagaacttccagaaccagttattccttatgcgaagtatgaagattttttgtcatgtgccaaactgctcagcaaggaagaggaagcaggtgttaaggaattagcaaagcaggtgaagagtttgccagtggtaaattacaacctcctcaagtatatttgcagattcttggatgaagtacagtcctactcgggagttaacaaaatgagtgtgcagaacttggcaacggtctttggtcctaatatcctgcgccccaaagtggaagatcctttgactatcatggagggcactgtggtggtccagcagttgatgtcagtgatgattagcaaacatgattgcctctttcccaaagatgcagaactacaaagcaagccccaagatggagtgagcaacaacaatgaaattcagaagaaagccaccatggggcagttacagaacaaggagaacaataacaccaaggacagccctagtaggcagtgctcctgggacaagtctgagtcaccccagagaagcagcatgaacaatggatcccccacagctctatcaggcagcaaaaccaacagcccaaagaacagtgttcacaagctagatgtgtctagaagcccccctctcatggtcaaaaagaacccagcctttaataagggtagtgggatagttaccaatgggtccttcagcagcagtaatgcagaaggtcttgagaaaacccaaaccacccccaatgggagcctacaggccagaaggagctcttcactgaaggtatctggtaccaaaatgggcacgcacagtgtacagaatggaacggtgcgcatgggcattttgaacagcgacacactcgggaaccccacaaatgttcgaaacatgagctggctgccaaatggctatgtgaccctgagggataacaagcagaaagaacaagctggagagttaggccagcacaacagactgtccacctatgataatgtccatcaacagttctccatgatgaaccttgatgacaagcagagcattgacagtgctacctggtccacttcctcctgtgaaatctccctccctgagaactccaactcctgtcgctcttctaccaccacctgcccagagcaagacttttttggggggaactttgaggaccctgttttggatgggcccccgcaggacgacctttcccaccccagggactatgaaagcaaaagtgaccacaggagtgtgggaggtcgaagtagtcgtgccaccagtagcagtgacaacagtgagacatttgtgggcaacagcagcagcaaccacagtgcactgcacagtttagtttccagcctgaaacaggaaatgaccaaacagaagatagagtatgagtccaggataaagagcttagaacagcgaaacttgactttggaaacagaaatgatgagcctccatgatgaactggatcaggagaggaaaaagttcacaatgatagaaataaaaatgcgaaatgccgagcgagcaaaagaagatgccgagaaaagaaatgacatgctacagaaagaaatggagcagtttttttccacgtttggagaactgacagtggaacccaggagaaccgagagaggaaacacaatatggattcagtgagcctgctttcgcctgctgtctctgatggctctggcaaggactccagggattctggtgggatatgacttagaaccaggtggctggtcacctggatgtacagaagtctaactggtgaaggaatatcatttacagacattaaacatccatatctgcaatgtgtaccaaagttatatcatgccccataatgctactgtcaagtgttacaactggatatgtgtatatagagtagtttttcaaaagtaaactaaaaatgagaagcatatttcaagaattattttattgcaagtcttgtatttaaatgttaaatcaatatgttgttgcaatttagcttgctttcaagcttcaccccttgcacttaacataagctatttttggcattgtgttatcatcggcttattttatagatcaatatttttatttcccttttttgctgaggaaatgaagataagcaaaaatataaatatatatataaatatatgagttattaaaatcagaagaatactttgtggctgtgctgtttgtgccaatagactttgtcatgaccaaaaagagaaatgtaaatagttttataaaatacagtcgaatcaccaggaacctttgagctgcttttaaaattcttcccctggcaccactcagttttgcttttgcgaggcgatttgacataggaactttgagactccatgagaaagtccctttctgaggcccactgtctaccttgccagatcctcagtgcgtatcgccaatgcaggatgctccttagaaaagaaaaaatggtaaagaatggcatttaacgattcaggctttgaattactctgtccctctggaccgaatctctttaactgctggatagttttagaggaattctcctgctacttaggtactgggaaacaatgcttgctaaaccatgcccacgtgagcacctgtctcccactcaaacctctcccatctcccaacaactgcactttagaataccagcagtgaaatggtattactgtttccctctgagtgaaactgctagagtatatgtcacgtagtgacatttttttctcactcaggctattgccatctgggattctctccctactacagctggcaaagttggtttgcagcaagaagatagtgggagggggccaggctgcaggagaaggagaaaagtttagaagaaacaaaccattttgcttctaattttgacagtatcactttcctgttaaaacatacaataattttaaaaggtgaatgcctaaagttccaattttagcaaatatgggaacctcagcaatgctaattttctagaaaaacccagggctctttggagctagagttttgggagaacagttcttcacaataaggcaatggttttgagaggccaggcaaataatctttctcaccgtagaacaaaaagttacaaaaggcataatcggaaatagagactacatacttgagtttatggggtttgtgttgtttgaaggttcaatgcttgcatgtgtttatttattttcaagagggaaagtggtctgtactgctttcatccttgccactgtcttgcttttattttttactctcccactgagcaagcgtctgtggtcctatggtatcaaccagtatctttatagcaataatttctttaattcccttttctctctctttccaattatttaaccagttacttccacctggacatacgataggaaattcaaactcaaaatatgaaaattgatcttaataactctcccttcatatcttttcacctatttccagtccttatcatagttgataaaaacctcagactcatccagaaagctatatgatgcactagtaaaaaaaacaaagatattcaaactgcttgggttcaaatggtatacaatttgccagctgttactgaaccttctatgcataactttttttttcctctgtgcaattggaataataaaaatactactcccata

SEQ ID NO: 221532 - DNA, 1968 bp, Artificial Sequence
  derived and/or modified sequence
atgcccgaggacagaaacagcggcggctgccccgccggcgccctggccagcacccccttcatccccaagaccacctacagaagaatcaagagatgcttcagcttcagaaagggcatcttcggccagaagctggaggacaccgtgagatacgagaagagatacggcaacagactggcccccatgctggtggagcagtgcgtggacttcatcagacagagaggcctgaaggaggagggcctgttcagactgcccggccaggccaacctggtgaaggagctgcaggacgccttcgactgcggcgagaagcccagcttcgacagcaacaccgacgtgcacaccgtggccagcctgctgaagctgtacctgagagagctgcccgagcccgtgatcccctacgccaagtacgaggacttcctgagctgcgccaagctgctgagcaaggaggaggaggccggcgtgaaggagctggccaagcaggtgaagagcctgcccgtggtgaactacaacctgctgaagtacatctgcagattcctggacgaggtgcagagctacagcggcgtgaacaagatgagcgtgcagaacctggccaccgtgttcggccccaacatcctgagacccaaggtggaggaccccctgaccatcatggagggcaccgtggtggtgcagcagctgatgagcgtgatgatcagcaagcacgactgcctgttccccaaggacgccgagctgcagagcaagccccaggacggcgtgagcaacaacaacgagatccagaagaaggccaccatgggccagctgcagaacaaggagaacaacaacaccaaggacagccccagcagacagtgcagctgggacaagagcgagagcccccagagaagcagcatgaacaacggcagccccaccgccctgagcggcagcaagaccaacagccccaagaacagcgtgcacaagctggacgtgagcagaagcccccccctgatggtgaagaagaaccccgccttcaacaagggcagcggcatcgtgaccaacggcagcttcagcagcagcaacgccgagggcctggagaagacccagaccacccccaacggcagcctgcaggccagaagaagcagcagcctgaaggtgagcggcaccaagatgggcacccacagcgtgcagaacggcaccgtgagaatgggcatcctgaacagcgacaccctgggcaaccccaccaacgtgagaaacatgagctggctgcccaacggctacgtgaccctgagagacaacaagcagaaggagcaggccggcgagctgggccagcacaacagactgagcacctacgacaacgtgcaccagcagttcagcatgatgaacctggacgacaagcagagcatcgacagcgccacctggagcaccagcagctgcgagatcagcctgcccgagaacagcaacagctgcagaagcagcaccaccacctgccccgagcaggacttcttcggcggcaacttcgaggaccccgtgctggacggccccccccaggacgacctgagccaccccagagactacgagagcaagagcgaccacagaagcgtgggcggcagaagcagcagagccaccagcagcagcgacaacagcgagaccttcgtgggcaacagcagcagcaaccacagcgccctgcacagcctggtgagcagcctgaagcaggagatgaccaagcagaagatcgagtacgagagcagaatcaagagcctggagcagagaaacctgaccctggagaccgagatgatgagcctgcacgacgagctggaccaggagagaaagaagttcaccatgatcgagatcaagatgagaaacgccgagagagccaaggaggacgccgagaagagaaacgacatgctgcagaaggagatggagcagttcttcagcaccttcggcgagctgaccgtggagcccagaagaaccgagagaggcaacaccatctggatccagtag

SEQ ID NO: 221533 - protein, 442 aa, Artificial Sequence
  derived and/or modified sequence
MGLAMEHGGSYARAGGSSRGCWYYLRYFFLFVSLIQFLIILGLVLFMVYGNVHVSTESNLQATERRAEGLYSQLLGLTASQSNLTKELNFTTRAKDAIMQMWLNARRDLDRINASFRQCQGDRVIYTNNQRYMAAIILSEKQCRDQFKDMNKSCDALLFMLNQKVKTLEVEIAKEKTICTKDKESVLLNKRVAEEQLVECVKTRELQHQERQLAKEQLQKVQALCLPLDKDKFEMDLRNLWRDSIIPRSLDNLGYNLYHPLGSELASIRRACDHMPSLMSSKVEELARSLRADIERVARENSDLQRQKLEAQQGLRASQEAKQKVEKEAQAREAKLQAECSRQTQLALEEKAVLRKERDNLAKELEEKKREAEQLRMELAIRNSALDTCIKTKSQPMMPVSRPMGPVPNPQPIDPASLEEFKRKILESQRPPAGIPVAPSSG

SEQ ID NO: 221534 - DNA, 1329 bp, Artificial Sequence
  derived and/or modified sequence
atgggactcgctatggaacacggtggatcgtacgcaagggctggcggttcaagcagaggctgctggtattacttgaggtatttcttcttattcgtctcactgattcagttccttatcatccttgggctggtgctctttatggtatacggaaacgtccacgtgtctaccgagtctaacctacaggcgaccgagaggagggcggagggactgtattcgcagctgctgggcctgaccgcatcccagagtaacctgaccaaagaactgaattttactacacgcgccaaggacgccataatgcagatgtggcttaatgcccgaagagatctggaccggatcaacgcaagcttccgacagtgccagggagaccgcgtaatctacaccaacaatcaacgttacatggcagcaattatactgagcgagaagcagtgccgcgatcagtttaaggatatgaataaaagctgtgacgctctcctgtttatgctgaaccaaaaagtaaagaccctggaggtcgagatagctaaggaaaaaactatttgcacaaaagacaaggagtcggtactgctgaacaaaagggtcgcagaggaacaacttgtggagtgtgtgaaaacgagagaattgcaacaccaggagagacagttagcaaaagagcagctgcagaaggtgcaggcattatgtctcccacttgacaaggacaagtttgaaatggatctgcgcaacctgtggcgtgattcgatcatcccaaggagtctggacaatctgggttataacctgtatcaccctctgggatccgagctcgccagtattcggcgggcctgcgatcacatgccgtcacttatgagcagcaaagtggaggaacttgccaggtccttacgcgccgacatcgagcgggtggccagagaaaattcagacctgcagcggcagaaactggaggcgcagcaggggctcagggcctcccaggaggccaaacagaaggtggaaaaggaggctcaggctagagaagccaagcttcaagccgagtgtagccgacagacacaactggcactcgaggaaaaggccgtgcttcggaaggagcgggataacctggctaaggagctggaggagaaaaaacgagaggctgaacagctgaggatggagctggccatccggaatagcgccttagatacgtgtatcaaaacgaaaagtcaacccatgatgccggtatcacggcccatgggccccgtgcccaacccccaacccatcgatcccgcatcattagaagaatttaaacgtaagatcctcgaatcccaacgcccccccgccgggattccggtcgccccttccagcgggtag

SEQ ID NO: 221535 - DNA, 1329 bp, Artificial Sequence
  derived and/or modified sequence
atgggcctggccatggagcacggcggcagctatgcccgggccggcggcagcagccggggctgctggtactacctgcgctacttcttcctgtttgtgtccctcatccagttcctgatcatcctgggcctggtgctcttcatggtgtatggaaatgtgcacgtgtccacagagagcaacctgcaggccacagaaagaagagctgagggcctgtacagccagctgctgggcctgacagccagccagagcaacctgaccaaggagctgaacttcaccacccgggccaaggatgccatcatgcagatgtggctgaatgcccggcgggacctggaccgcatcaatgccagcttccggcagtgccagggcgacagagtcatctacaccaacaaccagcgctacatggccgccatcatcctgtctgagaagcagtgccgggaccagttcaaggacatgaacaagagctgtgatgccctgctcttcatgctgaaccagaaggtgaagaccctggaggtggagatcgccaaggagaagaccatctgcaccaaggacaaggagagcgtgctgctgaacaagagggtggccgaggagcagctggtggagtgtgtgaagacccgggagctgcagcaccaggagcggcagctggccaaggagcagctgcagaaggtgcaggccctgtgcctgcccctggacaaggacaagtttgagatggacctgaggaacctgtggagggacagcatcatccccaggagcctggacaacctgggctacaacctgtaccaccccctgggcagcgagctggccagcatcagaagagcctgtgaccacatgcccagcctgatgagcagcaaggtggaggagctggcccggagcctgcgggctgacatcgagcgggtggcccgggagaacagcgacctgcagaggcagaagctggaggcccagcagggcctgcgggccagccaggaggccaagcagaaggtggagaaggaggcccaggcccgggaggccaagctgcaggctgaatgttcccggcagacccagctggccctggaggagaaggctgtgctgaggaaggagcgggacaacctggccaaggagctggaggagaagaagcgggaggccgagcagctgaggatggagctggccatccggaacagcgccctggacacctgcatcaagaccaagagccagcccatgatgcctgtgtcccggcccatgggccctgtgcccaacccccagcccattgatcctgccagcctggaggagttcaagaggaagatcctggagagccagaggcctcctgctggcatccctgtggcccccagcagtggatag

SEQ ID NO: 221536 - DNA, 1329 bp, Artificial Sequence
  derived and/or modified sequence
atgggcctggccatggagcacggcggcagctacgcccgggccggcggaagttcaagggggtgttggtactatttgcggtacttttttctgttcgtctccctgattcaattcctgatcattctgggactggtgctttttatggtctacggaaatgttcacgtttccaccgagagcaatctccaggccaccgagaggcgcgcagagggtctgtactctcagctcctcggcttgaccgcctcgcagtcaaaccttactaaggaactgaactttaccaccagagcgaaggacgcaatcatgcagatgtggttgaacgcacgaagagatttggatcgcattaatgccagctttcgacagtgtcaaggcgaccgcgttatctatactaataaccagcggtacatggccgccattatcctgagtgaaaagcaatgcagggaccagtttaaggacatgaataaatcctgtgacgccctgcttttcatgcttaaccaaaaggtaaagacactggaggtcgagatcgccaaagagaagacaatctgcactaaggataaggaatctgttctcctgaacaagagggttgctgaggagcaactcgttgaatgcgtgaagactagagagctgcaacatcaggagcgccagcttgccaaagaacagcttcagaaggtccaagctctgtgccttcccttggataaagataaattcgaaatggacctgcgaaacttatggcgagatagtattattccacgctcactcgacaaccttggttacaatttgtaccaccccctgggctcagaattggcatctatccgacgcgcctgcgaccacatgccatcactcatgagcagcaaagtagaagaactggctcgatctctgcgagccgatatcgagcgcgtcgcccgcgaaaactctgatctccagcgacagaagcttgaggcgcaacaagggctgcgggcatcccaagaagcaaaacagaaggttgagaaggaagcgcaggccagggaggcaaagctccaagccgaatgcagccgccaaacccagctcgccctggaggagaaggccgtgttgagaaaagagcgggataaccttgcgaaggagttggaagagaagaaacgggaggcggagcagctgagaatggagctggccatccgaaactcagcactcgatacatgtataaaaaccaaatcacagccaatgatgccagtttcccgaccaatgggccccgtcccaaacccccagcccattgaccccgcttcccttgaggagtttaaaaggaaaatcctcgaatcacaacggccaccagcaggtatacccgtcgctccatcatctggctag

SEQ ID NO: 221537 - DNA, 2287 bp, Artificial Sequence
  derived and/or modified sequence
gcaggcctggtggtgagcagggacggtgcaccggacggcgggatcgagcaaatgggtctggccatggagcacggagggtcctacgctcgggcggggggcagctctcggggctgctggtattacctgcgctacttcttcctcttcgtctccctcatccaattcctcatcatcctggggctcgtgctcttcatggtctatggcaacgtgcacgtgagcacagagtccaacctgcaggccaccgagcgccgagccgagggcctatacagtcagctcctagggctcacggcctcccagtccaacttgaccaaggagctcaacttcaccacccgcgccaaggatgccatcatgcagatgtggctgaatgctcgccgcgacctggaccgcatcaatgccagcttccgccagtgccagggtgaccgggtcatctacacgaacaatcagaggtacatggctgccatcatcttgagtgagaagcaatgcagagatcaattcaaggacatgaacaagagctgcgatgccttgctcttcatgctgaatcagaaggtgaagacgctggaggtggagatagccaaggagaagaccatttgcactaaggataaggaaagcgtgctgctgaacaaacgcgtggcggaggaacagctggttgaatgcgtgaaaacccgggagctgcagcaccaagagcgccagctggccaaggagcaactgcaaaaggtgcaagccctctgcctgcccctggacaaggacaagtttgagatggaccttcgtaacctgtggagggactccattatcccacgcagcctggacaacctgggttacaacctctaccatcccctgggctcggaattggcctccatccgcagagcctgcgaccacatgcccagcctcatgagctccaaggtggaggagctggcccggagcctccgggcggatatcgaacgcgtggcccgcgagaactcagacctccaacgccagaagctggaagcccagcagggcctgcgggccagtcaggaggcgaaacagaaggtggagaaggaggctcaggcccgggaggccaagctccaagctgaatgctcccggcagacccagctagcgctggaggagaaggcggtgctgcggaaggaacgagacaacctggccaaggagctggaagagaagaagagggaggcggagcagctcaggatggagctggccatcagaaactcagccctggacacctgcatcaagaccaagtcgcagccgatgatgccagtgtcaaggcccatgggccctgtccccaacccccagcccatcgacccagctagcctggaggagttcaagaggaagatcctggagtcccagaggccccctgcaggcatccctgtagccccatccagtggctgaggaggctccaggcctgaggaccaagggatggcccgactcggcggtttgcggaggatgcagggatatgctcacagcgcccgacacaaccccctcccgccgcccccaaccacccagggccaccatcagacaactccctgcatgcaaacccctagtaccctctcacacccgcacccgcgcctcacgatccctcacccagagcacacggccgcggagatgacgtcacgcaagcaacggcgctgacgtcacatatcaccgtggtgatggcgtcacgtggccatgtagacgtcacgaagagatatagcgatggcgtcgtgcagatgcagcacgtcgcacacagacatggggaacttggcatgacgtcacaccgagatgcagcaacgacgtcacgggccatgtcgacgtcacacatattaatgtcacacagacgcggcgatggcatcacacagacggtgatgatgtcacacacagacacagtgacaacacacaccatgacaacgacacctatagatatggcaccaacatcacatgcacgcatgccctttcacacacactttctacccaattctcacctagtgtcacgttcccccgaccctggcacacgggccaaggtacccacaggatcccatcccctcccgcacagccctgggccccagcacctcccctcctccagcctcctggcctcccagccacttcctcacccccagtgcctggacccggaggtgagaacaggaagccattcacctccgctccttgagcgtgagtgtttccaggaccccctcggggccctgagccgggggtgagggtcacctgttgtcgggaggggagccactccttctcccccaactcccagccctgcctgtggcccgttgaaatgttggtggcacttaataaatattagtaaatcctt

SEQ ID NO: 221538 - DNA, 1329 bp, Artificial Sequence
  derived and/or modified sequence
atgggactggccatggaacatggaggctcgtacgcaagggcgggaggcagctctaggggttgctggtactacttgcgctacttttttcttttcgtgtctttgatccagttcctgattattctgggcctcgtgttattcatggtgtacggaaacgtgcatgtttcgaccgagagtaatctgcaagcgaccgaacggagagccgaaggcctctattctcagctgctcggcctgacagcttctcaatccaatttaacaaaagaattgaatttcaccacacgagccaaggatgccattatgcagatgtggcttaatgccagacgagatctcgatagaatcaacgcttcattccgacaatgccagggcgaccgtgtcatctacaccaacaaccagcgatatatggccgcaattatcctcagtgagaaacagtgccgggaccagtttaaggacatgaacaagtcttgtgacgccctcctgttcatgttaaatcagaaagtcaagaccctggaggtggagatcgctaaggagaagaccatatgtaccaaggacaaagagtccgtcctgctgaataaaagggtagctgaggagcagctggtggaatgcgtgaagacaagggaacttcagcaccaggagcgacagctcgctaaggaacagttgcagaaggtccaggcgttatgtttgcccctggataaagacaaattcgaaatggacctcaggaatctttggcgagattccatcatccctagatccctcgacaacctcggctacaatctctaccaccctctgggtagcgagctggccagtatccgtcgggcttgcgatcacatgccgtcactcatgagttcgaaagtcgaggaactagctcggagccttcgcgctgacatagagcgtgtcgcacgtgagaactccgacttgcagagacaaaaactggaggcgcagcagggcctacgcgctagtcaggaggcaaagcaaaaagttgaaaaagaagctcaagctcgggaagcaaaactgcaggcagaatgtagtagacagacccagttggcattggaagaaaaggctgttttgcggaaggagcgtgacaacttagccaaagaactagaagaaaaaaaacgggaagccgagcagctcagaatggagttagcgatccgtaatagcgctcttgacacatgtataaaaaccaaaagtcagcccatgatgcccgtgtctagacctatggggcctgttccaaatccccagccaatcgatcccgcatccctagaggagttcaagcggaagattctggaaagtcagcgtcctccagcaggcatcccagtagcccctagcagcggatag

SEQ ID NO: 221539 - DNA, 1329 bp, Artificial Sequence
  derived and/or modified sequence
atgggcctggccatggagcacggcggcagctacgccagagccggcggcagcagcagaggctgctggtactacctgagatacttcttcctgttcgtgagcctgatccagttcctgatcatcctgggcctggtgctgttcatggtgtacggcaacgtgcacgtgagcaccgagagcaacctgcaggccaccgagagaagagccgagggcctgtacagccagctgctgggcctgaccgccagccagagcaacctgaccaaggagctgaacttcaccaccagagccaaggacgccatcatgcagatgtggctgaacgccagaagagacctggacagaatcaacgccagcttcagacagtgccagggcgacagagtgatctacaccaacaaccagagatacatggccgccatcatcctgagcgagaagcagtgcagagaccagttcaaggacatgaacaagagctgcgacgccctgctgttcatgctgaaccagaaggtgaagaccctggaggtggagatcgccaaggagaagaccatctgcaccaaggacaaggagagcgtgctgctgaacaagagagtggccgaggagcagctggtggagtgcgtgaagaccagagagctgcagcaccaggagagacagctggccaaggagcagctgcagaaggtgcaggccctgtgcctgcccctggacaaggacaagttcgagatggacctgagaaacctgtggagagacagcatcatccccagaagcctggacaacctgggctacaacctgtaccaccccctgggcagcgagctggccagcatcagaagagcctgcgaccacatgcccagcctgatgagcagcaaggtggaggagctggccagaagcctgagagccgacatcgagagagtggccagagagaacagcgacctgcagagacagaagctggaggcccagcagggcctgagagccagccaggaggccaagcagaaggtggagaaggaggcccaggccagagaggccaagctgcaggccgagtgcagcagacagacccagctggccctggaggagaaggccgtgctgagaaaggagagagacaacctggccaaggagctggaggagaagaagagagaggccgagcagctgagaatggagctggccatcagaaacagcgccctggacacctgcatcaagaccaagagccagcccatgatgcccgtgagcagacccatgggccccgtgcccaacccccagcccatcgaccccgccagcctggaggagttcaagagaaagatcctggagagccagagaccccccgccggcatccccgtggcccccagcagcggctag

SEQ ID NO: 221540 - protein, 532 aa, Artificial Sequence
  derived and/or modified sequence
MQGPWVLLLLGLRLQLSLGIIPVEEENPDFWNRQAAEALGAAKKLQPAQTAAKNLIIFLGDGMGVSTVTAARILKGQKKDKLGPETFLAMDRFPYVALSKTYSVDKHVPDSGATATAYLCGVKGNFQTIGLSAAARFNQCNTTRGNEVISVMNRAKKAGKSVGVVTTTRVQHASPAGAYAHTVNRNWYSDADVPASARQEGCQDIATQLISNMDIDVILGGGRKYMFPMGTPDPEYPDDYSQGGTRLDGKNLVQEWLAKHQGARYVWNRTELLQASLDPSVTHLMGLFEPGDMKYEIHRDSTLDPSLMEMTEAALLLLSRNPRGFFLFVEGGRIDHGHHESRAYRALTETIMFDDAIERAGQLTSEEDTLSLVTADHSHVFSFGGYPLRGSSIFGLAPGKARDRKAYTVLLYGNGPGYVLKDGARPDVTESESGSPEYRQQSAVPLDGETHAGEDVAVFARGPQAHLVHGVQEQTFIAHVMAFAACLEPYTACDLAPRAGTTDAAHPGPSVVPALLPLLAGTLLLLGTATAP

SEQ ID NO: 221541 - DNA, 1599 bp, Artificial Sequence
  derived and/or modified sequence
atgcagggaccctgggttctcctgctgttaggacttcggctacaactgtcactgggaataatccccgttgaggaggagaacccagatttctggaatagacaggctgcagaggcactcggcgcagccaagaagcttcagcctgcacagacagccgccaaaaacctgataatcttccttggcgatggcatgggagtctcaacagtcaccgccgcccgtatactgaaaggtcagaagaaggataaactaggtccagagacatttttggcgatggaccgatttccatatgtcgctctcagcaagacttactcagtggacaaacatgttcccgactccggagccaccgcaacagcctatctgtgcggcgtgaaagggaacttccagaccatcggcttgtccgctgcagcaagattcaaccagtgtaataccactcgagggaatgaggtgatttcggtaatgaatagggccaaaaaggccggaaagtccgtcggggtagtcactactacgcgcgtgcaacacgcctcaccggcgggagcttacgcacatacggtcaacaggaattggtactcagatgctgatgttcccgcatcagctaggcaggaggggtgccaggatatcgcaacacagctaatttctaacatggacattgacgtgattctgggagggggacgcaaatatatgttccccatgggcacccccgaccctgagtaccccgatgattactctcagggcggcaccagactggacggtaagaatctcgttcaggaatggctggctaagcatcaaggtgccagatacgtttggaatcggacggaactcctgcaggcaagtctggacccgtccgttacacatcttatgggcctgttcgaaccaggggacatgaaatacgagatacaccgcgatagcacactggacccttccctcatggaaatgacagaggccgccctgctgctgctgtctaggaaccctcgcggattttttctgtttgtggagggtggcagaatcgatcacggtcatcatgagtctagggcttaccgcgctctgacagaaaccatcatgtttgatgatgcgatcgagagggcagggcagctgacttccgaggaggacaccctgtctctggtgactgcggatcattcgcatgttttttcctttggcgggtatcccctcagaggctctagcatcttcggcctcgctcccggaaaggctagagaccgcaaggcatatactgttttgctttatggcaatgggccaggatacgtcctgaaagatggtgctaggccagacgttacggagagtgaaagtggctcccctgagtacaggcaacagagcgccgtgcccctggacggtgaaacccacgcaggggaggacgtcgctgtctttgcaagaggtccacaggctcacctagtccacggcgttcaagagcaaactttcattgcacacgtgatggcctttgccgcctgccttgaaccatacaccgcatgtgatctcgcccctagggctggcaccacagacgccgcccatcccggaccctctgttgtgcctgcattgttgccgttgcttgctgggacacttctgctgcttggtaccgccaccgccccctag

SEQ ID NO: 221542 - DNA, 1599 bp, Artificial Sequence
  derived and/or modified sequence
atgcagggcccctgggtgctgctgctgctgggcctgcggctgcagctgagcctgggcatcatccctgtggaggaggagaacccagacttctggaaccggcaggccgctgaggccctgggcgccgccaagaagctgcagcctgcccagacagctgccaagaacctgatcatcttcctgggagatggcatgggcgtgtccacagtgacagctgcccgcatcctgaagggccagaagaaggacaagctgggccctgagaccttcctggccatggaccgcttcccctacgtggccctgagcaagacctacagcgtggacaagcacgtgcctgattctggggccacagccacagcctacctgtgtggggtgaagggcaacttccagaccatcggcctgtctgctgctgcccgcttcaaccagtgcaacaccaccagaggaaatgaggtgatctctgtgatgaacagagccaagaaggccggcaagtctgtgggcgtggtgaccaccaccagggtgcagcacgccagccctgctggggcctatgcccacacagtgaacagaaactggtacagtgatgctgatgtgcctgccagcgcccggcaggagggctgccaggacatcgccacccagctgatcagcaacatggacattgatgtgatcctgggcggcggcaggaagtacatgttccccatgggcaccccagaccctgagtacccagatgactacagccagggcggcacccggctggatggcaagaacctggtgcaggagtggctggccaagcaccagggcgcccgctacgtgtggaacagaacagagctgctgcaggccagcctggaccccagcgtgacccacctgatgggcctgtttgagcccggggacatgaagtatgagatccaccgggacagcaccctggaccccagcctgatggagatgacagaagctgccctgctgctgctgagcaggaacccccggggcttcttcctgtttgtggagggcggcagaattgaccacggccaccacgagagccgggcctaccgggccctgacagagaccatcatgtttgatgatgccatcgagcgggccggccagctgaccagcgaggaggacaccctgagcctggtgacagctgaccacagccacgtgttctcctttggaggctaccccctgcggggcagcagcatcttcggcctggcccctgggaaggcccgggacaggaaggcctacacagtgctgctgtatggaaatggacctggctacgtgctgaaggatggagcccggccagatgtgacagaaagtgaaagtggcagccctgagtaccggcagcagagcgctgtgcccctggatggagagacccacgccggggaggatgtggccgtgtttgcccggggcccccaggcccacctggtgcatggagtgcaggagcagaccttcatcgcccacgtgatggcctttgctgcctgcctggagccctacacagcctgtgacctggcccccagggctggcaccacagatgctgcccaccctggccccagcgtggtgcctgccctgctgcccctgctggccggcaccctgctgctgctgggcacagccacagccccctag

SEQ ID NO: 221543 - DNA, 2493 bp, Artificial Sequence
  derived and/or modified sequence
catactccatacctgggatttccgcctcgccgctctccgactgcttccagacatgcaggggccctgggtgctgctcctgctgggcctgaggctacagctctccctgggcatcatcccagttgaggaggagaacccggacttctggaaccgccaggcagccgaggccctgggtgccgccaagaagctgcagcctgcacagacagccgccaagaacctcatcatcttcctgggtgacgggatgggggtgtctacggtgacagctgccaggatcctaaaagggcagaagaaggacaaactggggcctgagaccttcctggccatggaccgcttcccgtacgtggctctgtccaagacatacagtgtagacaagcatgtgccagacagtggagccacagccacggcctacctgtgcggggtcaagggcaacttccagaccattggcttgagtgcagccgcccgctttaaccagtgcaacacgacacgcggcaacgaggtcatctccgtgatgaatcgggccaagaaagcaggaaagtcagtgggagtggtaaccaccacacgggtgcagcatgcctcgccagccggcgcctacgcccacacggtgaaccgcaactggtactcggatgccgacgtgcctgcctcggcccgccaggaggggtgccaggacatcgccacgcagctcatctccaacatggacattgatgtgatcctaggtggaggccgaaagtacatgtttcccatggggaccccagaccctgagtacccagatgactacagccaaggtgggaccaggctggacgggaagaatctggtgcaggaatggctggcgaagcaccagggtgcccggtacgtgtggaaccgcactgagctcctgcaggcttccctggacccgtctgtgacccatctcatgggtctctttgagcctggagacatgaaatacgagatccaccgagactccacactggacccctccctgatggagatgacagaggctgccctgctcctgctgagcaggaacccccgcggcttcttcctcttcgtggagggtggtcgcatcgaccatggtcatcatgaaagcagggcttaccgggcactgactgagacgatcatgttcgacgacgccattgagagggcgggccagctcaccagcgaggaggacacgctgagcctcgtcactgccgaccactcccacgtcttctccttcggaggctaccccctgcgagggagctccatcttcgggctggcccctggcaaggcccgggacaggaaggcctacacggtcctcctatacggaaacggtccaggctatgtgctcaaggacggcgcccggccggatgttacggagagcgagagcgggagccccgagtatcggcagcagtcagcagtgcccctggacggagagacccacgcaggcgaggacgtggcggtgttcgcgcgcggcccgcaggcgcacctggttcacggcgtgcaggagcagaccttcatagcgcacgtcatggccttcgccgcctgcctggagccctacaccgcctgcgacctggcgccccgcgccggcaccaccgacgccgcgcacccggggccgtccgtggtccccgcgttgcttcctctgctggcagggaccttgctgctgctggggacggccactgctccctgagtgtcccgtccctggggctcctgcttccccatcccggagttcccctgctccccacctccagtcgtcctgccggacctccacctggagctgtcacccccggagtcgccacacagacgtcctgccatggaaccttcccctcccggtgcaccctggggaccgagcccttgacaccacgccctttgctttatcttgctcttgaaattttggccccaactccagggactggggatttgtgcctggcagctgcctgcatttcaggaaaagaggaggctcagaccatccagcccccgcccatatcctgaggtggatcaggcaggctctctccccggggacatgaggcacccatacctaggaccccctgcgccttttttagcttcagtcatggcagcacctgagggacacaaggacttgggtgcatcaggacgccttggagaagcgtggcttcctgccaccctgcaacccaccctcccagccaaggaggctgctgtggtggggatccccaggggggctttgacacagtcctctgctgtccctccactgggctaattctacacccctgtgcccctcctaggggcccatgagtcagagaggcttgccccaagtcacagccactcagatgttcgacgccccctaaggtccattccagcacccacctgagttccgaggagcacctgggaagctctgggtgcaggatagcagtccagagtccatggccccgcctaggccatctgggtgctgggcatggatttctcagcaaggaagactcattaccttccctccctgggcctccattcttctgggaaacacaaagcaataataaaaggaagtgttagacaatgtaa

SEQ ID NO: 221544 - DNA, 1599 bp, Artificial Sequence
  derived and/or modified sequence
atgcagggcccctgggtgctgctgctgctgggcctgcggctgcagctctccttgggcataattcccgtcgaagaggagaatccggacttttggaacagacaagccgctgaggcactgggggctgccaagaagttgcagcccgcccagacagccgccaagaatctgattatatttctgggcgatgggatgggggtgtcaaccgtcactgctgctagaatcttaaagggacagaaaaaagacaagttaggaccagaaacatttctggcgatggatagatttccttacgtggccctcagcaaaacctacagcgtggacaagcatgtgccagacagcggcgctactgctacagcctacctctgcggtgttaaggggaatttccaaacaattggtttatctgcagcggctcgttttaatcagtgtaacacgacccgcgggaatgaggtgattagtgtgatgaaccgtgcaaaaaaagcaggtaagtcggtcggcgtggttacaaccactagggtgcagcatgcgagtcctgcaggcgcgtacgcgcatacagtcaacaggaattggtactctgacgccgatgtaccagcgagtgccagacaagaaggctgtcaggatattgccactcagctgatctccaacatggatatagacgtcatactgggggggggacgaaaatacatgttcccgatggggaccccagatcccgaatatccagacgactactcacaaggggggactcggctcgatggaaagaacctcgttcaggaatggctcgccaaacaccagggagcccgttacgtgtggaatcgtacggagcttcttcaggcctcacttgacccaagcgtcacccacctgatgggtttgtttgaacctggagacatgaaatacgagatacatcgcgactctacactggatccatccctgatggaaatgactgaggccgccctgctcctcttgtctaggaacccacggggtttttttctcttcgtagagggagggcggatcgaccacgggcaccatgaaagcagagcttaccgggcattgacagagaccataatgttcgacgacgccatagaaagggcaggccagctgacctcagaagaagacaccctctcattggtcactgcagatcatagtcacgttttttcatttggaggctatccgcttcgtggctcctctatttttggcctcgccccaggcaaggcgcgtgatagaaaggcgtacacagtcctgctgtatggaaacgggccagggtacgtgctgaaagacggcgcccggcctgacgtaaccgagtcggagtctgggtccccagaatatcggcagcagtcggctgttcctctggacggcgaaacacacgcgggagaagatgtggcggtttttgcccgagggccacaggcacacctggtacacggtgtacaggagcagacgttcatcgcccacgtgatggcttttgctgcttgtctcgagccttacaccgcatgtgacctagcacctagagcaggcaccacggatgccgctcatcccggcccttccgttgtccccgcgctgctgcctcttctggcagggaccttgttgctgctcggaacagctaccgccccgtag

SEQ ID NO: 221545 - DNA, 1599 bp, Artificial Sequence
  derived and/or modified sequence
atgcaaggaccgtgggtgttgttgttgctggggttgcgtctgcagcttagcctgggcataatacccgtcgaggaagaaaatcctgacttttggaaccgacaggctgccgaggccctgggagctgccaaaaagctgcaaccagcgcaaacagcagcaaagaatctgatcatttttctcggtgacggcatgggtgttagcactgtgactgcagctcgtatcctgaaaggtcagaagaaggacaagcttgggcctgaaacctttctggcaatggacaggtttccctacgtggctttatccaaaacatactccgtggacaagcacgtcccagatagcggagctacagccaccgcttatctctgtggcgtgaaggggaacttccagactattggcttgagtgccgcagccaggttcaaccagtgcaatacgacccggggtaatgaggtcatctctgtcatgaaccgcgctaagaaagccggaaagtccgtcggcgtcgttaccacaacgagggtgcagcacgcatcgccagcaggggcttacgcccacaccgtaaatcgcaattggtattccgacgctgacgtacccgcttcggccagacaggaaggatgtcaggatatcgctacacagttgatctccaacatggacatcgatgtgatactgggtgggggacgaaaatacatgtttcccatgggcaccccagacccagagtacccagacgattattcccagggcggtacaaggctcgacgggaaaaatttggttcaggagtggctggcaaagcaccagggggctcggtacgtgtggaacaggactgaattgcttcaggcttccctcgacccatccgtaacgcacctgatgggactctttgagcctggagatatgaagtacgagattcaccgtgactccactctcgacccgtcactgatggaaatgacagaagctgccttactcttactgagcagaaaccccaggggatttttcctgtttgttgaggggggtagaatcgaccatggtcatcacgagtcacgggcatatcgagcgctgaccgaaactattatgttcgacgatgccattgagagagcaggtcagctcacctctgaagaagacactctctctctggtaactgctgatcattcccatgtgttcagttttggtggctacccccttagagggagcagtattttcggcctggccccaggtaaagcacgtgatcggaaggcctacacggtcttgctatacggcaacggtcccggttacgttttgaaggacggcgctaggcctgacgttacagagtccgagtccgggagcccagagtaccggcagcagagtgcagtgccactcgatggcgagacacatgccggagaagatgtggcggtgtttgccagagggcctcaggcacacttagtccatggcgtgcaggagcagactttcattgcccacgtgatggccttcgctgcttgcctggaaccgtatacagcctgcgatctagcccctagggccggaactactgatgccgctcaccctggcccttctgtcgttcccgcactcctaccactgcttgctggaacgctcctcctgctcggcacagccaccgcaccgtag

SEQ ID NO: 221546 - DNA, 1599 bp, Artificial Sequence
  derived and/or modified sequence
atgcagggcccctgggtgctgctgctgctgggcctgagactgcagctgagcctgggcatcatccccgtggaggaggagaaccccgacttctggaacagacaggccgccgaggccctgggcgccgccaagaagctgcagcccgcccagaccgccgccaagaacctgatcatcttcctgggcgacggcatgggcgtgagcaccgtgaccgccgccagaatcctgaagggccagaagaaggacaagctgggccccgagaccttcctggccatggacagattcccctacgtggccctgagcaagacctacagcgtggacaagcacgtgcccgacagcggcgccaccgccaccgcctacctgtgcggcgtgaagggcaacttccagaccatcggcctgagcgccgccgccagattcaaccagtgcaacaccaccagaggcaacgaggtgatcagcgtgatgaacagagccaagaaggccggcaagagcgtgggcgtggtgaccaccaccagagtgcagcacgccagccccgccggcgcctacgcccacaccgtgaacagaaactggtacagcgacgccgacgtgcccgccagcgccagacaggagggctgccaggacatcgccacccagctgatcagcaacatggacatcgacgtgatcctgggcggcggcagaaagtacatgttccccatgggcacccccgaccccgagtaccccgacgactacagccagggcggcaccagactggacggcaagaacctggtgcaggagtggctggccaagcaccagggcgccagatacgtgtggaacagaaccgagctgctgcaggccagcctggaccccagcgtgacccacctgatgggcctgttcgagcccggcgacatgaagtacgagatccacagagacagcaccctggaccccagcctgatggagatgaccgaggccgccctgctgctgctgagcagaaaccccagaggcttcttcctgttcgtggagggcggcagaatcgaccacggccaccacgagagcagagcctacagagccctgaccgagaccatcatgttcgacgacgccatcgagagagccggccagctgaccagcgaggaggacaccctgagcctggtgaccgccgaccacagccacgtgttcagcttcggcggctaccccctgagaggcagcagcatcttcggcctggcccccggcaaggccagagacagaaaggcctacaccgtgctgctgtacggcaacggccccggctacgtgctgaaggacggcgccagacccgacgtgaccgagagcgagagcggcagccccgagtacagacagcagagcgccgtgcccctggacggcgagacccacgccggcgaggacgtggccgtgttcgccagaggcccccaggcccacctggtgcacggcgtgcaggagcagaccttcatcgcccacgtgatggccttcgccgcctgcctggagccctacaccgcctgcgacctggcccccagagccggcaccaccgacgccgcccaccccggccccagcgtggtgcccgccctgctgcccctgctggccggcaccctgctgctgctgggcaccgccaccgccccctag

SEQ ID NO: 221547 - protein, 544 aa, Artificial Sequence
  derived and/or modified sequence
MSDNQSWNSSGSEEDPETESGPPVERCGVLSKWTNYIHGWQDRWVVLKNNALSYYKSEDETEYGCRGSICLSKAVITPHDFDECRFDISVNDSVWYLRAQDPDHRQQWIDAIEQHKTESGYGSESSLRRHGSMVSLVSGASGYSATSTSSFKKGHSLREKLAEMETFRDILCRQVDTLQKYFDACADAVSKDELQRDKVVEDDEDDFPTTRSDGDFLHSTNGNKEKLFPHVTPKGINGIDFKGEAITFKATTAGILATLSHCIELMVKREDSWQKRLDKETEKKRRTEEAYKNAMTELKKKSHFGGPDYEEGPNSLINEEEFFDAVEAALDRQDKIEEQSQSEKVRLHWPTSLPSGDAFSSVGTHRFVQKVEEMVQNHMTYSLQDVGGDANWQLVVEEGEMKVYRREVEENGIVLDPLKATHAVKGVTGHEVCNYFWNVDVRNDWETTIENFHVVETLADNAIIIYQTHKRVWPASQRDVLYLSVIRKIPALTENDPETWIVCNFSVDHDSAPLNNRCVRAKINVAMICQTLVSPPEGNQEISR

SEQ ID NO: 221548 - protein, 598 aa, Artificial Sequence
  derived and/or modified sequence
MSDNQSWNSSGSEEDPETESGPPVERCGVLSKWTNYIHGWQDRWVVLKNNALSYYKSEDETEYGCRGSICLSKAVITPHDFDECRFDISVNDSVWYLRAQDPDHRQQWIDAIEQHKTESGYGSESSLRRHGAMVSLVSGASGYSATSTSSFKKGHSLREKLAEMETFRDILCRQVDTLQKYFDACADAVSKDELQRDKVVEDDEDDFPTTRSDGDFLHSTNGNKEKLFPHVTPKGINGIDFKGEAITFKATTAGILATLSHCIELMVKREDSWQKRLDKETEKKRRTEEAYKNAMTELKKKSHFGGPDYEEGPNSLINEEEFFDAVEAALDRQDKIEEQSQSEKVRLHWPTSLPSGDAFSSVGTHRFVQKVEEMVQNHMTYSLQDVGGDANWQLVVEEGEMKVYRREVEENGIVLDPLKATHAVKGVTGHEVCNYFWNVDVRNDWETTIENFHVVETLADNAIIIYQTHKRVWPASQRDVLYLSVIRKIPALTENDPETWIVCNFSVDHDSAPLNNRCVRAKINVAMICQTLVSPPEGNQEISRDNILCKITYVANVNPGGWAPASVLRAVAKREYPKFLKRFTSYVQEKTAGKPILF

SEQ ID NO: 221549 - protein, 598 aa, Artificial Sequence
  derived and/or modified sequence
MSDNQSWNSSGSEEDPETESGPPVERCGVLSKWTNYIHGWQDRWVVLKNNALSYYKSEDETEYGCRGSICLSKAVITPHDFDECRFDISVNDSVWYLRAQDPDHRQQWIDAIEQHKTESGYGSESSLRRHGSMVSLVSGASGYSATSTSSFKKGHSLREKLAEMETFRDILCRQVDTLQKYFDACADAVSKDELQRDKVVEDDEDDFPTTRSDGDFLHSTNGNKEKLFPHVTPKGINGIDFKGEAITFKATTAGILATLSHCIELMVKREDSWQKRLDKETEKKRRTEEAYKNAMTELKKKSHFGGPDYEEGPNSLINEEEFFDAVEAALDRQDKIEEQSQSEKVRLHWPTSLPSGDAFSSVGTHRFVQKVEEMVQNHMTYSLQDVGGDANWQLVVEEGEMKVYRREVEENGIVLDPLKATHAVKGVTGHEVCNYFWNVDVRNDWETTIENFHVVETLADNAIIIYQTHKRVWPASQRDVLYLSVIRKIPALTENDPETWIVCNFSVDHDSAPLNNRCVRAKINVAMICQTLVSPPEGNQEISRDNILCKITYVANVNPGGWAPASVLRAVAKREYPKFLKRFTSYVQEKTAGKPILF

SEQ ID NO: 221550 - DNA, 1797 bp, Artificial Sequence
  derived and/or modified sequence
atgtcggataatcagagctggaactcgtcgggctcggaggaggatccagagacggagtctgggccgcctgtggagcgctgcggggtcctcagtaagtggacaaactacattcatgggtggcaggatcgttgggtagttttgaaaaataatgctctgagttactacaaatctgaagatgaaacagagtatggctgcagaggatccatctgtcttagcaaggctgtcatcacacctcacgattttgatgaatgtcgatttgatattagtgtaaatgatagtgtttggtatcttcgtgctcaggatccagatcatagacagcaatggatagatgccattgaacagcacaagactgaatctggatatggatctgaatccagcttgcgtcgacatggctcaatggtgtccctggtgtctggagcaagtggctactctgcaacatccacctcttcattcaagaaaggccacagtttacgtgagaagttggctgaaatggaaacatttagagacatcttatgtagacaagttgacacgctacagaagtactttgatgcctgtgctgatgctgtctctaaggatgaacttcaaagggataaagtggtagaagatgatgaagatgactttcctacaacgcgttctgatggtgacttcttgcatagtaccaacggcaataaagaaaagttatttccacatgtgacaccaaaaggaattaatggtatagactttaaaggggaagcgataacttttaaagcaactactgctggaatccttgcaacactttctcattgtattgaactaatggttaaacgtgaggacagctggcagaagagactggataaggaaactgagaagaaaagaagaacagaggaagcatataaaaatgcaatgacagaacttaagaaaaaatcccactttggaggaccagattatgaagaaggccctaacagtctgattaatgaagaagagttctttgatgctgttgaagctgctcttgacagacaagataaaatagaagaacagtcacagagtgaaaaggtgagattacattggcctacatccttgccctctggagatgccttttcttctgtggggacacatagatttgtccaaaaggttgaagagatggtgcagaaccacatgacttactcattacaggatgtaggcggagatgccaattggcagttggttgtagaagaaggagaaatgaaggtatacagaagagaagtagaagaaaatgggattgttctggatcctttaaaagctacccatgcagttaaaggcgtcacaggacatgaagtctgcaattatttctggaatgttgacgttcgcaatgactgggaaacaactatagaaaactttcatgtggtggaaacattagctgataatgcaatcatcatttatcaaacacacaagagggtgtggcctgcttctcagcgagacgtattatatctttctgtcattcgaaagataccagccttgactgaaaatgaccctgaaacttggatagtttgtaatttttctgtggatcatgacagtgctcctctaaacaaccgatgtgtccgtgccaaaataaatgttgctatgatttgtcaaaccttggtaagcccaccagagggaaaccaggaaattagcagggacaacattctatgcaagattacatatgtagctaatgtgaaccctggaggatgggcaccagcctcagtgttaagggcagtggcaaagcgagagtatcctaaatttctaaaacgttttacttcttacgtccaagaaaaaactgcaggaaagcctattttgttctag

SEQ ID NO: 221551 - DNA, 1797 bp, Artificial Sequence
  derived and/or modified sequence
atgtcggataatcagagctggaactcgtcgggctcggaggaggatccagagacggagtctgggccgcctgtggagcgctgcggggtcctcagtaagtggacaaactacattcatgggtggcaggatcgttgggtagttttgaaaaataatgctctgagttactacaaatctgaagatgaaacagagtatggctgcagaggatccatctgtcttagcaaggctgtcatcacacctcacgattttgatgaatgtcgatttgatattagtgtaaatgatagtgtttggtatcttcgtgctcaggatccagatcatagacagcaatggatagatgccattgaacagcacaagactgaatctggatatggatctgaatccagcttgcgtcgacatggcgcaatggtgtccctggtgtctggagcaagtggctactctgcaacatccacctcttcattcaagaaaggccacagtttacgtgagaagttggctgaaatggaaacatttagagacatcttatgtagacaagttgacacgctacagaagtactttgatgcctgtgctgatgctgtctctaaggatgaacttcaaagggataaagtggtagaagatgatgaagatgactttcctacaacgcgttctgatggtgacttcttgcatagtaccaacggcaataaagaaaagttatttccacatgtgacaccaaaaggaattaatggtatagactttaaaggggaagcgataacttttaaagcaactactgctggaatccttgcaacactttctcattgtattgaactaatggttaaacgtgaggacagctggcagaagagactggataaggaaactgagaagaaaagaagaacagaggaagcatataaaaatgcaatgacagaacttaagaaaaaatcccactttggaggaccagattatgaagaaggccctaacagtctgattaatgaagaagagttctttgatgctgttgaagctgctcttgacagacaagataaaatagaagaacagtcacagagtgaaaaggtgagattacattggcctacatccttgccctctggagatgccttttcttctgtggggacacatagatttgtccaaaaggttgaagagatggtgcagaaccacatgacttactcattacaggatgtaggcggagatgccaattggcagttggttgtagaagaaggagaaatgaaggtatacagaagagaagtagaagaaaatgggattgttctggatcctttaaaagctacccatgcagttaaaggcgtcacaggacatgaagtctgcaattatttctggaatgttgacgttcgcaatgactgggaaacaactatagaaaactttcatgtggtggaaacattagctgataatgcaatcatcatttatcaaacacacaagagggtgtggcctgcttctcagcgagacgtattatatctttctgtcattcgaaagataccagccttgactgaaaatgaccctgaaacttggatagtttgtaatttttctgtggatcatgacagtgctcctctaaacaaccgatgtgtccgtgccaaaataaatgttgctatgatttgtcaaaccttggtaagcccaccagagggaaaccaggaaattagcagggacaacattctatgcaagattacatatgtagctaatgtgaaccctggaggatgggcaccagcctcagtgttaagggcagtggcaaagcgagagtatcctaaatttctaaaacgttttacttcttacgtccaagaaaaaactgcaggaaagcctattttgttctag

SEQ ID NO: 221552 - DNA, 1797 bp, Artificial Sequence
  derived and/or modified sequence
atgagcgacaaccagagctggaacagcagcggcagcgaggaggaccccgagaccgagagcggcccccccgtggagagatgcggcgtgctgagcaagtggaccaactacatccacggctggcaggacagatgggtggtgctgaagaacaacgccctgagctactacaagagcgaggacgagaccgagtacggctgcagaggcagcatctgcctgagcaaggccgtgatcaccccccacgacttcgacgagtgcagattcgacatcagcgtgaacgacagcgtgtggtacctgagagcccaggaccccgaccacagacagcagtggatcgacgccatcgagcagcacaagaccgagagcggctacggcagcgagagcagcctgagaagacacggcagcatggtgagcctggtgagcggcgccagcggctacagcgccaccagcaccagcagcttcaagaagggccacagcctgagagagaagctggccgagatggagaccttcagagacatcctgtgcagacaggtggacaccctgcagaagtacttcgacgcctgcgccgacgccgtgagcaaggacgagctgcagagagacaaggtggtggaggacgacgaggacgacttccccaccaccagaagcgacggcgacttcctgcacagcaccaacggcaacaaggagaagctgttcccccacgtgacccccaagggcatcaacggcatcgacttcaagggcgaggccatcaccttcaaggccaccaccgccggcatcctggccaccctgagccactgcatcgagctgatggtgaagagagaggacagctggcagaagagactggacaaggagaccgagaagaagagaagaaccgaggaggcctacaagaacgccatgaccgagctgaagaagaagagccacttcggcggccccgactacgaggagggccccaacagcctgatcaacgaggaggagttcttcgacgccgtggaggccgccctggacagacaggacaagatcgaggagcagagccagagcgagaaggtgagactgcactggcccaccagcctgcccagcggcgacgccttcagcagcgtgggcacccacagattcgtgcagaaggtggaggagatggtgcagaaccacatgacctacagcctgcaggacgtgggcggcgacgccaactggcagctggtggtggaggagggcgagatgaaggtgtacagaagagaggtggaggagaacggcatcgtgctggaccccctgaaggccacccacgccgtgaagggcgtgaccggccacgaggtgtgcaactacttctggaacgtggacgtgagaaacgactgggagaccaccatcgagaacttccacgtggtggagaccctggccgacaacgccatcatcatctaccagacccacaagagagtgtggcccgccagccagagagacgtgctgtacctgagcgtgatcagaaagatccccgccctgaccgagaacgaccccgagacctggatcgtgtgcaacttcagcgtggaccacgacagcgcccccctgaacaacagatgcgtgagagccaagatcaacgtggccatgatctgccagaccctggtgagcccccccgagggcaaccaggagatcagcagagacaacatcctgtgcaagatcacctacgtggccaacgtgaaccccggcggctgggcccccgccagcgtgctgagagccgtggccaagagagagtaccccaagttcctgaagagattcaccagctacgtgcaggagaagaccgccggcaagcccatcctgttctag

SEQ ID NO: 221553 - DNA, 690 bp, Artificial Sequence
  derived and/or modified sequence
aaggtggaggagatggtgcagaaccacatgacctacagcctgcaggacgtgggcggcgacgccaactggcagctggtggtggaggagggcgagatgaaggtgtacagaagagaggtggaggagaacggcatcgtgctggaccccctgaaggccacccacgccgtgaagggcgtgaccggccacgaggtgtgcaactacttctggaacgtggacgtgagaaacgactgggagaccaccatcgagaacttccacgtggtggagaccctggccgacaacgccatcatcatctaccagacccacaagagagtgtggcccgccagccagagagacgtgctgtacctgagcgtgatcagaaagatccccgccctgaccgagaacgaccccgagacctggatcgtgtgcaacttcagcgtggaccacgacagcgcccccctgaacaacagatgcgtgagagccaagatcaacgtggccatgatctgccagaccctggtgagcccccccgagggcaaccaggagatcagcagagacaacatcctgtgcaagatcacctacgtggccaacgtgaaccccggcggctgggcccccgccagcgtgctgagagccgtggccaagagagagtaccccaagttcctgaagagattcaccagctacgtgcaggagaagaccgccggcaagcccatcctgttctag

SEQ ID NO: 221554 - DNA, 381 bp, Artificial Sequence
  derived and/or modified sequence
tgacccgccagccagagagacgtgctgtacctgagcgtgatcagaaagatccccgccctgaccgagaacgaccccgagacctggatcgtgtgcaacttcagcgtggaccacgacagcgcccccctgaacaacagatgcgtgagagccaagatcaacgtggccatgatctgccagaccctggtgagcccccccgagggcaaccaggagatcagcagagacaacatcctgtgcaagatcacctacgtggccaacgtgaaccccggcggctgggcccccgccagcgtgctgagagccgtggccaagagagagtaccccaagttcctgaagagattcaccagctacgtgcaggagaagaccgccggcaagcccatcctgttctag

SEQ ID NO: 221555 - DNA, 1797 bp, Artificial Sequence
  derived and/or modified sequence
atgtcagataaccagagctggaattcctctggttcggaagaagacccagaaaccgagtcaggcccccccgtcgaaaggtgcggcgtgttgagcaagtggacgaactatatccacggttggcaggatagatgggtcgtgctgaagaacaacgcattgagctattataagtcagaagatgaaaccgagtacgggtgccgcggcagcatatgcctgagtaaagcggttattaccccccacgatttcgacgagtgcaggtttgatataagcgttaatgactccgtctggtatctccgcgctcaggacccagatcacagacagcagtggatcgatgcaatcgagcagcacaagaccgaatctggctacggcagcgaatcttccttgcggcggcatggcagtatggtctcgctagtgtccggggcaagtggatacagcgccacttcaacatcttccttcaagaaagggcattctttgagagaaaagcttgccgagatggaaacctttcgggacatcctgtgtaggcaggtggacacactgcaaaagtactttgatgcatgtgcggacgccgtaagtaaggatgagctccagcgggataaggttgtcgaggatgatgaagacgactttcccactactcggagtgacggagattttcttcactccactaatggcaataaagagaagctcttccctcacgtgactcccaaggggatcaatggaatagattttaagggtgaggctataacattcaaggcaacgactgctggaattctcgccaccctgagccactgcattgagctgatggtaaaacgggaggattcatggcaaaaaaggttggataaagagactgagaagaagcgtaggaccgaggaagcctacaagaacgcgatgacagaactgaaaaagaagagccactttggcgggcctgactatgaggagggccccaatagtcttattaacgaggaagagttctttgacgcagtggaagccgctttagacagacaggataaaatcgaagaacagtcacagagtgaaaaagtgcgtcttcactggccgacttctctgccctccggggatgccttcagtagcgtgggcacgcaccggtttgttcaaaaggtcgaagagatggtccagaaccacatgacgtactctctgcaggacgtcggcggcgacgcaaattggcagttagtggtggaagagggtgagatgaaggtctaccgacgggaagtggaagaaaacggcatagtgctagatcccttgaaagccactcacgctgttaaaggcgtcactggacacgaggtgtgtaattacttttggaacgttgacgtccgtaacgattgggagactaccattgaaaacttccatgtagtagaaacccttgccgacaatgccattattatttaccagacgcataagagagtttggcctgctagccaacgggacgtcctctatctgagtgtcatcaggaaaattccagctcttacagaaaatgaccctgagacctggatcgtctgcaatttcagcgtcgaccatgatagcgccccactgaataatcgctgcgttagagccaagattaatgttgcaatgatctgtcaaactcttgtgtctccgcccgagggtaaccaggagatctctcgggataacattttgtgtaagattacttatgttgcaaatgtcaacccagggggatgggccccggcctcggtgctgcgggcagtggcaaaacgcgaatatcccaagtttctgaagagatttacttcttacgtgcaggagaaaacagccgggaagcccattttgttttag

SEQ ID NO: 221556 - DNA, 690 bp, Artificial Sequence
  derived and/or modified sequence
aaagtcgaagaaatggtgcagaaccacatgacatatagtctccaggacgttggtggcgatgccaactggcagctggtcgtggaagagggcgaaatgaaagtgtataggcgcgaggtggaggaaaacggaattgtcttggacccactcaaggcaacgcatgcagtcaaaggggtcactgggcacgaagtgtgcaattacttctggaatgtcgatgtccgtaatgactgggaaactacaatagaaaactttcatgtggtcgagactctcgcggataacgctatcataatttaccagactcataagcgtgtatggcctgcaagccagagagacgtgctgtatttgagcgtgatccggaagattcccgctctcacagagaatgatcccgagacttggatcgtgtgcaacttttccgttgatcacgactccgccccgttaaacaacaggtgtgtgagagctaaaatcaatgtagctatgatctgccagactttagtgtcaccgccagaggggaaccaggagatcagccgcgacaatatattgtgtaaaatcacctatgttgccaacgtgaaccctgggggttgggccccagcaagcgttctccgcgcagttgctaagcgagagtaccccaagttcctcaagagatttacctcctacgttcaggaaaagacggccggaaaaccaatcctgttttag

SEQ ID NO: 221557 - DNA, 381 bp, Artificial Sequence
  derived and/or modified sequence
tagccagcatctcaaagggatgtgttatatttaagtgttatacggaagatccccgcgctgaccgagaatgatccagagacatggatcgtgtgcaattttagcgtcgaccacgactccgctcctctgaataatcgctgcgtgagagcaaagatcaacgtggcaatgatctgtcagacgctggtgtcgccccctgaggggaaccaggagatttccagggacaacattttgtgtaagattacttacgtagcaaatgttaatcccgggggctgggccccggcctctgtactccgggcggtcgccaagcgggaatatccaaaatttttgaagaggtttacctcatacgttcaggaaaaaacagcgggcaaacctatcttgttctag

SEQ ID NO: 221558 - DNA, 873 bp, Artificial Sequence
  derived and/or modified sequence
aaggttgaagagatggtgcagaaccacatgacttactcattacaggatgtaggcggagatgccaattggcagttggttgtagaagaaggagaaatgaaggtatacagaagagaagtagaagaaaatgggattgttctggatcctttaaaagctacccatgcagttaaaggcgtcacaggacatgaagtctgcaattatttctggaatgttgacgttcgcaatgactgggaaacaactatagaaaactttcatgtggtggaaacattagctgataatgcaatcatcatttatcaaacacacaagagggtgtggcctgcttctcagcgagacgtattatatctttctgtcattcgaaagataccagccttgactgaaaatgaccctgaaacttggatagtttgtaatttttctgtggatcatgacagtgctcctctaaacaaccgatgtgtccgtgccaaaataaatgttgctatgatttgtcaaaccttggtaagcccaccagagggaaaccaggaaattagcagggacaacattctatgcaagattacatatgtagctaatgtgaaccctggaggatgggcaccagcctcagtgttaagggcagtggcaaagcgagagtatcctaaatttctaaaacgttttacttcttacgtccaagaaaaaactgcaggaaagcctattttgttctagtattaacaggctcagaggatgaaacaggaaactgagtcataaaacactactacaaacaagcccaaggattttatcccagattttcaacccaaggatgagctgcaatataactatcactgttttgttggctgcctgccacagaatgaccactgaggaaataaagcgagctttggattcactgca

SEQ ID NO: 221559 - DNA, 693 bp, Artificial Sequence
  derived and/or modified sequence
gcctgcttctcagcgagacgtattatatctttctgtcattcgaaagataccagccttgactgaaaatgaccctgaaacttggatagtttgtaatttttctgtggatcatgacagtgctcctctaaacaaccgatgtgtccgtgccaaaataaatgttgctatgatttgtcaaaccttggtaagcccaccagagggaaaccaggaaattagcagggacaacattctatgcaagattacatatgtagctaatgtgaaccctggaggatgggcaccagcctcagtgttaagggcagtggcaaagcgagagtatcctaaatttctaaaacgttttacttcttacgtccaagaaaaaactgcaggaaagcctattttgttctagtattaacaggtactagaagatatgttttatctttttttaactttatttgactaatatgactgtcaatactaaaatttagttgttgaaagtatttactatgttttttgatgttcccctatagagtattgtttcgttggtttttgttgttgtcgttgttgttgttttaaacagggtcttgctctgtttcctaagctgaagtgcaatgacaccatcacggctcactgcaacctcaacctctggcctcaaacaatcctctcatctcagccttcccagtagctgggagtccccacaggcatgtgccaccatgctcagct

SEQ ID NO: 221560 - DNA, 1797 bp, Artificial Sequence
  derived and/or modified sequence
atgtctgacaaccagagctggaacagcagcggcagcgaggaggaccctgagacagagagcggcccccctgtggagcgctgtggggtgctgagcaagtggaccaactacatccacggctggcaggaccgctgggtggtgctgaagaacaatgccctgagctactacaagtcagaagatgaaacagaatatggctgccggggcagcatctgcctgagcaaggccgtcatcacccctcatgactttgatgaatgtagatttgacatctctgtgaatgattctgtgtggtacctgcgggcccaggaccctgaccaccggcagcagtggattgatgccatcgagcagcacaagacagaaagtggctacggcagcgagagcagcctgcggcggcacggctccatggtgtccctggtgtctggggccagcggctacagcgccaccagcaccagcagcttcaagaagggccacagcctgcgggagaagctggccgagatggagaccttccgggacatcctgtgccggcaggtggacaccctgcagaagtactttgatgcctgtgctgatgctgtgtccaaggatgagctgcagagggacaaggtggtggaggatgatgaagatgacttccccaccaccaggagtgatggagacttcctgcacagcaccaatggaaacaaggagaagctgttcccccacgtgacccccaagggcatcaatggaattgacttcaagggggaggccatcaccttcaaggccaccacagctggcatcctggccaccctgagccactgcatcgagctgatggtgaagcgggaggacagctggcagaagaggctggacaaggagacagagaagaagagaagaacagaggaggcctacaagaatgccatgacagagctgaagaagaagagccactttggaggccctgactatgaggagggccccaacagcctcatcaatgaggaggagttctttgatgctgtggaggccgccctggaccggcaggacaagattgaggagcagagccagagcgagaaggtgcggctgcactggcccaccagcctgcccagcggagatgccttcagctctgtgggcacccacagatttgtgcagaaggtggaggagatggtgcagaaccacatgacctacagcctgcaggatgtgggcggagatgccaactggcagctggtggtggaggagggggagatgaaggtgtacagaagagaggtggaggagaatggaattgtgctggaccccctgaaggccacccatgctgtgaagggcgtgacaggccacgaggtgtgcaactacttctggaatgtggatgtgagaaatgactgggagaccaccatcgagaacttccacgtggtggagaccctggccgacaatgccatcatcatctaccagacccacaagagggtgtggccagccagccagagagatgtgctgtacctgagcgtcatcaggaagatcccagccctgacagaaaatgaccctgagacctggatcgtgtgcaacttctctgtggaccatgattctgcccccctgaacaacagatgtgtgcgggccaagatcaacgtggccatgatctgccagaccctggtgtccccacctgagggcaaccaggagatcagccgggacaacatcctgtgcaagatcacctacgtggccaacgtgaaccctgggggctgggccccagcctctgtgctgcgggctgtggccaagcgggagtaccccaagttcctgaagcgcttcaccagctatgtgcaggagaagacagctgggaagcccatcctcttctag

SEQ ID NO: 221561 - DNA, 690 bp, Artificial Sequence
  derived and/or modified sequence
aaggtggaggagatggtgcagaaccacatgacctacagcctgcaggatgtgggcggagatgccaactggcagctggtggtggaggagggggagatgaaggtgtaccgccgggaggtggaggagaatggcatcgtgctggaccccctgaaggccacccatgctgtgaagggcgtgactggacatgaggtgtgcaactacttctggaatgtggatgtgagaaatgactgggagaccaccatcgagaacttccacgtggtggagaccctggccgacaatgccatcatcatctaccagacccacaagagggtgtggccagccagccagagagatgtgctgtacctgagcgtcatcaggaagatcccagccctgacagaaaatgaccctgagacctggatcgtgtgcaacttctctgtggaccatgacagcgcccccctgaacaacagatgtgtgcgggccaagatcaacgtggccatgatctgccagaccctggtgagccccccagagggcaaccaggagatcagccgggacaacatcctgtgcaagatcacctacgtggccaacgtgaaccctgggggctgggccccagcctctgtgctgcgggctgtggccaagcgggagtaccccaagttcctgaagcgcttcaccagctatgtgcaggagaagacagctgggaagcccatcctcttctag

SEQ ID NO: 221562 - DNA, 381 bp, Artificial Sequence
  derived and/or modified sequence
tgaccagccagccagagagatgtgctgtacctgagcgtcatcaggaagatcccagccctgacagaaaatgaccctgagacctggatcgtgtgcaacttctctgtggaccatgattctgcccccctgaacaacagatgtgtgcgggccaagatcaacgtggccatgatctgccagaccctggtgtccccacctgagggcaaccaggagatcagccgggacaacatcctgtgcaagatcacctacgtggccaacgtgaaccctgggggctgggccccagcctctgtgctgcgggctgtggccaagcgggagtaccccaagttcctgaagcgcttcaccagctatgtgcaggagaagacagctgggaagcccatcctcttctag

SEQ ID NO: 221563 - DNA, 1797 bp, Artificial Sequence
  derived and/or modified sequence
atgagcgacaaccagagctggaacagcagcggcagcgaggaggaccctgagacagagtcagggccaccagtggaacgatgcggcgtgttaagtaagtggaccaactatatccacgggtggcaggatcgctgggtggtgctgaaaaacaatgccctgtcttattataaatctgaagacgaaactgaatatggttgcaggggctctatatgcctatccaaagcggtcataacaccgcatgacttcgatgaatgccggtttgatatctctgttaatgatagcgtttggtacctccgcgcccaggatcctgaccacaggcagcagtggatcgatgccatcgaacagcataaaacggagagtggttacgggtcagaaagttcccttaggaggcacggttcaatggtcagtttggtttccggggcatcaggatatagcgctacctctacgagttcttttaagaagggccactcactcagagaaaagttggctgaaatggaaacctttagggacatattgtgtagacaggtcgatacccttcagaagtactttgatgcttgcgccgacgctgtaagcaaagatgaacttcaacgagataaagtcgtcgaggatgatgaagacgactttcccaccacacgatccgatggcgattttttgcatagtacgaacggaaacaaagagaagttgtttccccatgtcacccccaagggaattaatgggatcgatttcaaaggagaagccatcacattcaaagcaactaccgctgggatcttagctactctatcacactgtatcgagctgatggtcaaacgcgaagactcttggcagaagcgtctggacaaggaaaccgagaagaagaggaggactgaggaggcttacaaaaatgccatgactgagctgaaaaagaaaagtcacttcggagggcctgactacgaagagggccccaactcattgattaacgaggaagaattttttgacgcggttgaggccgctcttgaccggcaggataagattgaagagcaatcacaaagtgagaaggtcagactgcactggcccacctccctgccttctggtgatgcgttttcatcagtgggcacccacagattcgtgcagaaggtagaagagatggtgcaaaatcatatgacctattctctccaagacgttgggggggatgcaaattggcaactggttgtggaggaaggcgaaatgaaagtctataggcgggaggtcgaggagaatggcattgtgctcgacccactgaaggccacccatgcagtaaaaggtgtcacgggacacgaggtgtgtaactatttctggaatgtagatgtccggaacgactgggagactaccatcgaaaattttcatgtagtagagactctggctgataatgccatcattatttaccaaacccataagcgtgtgtggccagcgtcccaacgcgacgtgctttaccttagcgtgattaggaaaattcccgcgttgactgaaaatgaccctgaaacctggatagtgtgtaacttttctgttgaccacgattccgcgcctctcaacaataggtgtgtgagagcgaagatcaatgtagccatgatctgtcagaccctggtctcacctccggaagggaatcaggagatcagtagggataacatactttgtaagatcacctacgttgcgaacgtgaaccccggtggatgggctccagcctcagttttgagagccgtagcaaagcgcgagtatcccaagttcctgaagcgattcaccagttatgtgcaagagaaaactgccggaaagcccatactcttttag

SEQ ID NO: 221564 - DNA, 690 bp, Artificial Sequence
  derived and/or modified sequence
aaggtggaggagatggtgcagaaccacatgacctacagcctgcaggatgtgggaggggatgctaattggcagttagtagttgaagagggtgagatgaaagtgtaccggcgggaagtcgaagaaaatggcatcgttctggatccactcaaagccactcatgctgttaagggcgttaccggacacgaagtctgcaactacttctggaatgtggatgtacgaaacgattgggaaacaacaattgaaaattttcacgtggttgaaaccctcgccgataatgccataatcatttaccaaacacataagcgggtgtggcctgcgagtcaaagggatgtgctctatctgagcgttatccgcaaaatcccggcacttaccgaaaacgaccctgagacatggatcgtctgcaactttagcgtcgatcatgacagcgctcctctgaacaatcggtgtgttcgagcaaagataaacgtagccatgatctgtcagactttggtctccccccctgaggggaaccaggaaatcagccgcgataacattttatgcaagatcacatatgtggccaatgtgaaccccggcgggtgggcaccggcctcagtgctgcgtgccgtagccaaacgcgagtacccaaagtttcttaagcggtttaccagttacgtccaggagaagaccgcaggtaagcctatcctcttctag

SEQ ID NO: 221565 - DNA, 381 bp, Artificial Sequence
  derived and/or modified sequence
tgacccgccagccagcgggacgtgctgtacctgagcgtgatccggaaaattccggcattaaccgagaatgaccccgaaacatggatcgtgtgcaatttttccgtagaccacgactcagccccactgaataacagatgcgtcagagctaagattaacgtggcaatgatatgccagactctggtttctccccccgagggcaatcaagaaatctcacgagacaacattctgtgtaagattacctacgtggcaaacgtgaaccccgggggatgggcacctgcctcggtgctgcgggcggtagccaagagagagtaccctaagtttctaaaacggttcacctcctacgttcaggagaagacagctgggaaacccatcctcttttag

SEQ ID NO: 221566 - DNA, 1797 bp, Artificial Sequence
  derived and/or modified sequence
atgagtgataaccagagctggaactcctccggatccgaggaagaccccgagaccgaaagcggtccccctgtagaacgctgtggagtgctctcaaagtggaccaattacatccacgggtggcaagataggtgggtggtgcttaaaaacaatgcactctcctactataagagtgaagatgagacagaatatggctgtagaggcagcatatgcctcagtaaagctgtgattactccccatgattttgacgagtgtagattcgacatctccgtgaacgactccgtctggtacttgcgggcacaggatcccgatcaccgccagcagtggatagatgccatcgagcaacataaaacggaatctggttatggcagtgaaagctccctcagacggcatggctccatggtatctctggtgagcggcgcttcaggctattcagctacctcaacctctagcttcaagaaaggccactcactcagagaaaagctagctgagatggaaacgtttcgcgacattctgtgccggcaggtcgatactttacagaaatattttgatgcatgcgcggatgcagtgagcaaggacgaactgcagagagacaaggtggtagaagatgatgaggacgacttcccaaccacaaggtcagacggggattttctgcactcaaccaatggaaacaaagagaagctgtttccacacgttacaccaaaggggattaacgggatcgacttcaagggcgaagccataaccttcaaagccaccaccgccggaatcctggcgacgctgtctcattgcatcgagctgatggtgaagagagaggattcctggcaaaaaaggctggataaggagaccgagaagaaaagacgcaccgaggaggcctacaaaaacgccatgactgaactgaaaaagaagtctcacttcggtggaccagattatgaggaagggcctaatagtctgatcaacgaagaagagtttttcgacgccgtggaagctgcgcttgacagacaggataaaatagaggaacaatcccagtcagaaaaagtgagactgcactggccaacaagcctcccaagcggggacgccttctctagcgtcgggacccaccggttcgtgcagaaggtcgaggagatggtgcaaaaccatatgacctacagcctgcaagatgtgggtggcgacgccaactggcagctggtggtagaggaaggagaaatgaaagtgtaccggcgtgaggtggaggagaatggtatcgtcttggatccactgaaggcgacccacgcagtcaagggagtgacagggcatgaggtctgtaactacttttggaatgtggatgtgagaaatgattgggagaccacaatcgagaatttccacgtagtggagaccctggccgataatgcaatcatcatctaccagacgcataagagagtatggcccgctagccagcgggatgtgttatacctgtccgtgattagaaaaattccagcactaacagaaaatgacccggagacatggatcgtttgtaacttttcagtggaccatgattcagcaccactcaacaatcgatgtgtgcgtgcaaagattaatgtcgcgatgatctgccagactctggtcagcccccctgaaggaaaccaggagatttctcgagacaacatactgtgcaaaatcacttatgtggccaacgttaatccaggaggatgggcacccgcatctgtgttacgcgcagttgctaagcgggagtacccaaagttcttgaagagattcaccagctatgttcaggagaagaccgccggaaaaccgatactgttctag

SEQ ID NO: 221567 - DNA, 690 bp, Artificial Sequence
  derived and/or modified sequence
aaggtggaggaaatggtgcaaaaccacatgacctactccctacaggatgtaggtggggatgctaactggcagttagtcgtggaagaaggtgagatgaaggtgtaccgacgggaagttgaagagaatgggatcgtactggaccctctgaaggcaacgcacgcagtgaagggggtgactgggcatgaggtgtgcaattatttttggaacgttgatgtccgaaatgactgggagactacaattgagaatttccacgtggtagagacacttgcggacaacgccatcattatctatcagacacacaagagagtgtggccggcatcacagcgggacgtgttgtacctgtctgtgatcaggaaaatcccagcgttaacagaaaatgaccctgagacgtggattgtgtgtaatttttctgtcgaccacgactcggcgcctcttaataacagatgcgtcagagccaagataaatgtggcaatgatttgtcagaccctggtatcgccacccgagggcaaccaggaaataagtagagacaacattctctgcaagatcacttacgttgcaaatgtcaacccaggcggatgggcccctgcgtccgtgctgagggcagtggctaagagggagtaccccaagttcctgaagcgtttcacctcctatgttcaggagaagaccgcgggtaagccaattctcttctag

SEQ ID NO: 221568 - DNA, 381 bp, Artificial Sequence
  derived and/or modified sequence
tgaccggcttcccaaagggacgtgctgtacctatcagtgatccggaagattcccgcattgaccgaaaacgaccccgaaacttggatcgtttgcaacttctcagtggaccacgactctgccccactcaacaatcgatgcgtgagagcaaaaattaacgtcgccatgatttgccagacactcgtgtctccaccagaaggcaatcaggaaatttctcgagacaacatattgtgcaagatcacatatgtcgccaacgtcaacccgggaggatgggcccctgcaagtgtactgcgcgcagtggccaagcgtgaatatcccaaatttctgaagcgctttacttcctacgtgcaagagaaaacagcagggaagccaattctcttctag

SEQ ID NO: 221569 - protein, 336 aa, Artificial Sequence
  derived and/or modified sequence
MSEEQFGGDGAAAAATAAVGGSAGEQEGAMVAATQGAAAAAGSGAGTGGGTASGGTEGGSAESEGAKIDASKNEEDEGKMFIGGLSWDTTKKDLKDYFSKFGEVVDCTLKLDPITGRSRGFGFVLFKESESVDKVMDQKEHKLNGKVIDPKRAKAMKTKEPVKKIFVGGLSPDTPEEKIREYFGGFGEVESIELPMDNKTNKRRGFCFITFKEEEPVKKIMEKKYHNVGLSKCEIKVAMSKEQYQQQQQWGSRGGFAGRARGRGGGPSQNWNQGYSNYWNQGYGNYGYNSQGYGGYGGYDYTGYNNYYGYGDYSNQQSGYGKVSRRGGHQNSYKPY

SEQ ID NO: 221570 - protein, 155 aa, Artificial Sequence
  derived and/or modified sequence
MSEEQFGGDGAAAAATAAVGGSAGEQEGAMVAATQGAAAAAGSGAGTGGGTASGGTEGGSAESEGAKIDASKNEEDEGKMFIGGLSWDTTKKDLKDYFSKFGEVVDCTLKLDPITGRSRGFGFVLFKESESVDKVMDQKEHKLNGKVIDPKRAKA

SEQ ID NO: 221571 - protein, 303 aa, Artificial Sequence
  derived and/or modified sequence
MSEEQFGGDGAAAAATAAASGGTEGGSAESEGAKIDASKNEEDEGKMFIGGLSWDTTKKDLKDYFSKFGEVVDCTLKLDPITGRSRGFGFVLFKESESVDKVMDQKEHKLNGKVIDPKRAKAMKTKEPVKKIFVGGLSPDTPEEKIREYFGGFGEVESIELPMDNKTNKRRGFCFITFKEEEPVKKIMEKKYHNVGLSKCEIKVAMSKEQYQQQQQWGSRGGFAGRARGRGGGPSQNWNQGYSNYWNQGYGNYGYNSQGYGGYGGYDYTGYNNYYGYGDYSNQQSGYGKVSRRGGHQNSYKPY

SEQ ID NO: 221572 - DNA, 1011 bp, Artificial Sequence
  derived and/or modified sequence
atgagcgaggagcagttcggcggcgacggcgccgccgccgccgccaccgccgccgtgggcggcagcgccggcgagcaggagggcgccatggtggccgccacccagggcgccgccgccgccgccggcagcggcgccggcaccggcggcggcaccgccagcggcggcaccgagggcggcagcgccgagagcgagggcgccaagatcgacgccagcaagaacgaggaggacgagggcaagatgttcatcggcggcctgagctgggacaccaccaagaaggacctgaaggactacttcagcaagttcggcgaggtggtggactgcaccctgaagctggaccccatcaccggcagaagcagaggcttcggcttcgtgctgttcaaggagagcgagagcgtggacaaggtgatggaccagaaggagcacaagctgaacggcaaggtgatcgaccccaagagagccaaggccatgaagaccaaggagcccgtgaagaagatcttcgtgggcggcctgagccccgacacccccgaggagaagatcagagagtacttcggcggcttcggcgaggtggagagcatcgagctgcccatggacaacaagaccaacaagagaagaggcttctgcttcatcaccttcaaggaggaggagcccgtgaagaagatcatggagaagaagtaccacaacgtgggcctgagcaagtgcgagatcaaggtggccatgagcaaggagcagtaccagcagcagcagcagtggggcagcagaggcggcttcgccggcagagccagaggcagaggcggcggccccagccagaactggaaccagggctacagcaactactggaaccagggctacggcaactacggctacaacagccagggctacggcggctacggcggctacgactacaccggctacaacaactactacggctacggcgactacagcaaccagcagagcggctacggcaaggtgagcagaagaggcggccaccagaacagctacaagccctactag

SEQ ID NO: 221573 - DNA, 606 bp, Artificial Sequence
  derived and/or modified sequence
atggaccagaaggagcacaagctgaacggcaaggtgatcgaccccaagagagccaaggccatgaagaccaaggagcccgtgaagaagatcttcgtgggcggcctgagccccgacacccccgaggagaagatcagagagtacttcggcggcttcggcgaggtggagagcatcgagctgcccatggacaacaagaccaacaagagaagaggcttctgcttcatcaccttcaaggaggaggagcccgtgaagaagatcatggagaagaagtaccacaacgtgggcctgagcaagtgcgagatcaaggtggccatgagcaaggagcagtaccagcagcagcagcagtggggcagcagaggcggcttcgccggcagagccagaggcagaggcggcggccccagccagaactggaaccagggctacagcaactactggaaccagggctacggcaactacggctacaacagccagggctacggcggctacggcggctacgactacaccggctacaacaactactacggctacggcgactacagcaaccagcagagcggctacggcaaggtgagcagaagaggcggccaccagaacagctacaagccctactag

SEQ ID NO: 221574 - DNA, 912 bp, Artificial Sequence
  derived and/or modified sequence
atgagcgaggagcagttcggcggcgacggcgccgccgccgccgccaccgccgccgccagcggcggcaccgagggcggcagcgccgagagcgagggcgccaagatcgacgccagcaagaacgaggaggacgagggcaagatgttcatcggcggcctgagctgggacaccaccaagaaggacctgaaggactacttcagcaagttcggcgaggtggtggactgcaccctgaagctggaccccatcaccggcagaagcagaggcttcggcttcgtgctgttcaaggagagcgagagcgtggacaaggtgatggaccagaaggagcacaagctgaacggcaaggtgatcgaccccaagagagccaaggccatgaagaccaaggagcccgtgaagaagatcttcgtgggcggcctgagccccgacacccccgaggagaagatcagagagtacttcggcggcttcggcgaggtggagagcatcgagctgcccatggacaacaagaccaacaagagaagaggcttctgcttcatcaccttcaaggaggaggagcccgtgaagaagatcatggagaagaagtaccacaacgtgggcctgagcaagtgcgagatcaaggtggccatgagcaaggagcagtaccagcagcagcagcagtggggcagcagaggcggcttcgccggcagagccagaggcagaggcggcggccccagccagaactggaaccagggctacagcaactactggaaccagggctacggcaactacggctacaacagccagggctacggcggctacggcggctacgactacaccggctacaacaactactacggctacggcgactacagcaaccagcagagcggctacggcaaggtgagcagaagaggcggccaccagaacagctacaagccctactag

SEQ ID NO: 221575 - DNA, 1011 bp, Artificial Sequence
  derived and/or modified sequence
atgtccgaggagcaatttggcggggacggagccgctgctgctgccaccgccgctgtcggcggtagcgctggcgagcaggagggagctatggtggctgccacccagggcgctgctgccgcagccggttctggcgcaggaaccggtggcggaaccgcctcagggggcacagaagggggatctgcagaaagtgagggcgcaaagattgacgctagtaagaacgaagaagacgaaggcaaaatgtttatcggcgggttgtcatgggacactaccaagaaggacttgaaagattattttagcaagtttggtgaggtcgtagactgtactcttaaactggatcccattacagggaggtctagaggcttcgggttcgtgctgttcaaggagtccgagtctgtcgataaagtaatggaccagaaggagcacaagctgaacggcaaagtgatagaccccaaacgcgctaaagccatgaagacgaaggagccagtgaaaaaaattttcgtcggtggcttgagccccgacactcctgaggaaaagattagagaatactttggcggctttggagaggtggagtccatcgagcttcctatggataacaagaccaacaagcgcaggggattttgtttcattacttttaaagaagaggagccggtgaaaaagatcatggagaagaagtatcacaatgttggtctttcaaaatgtgagatcaaggtcgcaatgtctaaagaacagtaccagcagcaacaacaatggggatcacgcggcgggtttgcgggcagagcgagggggaggggtggcggaccctctcagaactggaatcaaggttacagcaattactggaatcaggggtacgggaattatggctataacagccagggctacggaggatatgggggttatgattacaccggctacaataactattacggatacggagattactccaaccaacagtcggggtatgggaaagtcagtaggcgcggcggccaccagaactcatataagccctactag

SEQ ID NO: 221576 - DNA, 606 bp, Artificial Sequence
  derived and/or modified sequence
atggaccagaaggaacataaactcaatggaaaggtcattgaccccaagcgcgcgaaggccatgaagactaaggagccagtcaagaagattttcgtgggcggcctgtcgcctgacactccagaggagaagataagggagtactttgggggctttggagaggtggaaagcattgagctgccaatggataacaagacaaataagcgacggggcttttgtttcattacatttaaagaggaggaacccgtcaaaaaaataatggagaaaaagtaccataacgttgggctgtcaaaatgcgagatcaaggtcgcgatgagtaaggaacagtaccaacaacagcaacagtgggggagccgaggcgggtttgcagggagggcacgtggcagaggtggaggcccttcccagaattggaatcagggctacagtaactactggaatcaaggatacggaaattatgggtacaattcccaggggtacggaggctatgggggctatgactacacaggttataacaactattacggctatggggactatagcaatcagcagtccgggtatggtaaagtgtctcgccgtggggggcaccagaactcctataagccctactag

SEQ ID NO: 221577 - DNA, 912 bp, Artificial Sequence
  derived and/or modified sequence
atgagcgaagagcaattcggtggcgatggtgccgccgccgccgccaccgcagctgcaagcggaggcacagagggcggtagcgctgagagtgaaggtgccaaaattgacgcctccaaaaatgaggaggatgaaggtaagatgttcattggcggcctcagttgggacaccactaagaaagatcttaaagactacttcagcaagttcggggaggtggttgattgcacactcaaattagacccaattacgggtcggtctcgggggtttggcttcgtgctcttcaaggagagcgaaagcgtcgacaaggtgatggaccagaaggagcacaaactcaatggaaaggtgattgatccaaagcgagctaaggccatgaagacaaaggagcctgtgaagaaaatcttcgtgggaggacttagtccagacactcccgaagaaaagattcgcgaatattttggtgggttcggagaggttgagagtattgagctccccatggataacaaaacaaataagaggagaggattttgctttatcaccttcaaagaggaggagcctgtgaagaagattatggagaaaaagtaccacaacgtcggactaagcaaatgcgaaattaaggtggccatgtctaaagagcaataccagcagcagcaacagtggggttcccgcgggggtttcgccggtcgcgcacgcgggcgcggaggggggccctcacagaattggaaccagggatatagcaactactggaaccaggggtacgggaattacggctataactcacagggatatggtggctatggtgggtatgactacacggggtacaacaactattatgggtatggcgattatagcaatcaacagtccggctatggaaaagtttcccggcgaggcggccaccagaattcctataaaccatactag

SEQ ID NO: 221578 - DNA, 1667 bp, Artificial Sequence
  derived and/or modified sequence
ttttaggtggtccgcggcggcgccattaaagcgaggaggaggcgagagcggccgccgctggtgcttattcttttttagtgcagcgggagagagcgggagtgtgcgccgcgcgagagtgggaggcgaagggggcaggccagggagaggcgcaggagcctttgcagccacgcgcgcgccttccctgtcttgtgtgcttcgcgaggtagagcgggcgcgcggcagcggcggggattactttgctgctagtttcggttcgcggcagcggcgggtgtagtctcggcggcagcggcggagacactagcactatgtcggaggagcagttcggcggggacggggcggcggcagcggcaacggcggcggtaggcggctcggcgggcgagcaggagggagccatggtggcggcgacacagggggcagcggcggcggcgggaagcggagccgggaccgggggcggaaccgcgtctggaggcaccgaagggggcagcgccgagtcggagggggcgaagattgacgccagtaagaacgaggaggatgaagggaaaatgtttataggaggccttagctgggacactacaaagaaagatctgaaggactacttttccaaatttggtgaagttgtagactgcactctgaagttagatcctatcacagggcgatcaaggggttttggctttgtgctatttaaagaatcggagagtgtagataaggtcatggatcaaaaagaacataaattgaatgggaaggtgattgatcctaaaagggccaaagccatgaaaacaaaagagccggttaaaaaaatttttgttggtggcctttctccagatacacctgaagagaaaataagggagtactttggtggttttggtgaggtggaatccatagagctccccatggacaacaagaccaataagaggcgtgggttctgctttattacctttaaggaagaagaaccagtgaagaagataatggaaaagaaataccacaatgttggtcttagtaaatgtgaaataaaagtagccatgtcgaaggaacaatatcagcaacagcaacagtggggatctagaggaggatttgcaggaagagctcgtggaagaggtggtggccccagtcaaaactggaaccagggatatagtaactattggaatcaaggctatggcaactatggatataacagccaaggttacggtggttatggaggatatgactacactggttacaacaactactatggatatggtgattatagcaaccagcagagtggttatgggaaggtatccaggcgaggtggtcatcaaaatagctacaaaccatactaaattattccatttgcaacttatccccaacaggtggtgaagcagtattttccaatttgaagattcatttgaaggtggctcctgccacctgctaatagcagttcaaactaaattttttgtatcaagtccctgaatggaagtatgacgttgggtccctctgaagtttaattctgagttctcattaaaagaaatttgctttcattgttttatttcttaattgctatgcttcagaatcaatttgtgttttatgccctttcccccagtattgtagagcaagtcttgtgttaaaagcccagtgtgacagtgtcatgatgtagtagtgtcttactggttttttaataaatccttttgtat

SEQ ID NO: 221579 - DNA, 1411 bp, Artificial Sequence
  derived and/or modified sequence
gtcggccattttaggtggtccgcggcggcgccattaaagcgaggaggaggcgagagcggccgccgctggtgcttattcttttttagtgcagcgggagagagcgggagtgtgcgccgcgcgagagtgggaggcgaagggggcaggccagggagaggcgcaggagcctttgcagccacgcgcgcgccttccctgtcttgtgtgcttcgcgaggtagagcgggcgcgcggcagcggcggggattactttgctgctagtttcggttcgcggcagcggcgggtgtagtctcggcggcagcggcggagacactagcactatgtcggaggagcagttcggcggggacggggcggcggcagcggcaacggcggcggtaggcggctcggcgggcgagcaggagggagccatggtggcggcgacacagggggcagcggcggcggcgggaagcggagccgggaccgggggcggaaccgcgtctggaggcaccgaagggggcagcgccgagtcggagggggcgaagattgacgccagtaagaacgaggaggatgaagggtcatggatcaaaaagaacataaattgaatgggaaggtgattgatcctaaaagggccaaagccatgaaaacaaaagagccggttaaaaaaatttttgttggtggcctttctccagatacacctgaagagaaaataagggagtactttggtggttttggtgaggtggaatccatagagctccccatggacaacaagaccaataagaggcgtgggttctgctttattacctttaaggaagaagaaccagtgaagaagataatggaaaagaaataccacaatgttggtcttagtaaatgtgaaataaaagtagccatgtcgaaggaacaatatcagcaacagcaacagtggggatctagaggaggatttgcaggaagagctcgtggaagaggtggtggccccagtcaaaactggaaccagggatatagtaactattggaatcaaggctatggcaactatggatataacagccaaggttacggtggttatggaggatatgactacactggttacaacaactactatggatatggtgattatagcaaccagcagagtggttatgggaaggtatccaggcgaggtggtcatcaaaatagctacaaaccatactaaattattccatttgcaacttatccccaacaggtatgttctaaaaatagtttttttttgtcatttacaatagtagtttttataatctatattgttcataaaacaatgcttaatttaagagtttcacagcacccagaagtgcttaccatattataacatagtgactttcaaagatatgtaacacaggtgctcttaagcttttgcctttttgtcctattattaacaagtcagtaaagttaacaggtaaagtactgctaat

SEQ ID NO: 221580 - DNA, 1263 bp, Artificial Sequence
  derived and/or modified sequence
atgtcggaggagcagttcggcggggacggggcggcggcagcggcaacggcggcggcgtctggaggcaccgaagggggcagcgccgagtcggagggggcgaagattgacgccagtaagaacgaggaggatgaagggaaaatgtttataggaggccttagctgggacactacaaagaaagatctgaaggactacttttccaaatttggtgaagttgtagactgcactctgaagttagatcctatcacagggcgatcaaggggttttggctttgtgctatttaaagaatcggagagtgtagataaggtcatggatcaaaaagaacataaattgaatgggaaggtgattgatcctaaaagggccaaagccatgaaaacaaaagagccggttaaaaaaatttttgttggtggcctttctccagatacacctgaagagaaaataagggagtactttggtggttttggtgaggtggaatccatagagctccccatggacaacaagaccaataagaggcgtgggttctgctttattacctttaaggaagaagaaccagtgaagaagataatggaaaagaaataccacaatgttggtcttagtaaatgtgaaataaaagtagccatgtcgaaggaacaatatcagcaacagcaacagtggggatctagaggaggatttgcaggaagagctcgtggaagaggtggtggccccagtcaaaactggaaccagggatatagtaactattggaatcaaggctatggcaactatggatataacagccaaggttacggtggttatggaggatatgactacactggttacaacaactactatggatatggtgattatagcaaccagcagagtggttatgggaaggtatccaggcgaggtggtcatcaaaatagctacaaaccatactaaattattccatttgcaacttatccccaacaggtggtgaagcagtattttccaatttgaagattcatttgaaggtggctcctgccacctgctaatagcagttcaaactaaattttttgtatcaagtccctgaatggaagtatgacgttgggtccctctgaagtttaattctgagttctcattaaaagaaatttgctttcattgttttatttcttaattgctatgcttcagaatcaatttgtgttttatgccctttcccccagtattgtagagcaagtcttgtgttaaaagcccagtgtgacagtgtcatgatgtagtagtgtcttactggttttttaataaatccttttgtat

SEQ ID NO: 221581 - DNA, 1011 bp, Artificial Sequence
  derived and/or modified sequence
atgtctgaggagcagtttggaggagatggagctgctgctgctgccacagctgctgtgggcggcagcgctggggagcaggagggcgccatggtggccgccacccagggcgctgctgctgctgctggcagcggggccggcactggaggcggcacagccagcggcggcacagagggcggcagcgctgagagcgagggcgccaagattgatgccagcaagaatgaagaagatgagggcaagatgttcatcggcggcctgtcctgggacaccaccaagaaggacctgaaggactacttcagcaagtttggagaggtggtggactgcaccctgaagctggaccccatcaccggccgcagccggggctttggatttgtgctcttcaaggagagcgagagcgtggacaaggtgatggaccagaaggagcacaagctgaatggcaaggtgattgaccccaagagggccaaggccatgaagaccaaggagcctgtgaagaagatctttgtgggcggcctgagcccagacaccccagaggagaagatccgggagtactttggaggctttggagaggtggagagcattgagctgcccatggacaacaagaccaacaagagaagaggcttctgcttcatcaccttcaaggaggaggagcctgtgaagaagatcatggagaagaagtaccacaacgtgggcctgagcaaatgtgagatcaaggtggccatgagcaaggagcagtaccagcagcagcagcagtggggcagccggggcggctttgctggccgggcccggggccggggcggcggccccagccagaactggaaccagggctacagcaactactggaaccagggctacggcaactacggctacaacagccagggctatggaggctacggcggctatgactacacaggctacaacaactactacggctacggggactacagcaaccagcagagcggctacggcaaggtgtccagaagaggaggccaccagaacagctacaagccctactag

SEQ ID NO: 221582 - DNA, 606 bp, Artificial Sequence
  derived and/or modified sequence
atggaccagaaggagcacaagctgaatggcaaggtgattgaccccaagagggccaaggccatgaagaccaaggagcctgtgaagaagatctttgtgggcggcctgagcccagacaccccagaggagaagatccgggagtactttggaggctttggagaggtggagagcattgagctgcccatggacaacaagaccaacaagaggcggggcttctgcttcatcaccttcaaggaggaggagcctgtgaagaagatcatggagaagaagtaccacaacgtgggcctgagcaaatgtgagatcaaggtggccatgagcaaggagcagtaccagcagcagcagcagtggggcagcagaggaggctttgctggccgggcccggggccggggcggcggccccagccagaactggaaccagggctacagcaactactggaaccagggctacggcaactacggctacaacagccagggctacggcggctatggaggctatgactacacaggctacaacaactactacggctatggagactacagcaaccagcagagcggctacggcaaggtgtcccggcggggcggccaccagaacagctacaagccctactag

SEQ ID NO: 221583 - DNA, 912 bp, Artificial Sequence
  derived and/or modified sequence
atgtctgaggagcagtttggaggagatggagctgctgctgctgccacagctgctgccagcggcggcacagaaggaggcagcgctgagagcgagggcgccaagattgatgccagcaagaatgaggaggatgagggcaagatgtttattggaggcctgtcctgggacaccaccaagaaggacctgaaggactacttcagcaagtttggagaggtggtggactgcaccctgaagctggaccccatcaccggccgcagccggggcttcggctttgtgctcttcaaggagagcgagagcgtggacaaggtgatggaccagaaggagcacaagctgaatggcaaggtgattgaccccaagagggccaaggccatgaagaccaaggagcctgtgaagaagatctttgtgggcggcctgagcccagacaccccagaggagaagatccgggagtactttggaggctttggagaggtggagagcattgagctgcccatggacaacaagaccaacaagaggcggggcttctgcttcatcaccttcaaggaggaggagcctgtgaagaagatcatggagaagaagtaccacaacgtgggcctgagcaaatgtgagatcaaggtggccatgagcaaggagcagtaccagcagcagcagcagtggggcagcagaggaggctttgctggccgggcccggggccggggcggcggccccagccagaactggaaccagggctacagcaactactggaaccagggctacggcaactacggctacaacagccagggctacggcggctatggaggctatgactacacaggctacaacaactactacggctatggagactacagcaaccagcagagcggctacggcaaggtgtcccggcggggcggccaccagaacagctacaagccctactag

SEQ ID NO: 221584 - DNA, 1011 bp, Artificial Sequence
  derived and/or modified sequence
atgagcgaggagcagttcggcggcgacggcgccgccgccgccgccaccgcagctgtcggaggtagtgcaggagagcaggagggcgctatggtcgctgccactcagggggctgctgcggccgctggatccggagcgggtaccggcggcgggactgcctctggagggacagagggtggctcggctgagtctgagggcgctaaaattgatgcctcaaagaatgaagaagacgagggcaagatgtttataggcggcctgtcgtgggatactacaaagaaagatctgaaagattatttcagcaagttcggcgaggtggtcgactgtaccttgaagctggaccctatcaccggaaggagtcgcggatttggcttcgtacttttcaaagagtctgaatccgtagataaggtgatggaccagaaagagcataagctgaacggaaaggttattgatccaaagcgcgccaaagctatgaaaaccaaggaaccggtaaagaaaatcttcgtggggggattgtctcctgacacacctgaagagaaaatcagagagtactttggcggtttcggggaggtggagtccatcgagttacccatggataacaaaaccaataagagaagagggttctgcttcatcacttttaaagaagaagaacccgtaaagaagattatggagaagaaataccacaatgttggcttgtccaaatgcgagatcaaggtggccatgtcaaaggaacagtaccagcaacagcagcagtggggcagtaggggcggctttgctggcagagctcggggcagaggtgggggaccttcccagaattggaaccaggggtattctaactattggaaccagggttacggaaactacggctataactctcaggggtatggagggtacggtggatacgactacaccggttacaataattattacgggtatggcgactatagcaaccaacagagcgggtacggcaaggtgtctagaagaggtggacatcagaattcctacaagccctactag

SEQ ID NO: 221585 - DNA, 606 bp, Artificial Sequence
  derived and/or modified sequence
atggaccagaaggagcacaagctgaacggcaaggtgatcgaccccaagagagcaaaggccatgaagaccaaggaaccggtgaaaaagatattcgtcggcggactgagccctgacaccccggaagagaagataagggagtactttggagggtttggcgaggtggagagtatcgagctgccgatggataacaagaccaataagcgacgcgggttttgttttatcacattcaaagaggaggaacccgtgaagaaaataatggaaaagaaatatcacaacgtgggtctgagtaaatgcgaaataaaagtagctatgtcgaaagagcagtaccagcagcagcagcaatggggctcccgcggcggctttgccgggcgggctcggggcagaggggggggccctagtcaaaattggaaccagggctacagtaactactggaatcagggatacggcaattacggatacaattctcaaggatacgggggttacggcggctatgattacactgggtacaacaattactatggctacggtgattattccaaccaacagtcaggatacgggaaggtgagcaggaggggtgggcaccagaacagttataagccctattag

SEQ ID NO: 221586 - DNA, 912 bp, Artificial Sequence
  derived and/or modified sequence
atgagcgaggagcagttcggcggcgacggcgccgccgccgccgccactgcagcggccagcggtggcactgaaggagggtccgccgagagcgaaggtgccaaaatcgacgcatctaaaaatgaggaggatgagggcaaaatgttcatcggcgggttaagttgggacacaaccaaaaaagacttgaaagactatttctctaagttcggagaagtggtagactgcactttgaaactggaccccataacaggaaggagtcggggattcggctttgttctgttcaaggaatccgagtcagtggacaaggtcatggatcagaaagagcacaagctaaacgggaaggtcattgatcctaaacgcgccaaagccatgaagactaaggaacccgtcaaaaaaattttcgtagggggccttagccccgacacgcctgaggagaagattcgcgagtatttcggcggctttggcgaagtggaaagcatcgagcttcccatggacaataaaactaataagcgcagaggcttttgcttcatcactttcaaggaggaagagccagtgaagaaaataatggaaaagaagtaccacaacgtaggccttagtaagtgcgagattaaggtggcaatgtccaaagagcagtaccaacagcaacagcagtggggctcccggggcggctttgcgggaagggccaggggaaggggcggtggtcctagtcagaactggaaccagggatactctaactattggaatcagggctatggaaactatgggtacaatagccagggctacggcggctatggcggatacgactacaccggctacaacaattattatggctatggagactattctaaccaacagtcaggatatggtaaggtgtcacgaaggggcggccaccagaacagctataaaccatactag

SEQ ID NO: 221587 - DNA, 1011 bp, Artificial Sequence
  derived and/or modified sequence
atgtccgaagaacaattcgggggtgacggagctgctgcggctgctacagcggcagtcggcggatctgccggtgaacaggaaggcgcaatggttgccgctacccagggggctgctgcagctgccggttccggggcaggaacaggcggaggcaccgcaagcggtgggaccgaagggggtagtgcagagagtgagggcgctaagattgatgcctctaaaaacgaagaggacgaggggaagatgtttatcggcggtctgtcctgggacactaccaagaaggacctcaaagattacttctcaaaatttggggaggtggtggattgtacactgaaactggatcctattactggcaggtctagggggttcggctttgtgttattcaaggaatctgaatctgtcgataaggtgatggaccagaaagaacataagttaaatggcaaagtcatcgatccgaagcgggcaaaagcgatgaagaccaaagaacccgttaagaagatttttgtgggcggtctgtcacccgacaccccggaagaaaagatacgagaatatttcggcggattcggcgaggtcgagtctatagagctaccgatggacaacaaaacaaacaaacgccgaggattctgcttcatcacgttcaaggaggaagagccagtgaagaagatcatggagaagaagtatcacaacgttggattgagcaaatgcgaaatcaaagtggccatgtctaaagaacagtaccagcagcaacagcagtgggggtcacggggagggtttgcgggtagagccagaggcaggggcggtggtcccagccagaactggaaccagggctattctaattattggaatcaggggtacgggaactacggatacaattcccagggttacggtgggtacggtggctacgattacacaggatataacaactattacgggtacggggattactccaatcagcagtccgggtatgggaaagtgtcaagaagggggggtcaccagaacagttataaaccctattag

SEQ ID NO: 221588 - DNA, 606 bp, Artificial Sequence
  derived and/or modified sequence
atggatcaaaaagaacacaagctcaacggcaaggtgatcgatcctaaaagggcgaaggccatgaaaacaaaggagccagtgaaaaagatattcgttggcggtctgtcaccagacaccccagaggagaaaattagagagtattttggaggctttggcgaggtggaatcaattgaattaccaatggacaacaaaactaataagcgccgaggattttgcttcattaccttcaaggaggaggagcccgtgaagaagattatggagaagaagtaccacaatgttggcctgagtaagtgtgagatcaaagtggccatgtctaaagagcagtatcaacagcagcagcagtggggttctagggggggtttcgccggaagagctcgcggaagagggggaggcccatctcagaactggaatcagggatatagcaactactggaatcagggctatgggaattacggctataactctcagggctatggcggatatggaggttatgactatacgggttataataactattacgggtacggggattacagcaaccagcaatcggggtatggcaaggtctcgcgtagagggggacatcaaaattcctataaaccatactag

SEQ ID NO: 221589 - DNA, 912 bp, Artificial Sequence
  derived and/or modified sequence
atgtccgaggagcagtttggaggggacggagccgcagcagccgcaaccgctgccgcttctggcggtaccgagggcggtagcgccgagtccgaaggtgcaaagattgacgcttccaagaacgaggaggacgagggtaagatgttcataggcggactttcttgggacaccacaaagaaagacttgaaagattacttttccaaatttggagaagtggtggattgtacactcaagttggaccccattactgggagaagtcgaggattcggttttgtgctgttcaaggaaagcgagtcggtggataaagtgatggaccagaaagagcataagctgaatggcaaggtcattgacccaaaacgtgccaaggccatgaagactaaagagccggttaaaaaaattttcgtaggcggattatcacccgacacacccgaggaaaagataagagagtatttcggcggttttggcgaggttgaatctatcgaactgccaatggacaacaagacaaataagaggcgcggtttttgcttcattaccttcaaagaggaggagccagtcaaaaaaattatggagaagaaatatcataacgtgggactctccaagtgtgagatcaaggtggcaatgtccaaggaacagtatcaacagcagcagcaatgggggagcaggggaggatttgcgggacgcgctcggggtaggggcggagggccatcacagaactggaaccagggctactctaactactggaaccaaggctacggcaattatggctacaactctcaggggtatgggggatacggtggttatgattacaccggttacaacaattactatgggtacggtgattatagcaaccaacagtcaggctacgggaaggtgtcaagacggggagggcaccagaacagttacaagccctactag

SEQ ID NO: 221590 - protein, 355 aa, Artificial Sequence
  derived and/or modified sequence
MSEEQFGGDGAAAAATAAVGGSAGEQEGAMVAATQGAAAAAGSGAGTGGGTASGGTEGGSAESEGAKIDASKNEEDEGHSNSSPRHSEAATAQREEWKMFIGGLSWDTTKKDLKDYFSKFGEVVDCTLKLDPITGRSRGFGFVLFKESESVDKVMDQKEHKLNGKVIDPKRAKAMKTKEPVKKIFVGGLSPDTPEEKIREYFGGFGEVESIELPMDNKTNKRRGFCFITFKEEEPVKKIMEKKYHNVGLSKCEIKVAMSKEQYQQQQQWGSRGGFAGRARGRGGGPSQNWNQGYSNYWNQGYGNYGYNSQGYGGYGGYDYTGYNNYYGYGDYSNQQSGYGKVSRRGGHQNSYKPY

SEQ ID NO: 221591 - protein, 221 aa, Artificial Sequence
  derived and/or modified sequence
MSEEQFGGDGAAAAATAAVGGSAGEQEGAMVAATQGAAAAAGSGAGTGGGTASGGTEGGSAESEGAKIDASKNEEDEGHSNSSPRHSEAATAQREEWKMFIGGLSWDTTKKDLKDYFSKFGEVVDCTLKLDPITGRSRGFGFVLFKESESVDKVMDQKEHKLNGKVIDPKRAKAMKTKEPVKKIFVGGLSPDTPEEKIREYFGGFGEVESIELPMDNKTNK

SEQ ID NO: 221592 - protein, 201 aa, Artificial Sequence
  derived and/or modified sequence
MDQKEHKLNGKVIDPKRAKAMKTKEPVKKIFVGGLSPDTPEEKIREYFGGFGEVESIELPMDNKTNKRRGFCFITFKEEEPVKKIMEKKYHNVGLSKCEIKVAMSKEQYQQQQQWGSRGGFAGRARGRGGGPSQNWNQGYSNYWNQGYGNYGYNSQGYGGYGGYDYTGYNNYYGYGDYSNQQSGYGKVSRRGGHQNSYKPY

SEQ ID NO: 221593 - DNA, 1068 bp, Artificial Sequence
  derived and/or modified sequence
atgagcgaggagcagttcggcggcgacggcgccgccgccgccgccaccgccgccgtgggcggcagcgccggcgagcaggagggcgccatggtggccgccacccagggcgccgccgccgccgccggcagcggcgccggcaccggcggcggcaccgccagcggcggcaccgagggcggcagcgccgagagcgagggcgccaagatcgacgccagcaagaacgaggaggacgagggccacagcaacagcagccccagacacagcgaggccgccaccgcccagagagaggagtggaagatgttcatcggcggcctgagctgggacaccaccaagaaggacctgaaggactacttcagcaagttcggcgaggtggtggactgcaccctgaagctggaccccatcaccggcagaagcagaggcttcggcttcgtgctgttcaaggagagcgagagcgtggacaaggtgatggaccagaaggagcacaagctgaacggcaaggtgatcgaccccaagagagccaaggccatgaagaccaaggagcccgtgaagaagatcttcgtgggcggcctgagccccgacacccccgaggagaagatcagagagtacttcggcggcttcggcgaggtggagagcatcgagctgcccatggacaacaagaccaacaagagaagaggcttctgcttcatcaccttcaaggaggaggagcccgtgaagaagatcatggagaagaagtaccacaacgtgggcctgagcaagtgcgagatcaaggtggccatgagcaaggagcagtaccagcagcagcagcagtggggcagcagaggcggcttcgccggcagagccagaggcagaggcggcggccccagccagaactggaaccagggctacagcaactactggaaccagggctacggcaactacggctacaacagccagggctacggcggctacggcggctacgactacaccggctacaacaactactacggctacggcgactacagcaaccagcagagcggctacggcaaggtgagcagaagaggcggccaccagaacagctacaagccctactag

SEQ ID NO: 221594 - DNA, 1068 bp, Artificial Sequence
  derived and/or modified sequence
atgtctgaagagcaattcggcggagatggagccgcagccgccgccaccgccgccgtcggcggcagtgctggtgaacaggaaggagcaatggtcgccgctacgcaaggggcagccgcagctgccggtagcggcgccggaactggagggggtacagcatctggaggtaccgagggcggcagtgctgagagcgaaggcgccaagatcgacgcctccaagaatgaagaggatgaagggcactctaatagttctccacgccattctgaggctgctaccgcccagagggaggaatggaaaatgttcattggcggtctctcctgggacaccacgaaaaaagatttaaaggactacttctctaagtttggtgaggttgtggattgtactctgaaactcgatcccataaccggacgcagccggggatttggttttgtgttgttcaaagagagcgagagtgtggataaggtcatggaccagaaagaacacaaactgaacggtaaagtcatcgacccgaagcgagcgaaagcgatgaaaaccaaggaacccgtcaagaagattttcgtagggggactttctcctgatacccctgaggagaagattagagaatattttggtggcttcggggaggttgagtcaattgagctccctatggataataagacgaacaagaggagaggattttgttttatcacatttaaggaagaagagcctgttaagaaaatcatggagaagaagtatcacaacgtgggtctgtccaaatgtgaaatcaaggttgcaatgtctaaagagcaatatcaacagcagcagcagtggggctcccgcggtggctttgcaggtagagcgcggggtcgagggggtggcccatcacagaactggaatcagggctatagcaattactggaatcagggttatggtaactacggatacaacagtcaggggtacggtgggtacggcggctacgattacaccggatacaataactactatggctacggcgactatagtaaccagcaatctggctacggcaaagttagtagaagggggggacatcaaaactcttataagccatactag

SEQ ID NO: 221595 - DNA, 3033 bp, Artificial Sequence
  derived and/or modified sequence
aaagcgaggaggaggcgagagcggccgccgctggtgcttattcttttttagtgcagcgggagagagcgggagtgtgcgccgcgcgagagtgggaggcgaagggggcaggccagggagaggcgcaggagcctttgcagccacgcgcgcgccttccctgtcttgtgtgcttcgcgaggtagagcgggcgcgcggcagcggcggggattactttgctgctagtttcggttcgcggcagcggcgggtgtagtctcggcggcagcggcggagacactagcactatgtcggaggagcagttcggcggggacggggcggcggcagcggcaacggcggcggtaggcggctcggcgggcgagcaggagggagccatggtggcggcgacacagggggcagcggcggcggcgggaagcggagccgggaccgggggcggaaccgcgtctggaggcaccgaagggggcagcgccgagtcggagggggcgaagattgacgccagtaagaacgaggaggatgaaggccattcaaactcctccccacgacactctgaagcagcgacggcacagcgggaagaatggaaaatgtttataggaggccttagctgggacactacaaagaaagatctgaaggactacttttccaaatttggtgaagttgtagactgcactctgaagttagatcctatcacagggcgatcaaggggttttggctttgtgctatttaaagaatcggagagtgtagataaggtcatggatcaaaaagaacataaattgaatgggaaggtgattgatcctaaaagggccaaagccatgaaaacaaaagagccggttaaaaaaatttttgttggtggcctttctccagatacacctgaagagaaaataagggagtactttggtggttttggtgaggtggaatccatagagctccccatggacaacaagaccaataagaggcgtgggttctgctttattacctttaaggaagaagaaccagtgaagaagataatggaaaagaaataccacaatgttggtcttagtaaatgtgaaataaaagtagccatgtcgaaggaacaatatcagcaacagcaacagtggggatctagaggaggatttgcaggaagagctcgtggaagaggtggtggccccagtcaaaactggaaccagggatatagtaactattggaatcaaggctatggcaactatggatataacagccaaggttacggtggttatggaggatatgactacactggttacaacaactactatggatatggtgattatagcaaccagcagagtggttatgggaaggtatccaggcgaggtggtcatcaaaatagctacaaaccatactaaattattccatttgcaacttatccccaacaggtggtgaagcagtattttccaatttgaagattcatttgaaggtggctcctgccacctgctaatagcagttcaaactaaattttttgtatcaagtccctgaatggaagtatgacgttgggtccctctgaagtttaattctgagttctcattaaaagaaatttgctttcattgttttatttcttaattgctatgcttcagaatcaatttgtgttttatgccctttcccccagtattgtagagcaagtcttgtgttaaaagcccagtgtgacagtgtcatgatgtagtagtgtcttactggttttttaataaatccttttgtataaaaatgtattggctcttttatcatcagaataggaaaaattgtcatggattcaagttattaaaagcataagtttggaagacaggcttgccgaaattgaggacatgattaaaattgcagtgaagtttgaaatgtttttagcaaaatctaatttttgccataatgtgtcctccctgtccaaattgggaatgacttaatgtcaatttgtttgttggttgttttaataatacttccttatgtagccattaagatttatatgaatattttcccaaatgcccagtttttgcttaatatgtattgtgctttttagaacaaatctggataaatgtgcaaaagtacccctttgcacagatagttaatgttttatgcttccattaaataaaaaggacttaaaatctgttaattataatagaaatgcggctagttcagagagatttttagagctgtggtggacttcatagatgaattcaagtgttgagggaggattaaagaaatatataccgtgtttatgtgtgtgtgcttatttgtttgaatgattttattttccatttctcaaaggttttatttttttggttagggccttaaaatttcaggactgtgattattagtatgtgtgcctaaggaactttttgagtcactcttaagaaagtgaaactgaagagtctaagtgataactataggattaagtcagaattgtttttcctgtcatttgttggaagcttcttgagttctgttattagcattcagggaattgatacccatcaacttgaatggaaaatcgtttgtaggtattacttaagtgaatgttaagagttccaccctgagtggtaatctaaggctgtgcagtcagttacttcagactgctcagaatagttcattagaaaggtaacaaatgagaaatgtattattatacagttctatagtagtgaagtgatggaatacctttcttacttttgtggagttacatctgatgctaagaatttgacctccaactaagcaaacattttaatgagcaaaagttagtgttattaaagtttttttatgatagatccaaattgaggacctgtgtcctgtttttataagattgcaacccagctatgctcatttgtttatgttttgtatatggctgcttttgtgttacagtggtagagtttagtagttaggacagagacctgcaaagcaaaataatttacagtctggccctttacagaaaagtttgctgactcatggtcaaaataaatgaaaattttttgtgttagggttgttaagctagggttctttttggtatcatatgcttattttatgtaaatctctcaataaaaaattatttttaagaga

SEQ ID NO: 221596 - DNA, 1068 bp, Artificial Sequence
  derived and/or modified sequence
atgtctgaggagcagtttggaggagatggagctgctgctgctgccacagctgctgtgggcggcagcgctggggagcaggagggcgccatggtggccgccacccagggcgctgctgctgctgctggcagcggggccggcactggaggcggcacagccagcggcggcacagagggcggcagcgctgagagcgagggcgccaagattgatgccagcaagaatgaagaagatgagggccacagcaacagcagccccaggcacagcgaggccgccacagcccagcgggaggagtggaagatgtttattggaggcctgtcctgggacaccaccaagaaggacctgaaggactacttcagcaagtttggagaggtggtggactgcaccctgaagctggaccccatcaccggccgcagccggggcttcggctttgtgctcttcaaggagagcgagagcgtggacaaggtgatggaccagaaggagcacaagctgaatggcaaggtgattgaccccaagagggccaaggccatgaagaccaaggagcctgtgaagaagatctttgtgggcggcctgagcccagacaccccagaggagaagatccgggagtactttggaggctttggagaggtggagagcattgagctgcccatggacaacaagaccaacaagaggcggggcttctgcttcatcaccttcaaggaggaggagcctgtgaagaagatcatggagaagaagtaccacaacgtgggcctgagcaaatgtgagatcaaggtggccatgagcaaggagcagtaccagcagcagcagcagtggggcagcagaggaggctttgctggccgggcccggggccggggcggcggccccagccagaactggaaccagggctacagcaactactggaaccagggctacggcaactacggctacaacagccagggctacggcggctatggaggctatgactacacaggctacaacaactactacggctatggagactacagcaaccagcagagcggctacggcaaggtgtcccggcggggcggccaccagaacagctacaagccctactag

SEQ ID NO: 221597 - DNA, 1068 bp, Artificial Sequence
  derived and/or modified sequence
atgagcgaggagcagttcggcggcgacggcgccgccgccgccgccaccgcagcggtgggcggcagcgccggggaacaagagggcgccatggtggccgccacccagggggcagcagcggcagcaggcagcggggccggcactggaggcggaacggcttcgggcggcactgaaggcgggagtgcagagtctgaaggtgcaaagatcgacgctagcaagaacgaggaggacgaggggcacagtaactcttcacccagacattcagaggccgctaccgcccagcgagaagaatggaaaatgttcatcggggggttgtcatgggacactaccaaaaaagaccttaaagactactttagcaagtttggtgaggtcgtggactgtacgctgaagctggacccaatcacgggacgctccaggggtttcggcttcgtgttgttcaaggaatctgagagcgtggacaaagtaatggaccagaaggagcacaagctgaacggtaaagtgattgatcccaaacgggcgaaagccatgaaaaccaaggagccagttaagaaaatttttgtcggtggcctctcccccgacacgcccgaggagaagatccgcgagtattttggcgggtttggtgaggtggagtccattgaactcccgatggacaataagacaaacaaaaggcgcggcttttgttttatcacattcaaagaggaggagcccgtcaaaaagattatggagaagaagtatcataacgtgggcctctccaagtgcgaaatcaaggttgctatgtctaaggagcagtatcagcagcaacagcagtggggctccagggggggatttgcaggacgtgcgagggggagggggggcggaccctcccaaaactggaatcagggttacagtaattattggaaccagggttacggtaattacgggtataatagtcaagggtacggcggttacgggggctacgactatactggttataataactactacggctacggggactattctaaccagcagtctggttacggcaaggttagtagacggggtggccaccaaaatagctacaaaccttattag

SEQ ID NO: 221598 - DNA, 1068 bp, Artificial Sequence
  derived and/or modified sequence
atgtccgaggaacaattcggaggcgacggagcggctgctgccgcaaccgctgctgtgggaggaagtgctggggaacaggagggggctatggttgcagctacgcagggcgcagccgcagcagctggaagcggggctggaacaggcggaggcaccgcctctggcggaactgaagggggaagtgcagaatcagagggcgctaagattgatgcttccaagaatgaggaagacgaagggcattccaactcttctcccaggcacagcgaggcagctacggcccagcgagaggagtggaaaatgttcataggcggactgtcctgggacacaaccaagaaggacctgaaggattacttctcaaagttcggcgaagtggtcgactgtactctgaaattggatcctataactggaagatcgcgagggttcggattcgttttgttcaaggagtccgagtccgtggataaagtgatggatcaaaaggaacataaactgaatggaaaagtgatcgatccgaagcgtgccaaagctatgaaaaccaaagagccagtgaaaaagatatttgttggtggcttgtcacccgacacacccgaggagaagatacgagagtactttggaggcttcggggaagtcgaatctattgaactgcctatggacaacaaaaccaacaaacggaggggattttgcttcatcacattcaaagaagaggaacctgtcaagaaaattatggaaaagaagtaccacaacgtgggcttatctaaatgtgaaatcaaggtagcgatgagcaaagaacaataccaacaacagcagcaatggggctcaagaggcggtttcgcaggaagagctcgcggacggggtggaggccctagccagaattggaatcaggggtattctaactattggaaccagggttacggaaactatggctacaactcccaggggtatggcggatacgggggttatgattacacaggctacaataactattacggctacggcgactactcaaaccagcagtcaggctacggcaaagtatcccggcgtggcggacaccagaactcttacaaaccttactag

SEQ ID NO: 221599 - protein, 1226 aa, Artificial Sequence
  derived and/or modified sequence
MKALDEPPYLTVGTDVSAKYRGAFCEAKIKTAKRLVKVKVTFRHDSSTVEVQDDHIKGPLKVGAIVEVKNLDGAYQEAVINKLTDASWYTVVFDDGDEKTLRRSSLCLKGERHFAESETLDQLPLTNPEHFGTPVIGKKTNRGRRSNHIPEEESSSSSSDEDEDDRKQIDELLGKVVCVDYISLDKKKALWFPALVVCPDCSDEIAVKKDNILVRSFKDGKFTSVPRKDVHEITSDTAPKPDAVLKQAFEQALEFHKSRTIPANWKTELKEDSSSSEAEEEEEEEDDEKEKEDNSSEEEEEIEPFPEERENFLQQLYKFMEDRGTPINKRPVLGYRNLNLFKLFRLVHKLGGFDNIESGAVWKQVYQDLGIPVLNSAAGYNVKCAYKKYLYGFEEYCRSANIEFQMALPEKVVNKQCKECENVKEIKVKEENETEIKEIKMEEERNIIPREEKPIEDEIERKENIKPSLGSKKNLLESIPTHSDQEKEVNIKKPEDNENLDDKDDDTTRVDESLNIKVEAEEEKAKSGYDEWIKADKIVRPADKNVPKIKHRKKIKNKLDKEKDKDEKYSPKNCKLRRLSKPPFQTNPSPEMVSKLDLTDAKNSDTAHIKSIEITSILNGLQASESSAEDSEQEDERGAQDMDNNGKEESKIDHLTNNRNDLISKEEQNSSSLLEENKVHADLVISKPVSKSPERLRKDIEVLSEDTDYEEDEVTKKRKDVKKDTTDKSSKPQIKRGKRRYCNTEECLKTGSPGKKEEKAKNKESLCMENSSNSSSDEDEEETKAKMTPTKKYNGLEEKRKSLRTTGFYSGFSEVAEKRIKLLNNSDERLQNSRAKDRKDVWSSIQGQWPKKTLKELFSDSDTEAAASPPHPAPEEGVAEESLQTVAEEESCSPSVELEKPPPVNVDSKPIEEKTVEVNDRKAEFPSSGSNSVLNTPPTTPESPSSVTVTEGSRQQSSVTVSEPLAPNQEEVRSIKSETDSTIEVDSVAGELQDLQSEGNSSPAGFDASVSSSSSNQPEPEHPEKACTGQKRVKDAQGGGSSSKKQKRSHKATVVNNKKKGKGTNSSDSEELSAGESITKSQPVKSVSTGMKSHSTKSPARTQSPGKCGKNGDKDPDLKEPSNRLPKVYKWSFQMSDLENMTSAERITILQEKLQEIRKHYLSLKSEVASIDRRRKRLKKKERESAATSSSSSSPSSSSITAAVMLTLAEPSMSSASQNGMSVECR

SEQ ID NO: 221600 - protein, 483 aa, Artificial Sequence
  derived and/or modified sequence
MKALDEPPYLTVGTDVSAKYRGAFCEAKIKTAKRLVKVKVTFRHDSSTVEVQDDHIKGPLKVGAIVEVKNLDGAYQEAVINKLTDASWYTVVFDDGDEKTLRRSSLCLKGERHFAESETLDQLPLTNPEHFGTPVIGKKTNRGRRSNHIPEEESSSSSSDEDEDDRKQIDELLGKVVCVDYISLDKKKALWFPALVVCPDCSDEIAVKKDNILVRSFKDGKFTSVPRKDVHEITSDTAPKPDAVLKQAFEQALEFHKSRTIPANWKTELKEDSSSSEAEEEEEEEDDEKEKEDNSSEEEEEIEPFPEERENFLQQLYKFMEDRGTPINKRPVLGYRNLNLFKLFRLVHKLGGFDNIESGAVWKQVYQDLGIPVLNSAAGYNVKCAYKKYLYGFEEYCRSANIEFQMALPEKVVNKQCKECENVKEIKVKEENETEIKEIKMEEERNIIPREEKPIEDEIERKENIKPSLGSKKNLLESIPTHS

SEQ ID NO: 221601 - DNA, 3681 bp, Artificial Sequence
  derived and/or modified sequence
atgaaggcccttgatgagcccccatatcttactgtaggcacggacgtctcagccaagtaccgtggcgcattttgcgaagccaagatcaagacagcaaaacggctggtgaaagttaaagtcactttccggcacgattcgtcaaccgtggaggtgcaagatgatcatattaagggcccgctgaaagtgggagctattgtggaggtgaaaaacctggacggagcgtaccaggaggccgtcatcaacaaactcacagatgcatcctggtatacagtggtgtttgatgacggagacgagaagactctcaggcgatcctctctttgcctgaagggggagagacacttcgcggagtccgaaactctcgaccagctcccgttgaccaaccccgaacacttcgggaccccagtcataggcaaaaagaccaaccgcggccgacgctccaatcacataccggaggaggagagttcgtcatcctcctcagacgaggacgaagatgatcggaagcagatagatgaactcctgggcaaagtcgtttgtgtggactatatttccctcgacaagaagaaggcactgtggttccccgcactcgtggtgtgcccagactgcagtgacgagatcgcagtgaaaaaagacaacatcctagtgcgcagtttcaaagatgggaagtttacctccgttcctcgtaaagacgtacacgagattacctcagacactgcaccaaagcccgacgcagtgctgaaacaggcattcgagcaggcgctcgagttccataagtcccgcactatccctgccaactggaagacagagttgaaggaagatagcagcagctccgaggcggaagaggaggaagaagaagaggacgatgaaaaggaaaaagaagacaattcatctgaggaggaggaggaaattgaaccattcccagaagaacgagaaaacttcctgcaacagctatataagttcatggaggatcgaggaactcctatcaataagagaccggtgctcggatacaggaatctgaatctcttcaaactcttccgactggtgcataagttgggtgggttcgacaacatcgagtcaggcgcagtgtggaagcaggtctaccaggatctggggatcccagttcttaacagtgctgctggatacaacgtaaaatgcgcatacaagaagtacctgtacggctttgaggagtattgccgatctgcaaatattgagttccaaatggcactcccggagaaggtggtcaacaagcaatgcaaggagtgtgaaaacgtgaaagaaattaaagtgaaggaggaaaacgaaacagagataaaggagatcaagatggaggaggagcggaatattattcctcgggaggagaagccaattgaggacgaaatcgagagaaaggaaaacatcaaaccatccctgggcagtaagaagaatctgttagagagtattccgacccactccgatcaggagaaagaggtaaatatcaagaagcccgaggataacgagaatctcgatgataaggatgacgacaccactcgtgttgatgagtcattgaacatcaaggtggaagctgaggaggagaaagccaagtcaggttacgatgagtggatcaaagccgacaaaatcgtcagacctgctgacaaaaatgtgcctaagataaaacatcgcaagaagattaagaataagctcgataaagagaaggacaaagatgaaaagtattcacctaagaattgtaagctcagacgtctctccaagccacctttccagacaaatccaagtccagagatggtgtccaagctggatcttaccgacgcaaagaactccgataccgcgcacattaaatccattgagattacctccatcttgaacggactacaggcatctgagagtagcgccgaggattccgaacaagaagacgagaggggggcccaggacatggacaacaacggcaaagaagagtccaaaattgaccatctgacgaataatcggaatgacctcatttccaaagaagagcagaacagcagcagtttgctcgaggagaataaggtgcacgccgatctcgtgatatcaaaacccgtatccaagagccctgagcgtctccgcaaggatattgaagtcctctctgaggacacagattacgaggaggacgaggtaaccaagaagcggaaggacgtgaaaaaagacacaactgataaaagctcgaaaccacagataaaacggggcaagcggcgctattgcaatactgaagagtgcttaaaaactggtagtcctgggaaaaaagaggaaaaggcaaagaacaaagagtccttgtgtatggagaatagctctaattccagcagcgacgaggacgaggaagagactaaggcaaaaatgactcctaccaaaaagtataatggcctggaggaaaagcgtaaatcactgcgtacaacgggcttttatagcgggttttctgaggtggctgaaaagcgtattaaacttctcaacaactctgacgagcggctgcaaaactctcgtgctaaagacaggaaggatgtctggtcgtcgatacagggacagtggcctaagaagacactgaaagagctattcagcgattccgacacagaggctgctgcatcacctcctcatccagctcccgaagagggcgtggctgaagagtccctccagacagtcgcggaagaagagtcttgttctccatctgtggaactggaaaagccacctcccgttaatgtggacagtaaacccattgaagagaaaacagttgaagtgaatgacagaaaagctgaattccccagttccggcagcaattccgtgctaaataccccaccaacaacccctgagtctccatccagcgtcacggtgactgaagggtcaaggcagcagagctctgtcactgtgtccgagcctcttgccccaaatcaggaggaggtgagatccataaagagtgaaactgacagtacaatcgaggttgacagtgttgcaggagaactgcaggatctgcaatcggaaggaaattcttctcctgccgggttcgacgcttccgttagcagctcttcttccaaccaaccagagccggagcatcctgagaaggcctgcacagggcagaaaagggtaaaagacgctcaaggaggtggaagcagcagcaagaaacagaagcggagtcacaaagccaccgtagttaacaacaagaagaaaggaaagggtacgaactctagtgactccgaagagctgtccgcgggagagtcgattacgaagagccagcccgtcaagagtgtatcaactggtatgaagagtcactctactaaaagccccgcccgtacccagagtcccggtaagtgtggtaagaacggggacaaagaccccgatttgaaggaacctagtaacaggctgccgaaggtctataaatggtctttccaaatgtctgacctagaaaatatgaccagcgctgagagaataactatactccaagagaagctccaggagatccgcaagcactatctgtcgctaaagagtgaggtcgcaagcattgatcggcgtagaaaacggttaaagaaaaaggagcgcgaatctgccgcgacatccagttcatcatcctccccctctagttcatccatcaccgccgctgtcatgttaaccctagctgaaccatcgatgagtagcgcctctcagaatggtatgtctgtcgaatgccgatag

SEQ ID NO: 221602 - DNA, 3681 bp, Artificial Sequence
  derived and/or modified sequence
atgaaggccctggatgagcccccctacctgactgtgggcacagatgtgtctgccaagtacagaggagccttctgtgaggccaagatcaagacagccaagaggctggtgaaggtgaaggtgaccttcagacatgacagcagcacagtggaggtgcaggatgaccacatcaagggccccctgaaggtgggcgccatcgtggaggtgaagaacctggatggagcctaccaggaggccgtcatcaacaagctgacagatgcctcctggtacacagtggtgtttgatgatggagatgagaagaccctgcggcgcagcagcctgtgcctgaagggggagcggcactttgctgagagcgagaccctggaccagctgcccctgaccaaccctgagcacttcggcacccctgtgattggcaagaagaccaacagaggccgccgcagcaaccacatccctgaggaggagagcagcagcagcagcagtgatgaagatgaagatgacaggaagcagattgatgagctgctgggcaaggtggtgtgtgtggactacatcagcctggacaagaagaaggccctgtggttccctgccctggtggtgtgcccagactgcagtgatgaaattgctgtgaagaaggacaacatcctggtgcgctccttcaaggatggcaagttcacctctgtgcccaggaaggatgtgcatgagatcaccagtgacacagcccccaagccagatgctgtgctgaagcaggcctttgagcaggccctggagttccacaagagcaggaccatcccagccaactggaagacagagctgaaggaggacagcagcagcagcgaggccgaggaggaggaggaggaggaggatgatgagaaggagaaggaggacaacagcagcgaggaggaggaggagattgagcccttccctgaggagcgggagaacttcctgcagcagctgtacaagttcatggaggaccggggcacccccatcaacaagaggcctgtgctgggctacagaaacctgaacctcttcaagctgttccggctggtgcacaagctgggcggctttgacaacatcgagagcggggctgtgtggaagcaggtgtaccaggacctgggcatccctgtgctgaacagcgctgctggctacaacgtgaagtgtgcctacaagaagtacctgtatggctttgaggagtactgccgcagcgccaacatcgagttccagatggccctgcctgagaaggtggtgaacaagcagtgcaaggaatgtgaaaatgtgaaggagatcaaggtgaaggaggagaatgaaacagagatcaaggagatcaagatggaggaggagaggaacatcatcccccgggaggagaagcccattgaagatgaaattgaaagaaaagaaaacatcaagcccagcctgggcagcaagaagaacctgctggagagcatccccacccacagcgaccaggagaaggaggtgaacatcaagaagccagaagataatgaaaacctggatgacaaggatgatgacaccaccagggtggatgagagcctgaacatcaaggtggaggccgaggaggagaaggccaagagcggctatgatgagtggatcaaggctgacaagatcgtgcggcctgctgacaagaatgtgcccaagatcaagcacaggaagaagatcaagaacaagctggacaaggagaaggacaaggatgagaagtacagccccaagaactgcaagctgcggcggctgagcaagccacccttccagaccaaccccagccctgagatggtgtccaagctggacctgacagatgccaagaacagcgacacagcccacatcaagagcattgagatcaccagcatcctgaatggcctgcaggccagcgagagcagcgcagaagattctgagcaggaggatgagcggggggcccaggacatggacaacaacgggaaggaggagagcaagattgaccacctgaccaacaacagaaatgacctgatcagcaaggaggagcagaacagcagcagcctgctggaggagaacaaggtgcatgctgacctggtgatcagcaagcctgtgtccaagagccctgagcggctgaggaaggacatcgaggtgctgtctgaggacacagattatgaagaagatgaggtgaccaagaagaggaaggatgtgaagaaggacaccacagacaagagcagcaagccccagatcaagaggggcaagaggcgctactgcaacacagaggagtgcctgaagacaggcagccctgggaagaaggaggagaaggccaagaacaaggagagcctgtgcatggagaacagcagcaacagcagcagtgatgaagatgaggaggagaccaaggccaagatgacccccaccaagaagtacaacggcctggaggagaagaggaagagcctgcggaccaccggcttctacagcggcttcagcgaggtggccgagaagaggatcaagctgctgaacaacagtgatgagcggctgcagaacagccgggccaaggacaggaaggatgtgtggagcagcatccagggccagtggcccaagaagaccctgaaggagctgttcagtgacagcgacacagaagctgctgccagccccccccacccagcccctgaggagggcgtggccgaggagagcctgcagacagtggccgaggaggagagctgcagccccagcgtggagctggagaagcccccacctgtgaatgtggacagcaagcccatcgaggagaagacagtggaggtgaatgacaggaaggccgagttccccagcagcggcagcaacagcgtgctgaacaccccacccaccaccccagagagccccagctctgtgacagtgacagagggcagccggcagcagagctctgtgacagtgtctgagcccctggcccccaaccaggaggaggtgcgcagcatcaagtcagaaacagacagcaccatcgaggtggacagcgtggccggggagctgcaggacctgcagagcgagggcaacagcagccctgctggctttgatgcctctgtgagcagcagcagcagcaaccagcctgagcctgagcaccctgagaaggcctgcaccggccagaagagggtgaaggatgcccagggcggcggcagcagcagcaagaagcagaagaggagccacaaggccaccgtggtgaacaacaagaagaagggcaagggcaccaacagcagtgacagcgaggagctgtctgctggggagagcatcaccaagagccagcctgtgaagtctgtgtccacaggcatgaagagccacagcaccaagagccctgcccggacccagagccctggaaaatgtgggaagaatggagacaaggaccctgacctgaaggagcccagcaaccggctgcccaaggtgtacaagtggagcttccagatgtctgacctggagaacatgaccagcgctgagcgcatcaccatcctgcaggagaagctgcaggagatcaggaagcactacctgagcctgaagtctgaggtggccagcattgacagaagaaggaagaggctgaagaagaaggagcgggagagcgctgccaccagcagcagcagcagcagccccagcagcagcagcatcacagctgctgtgatgctgaccctggccgagcccagcatgagcagcgccagccagaatggcatgtctgtggagtgcaggtag

SEQ ID NO: 221603 - DNA, 3681 bp, Artificial Sequence
  derived and/or modified sequence
atgaaggccctggacgagcccccctacctgaccgtgggcaccgacgtgtcggcaaagtatcggggtgccttctgcgaagcaaagatcaagactgcgaaaaggctcgtcaaggttaaagttactttcagacatgacagtagtactgtagaggtgcaggacgaccatataaagggcccccttaaagtcggcgccatcgtggaggtcaagaaccttgacggcgcataccaggaagcagtaataaacaaactgactgatgcttcgtggtatacggtcgtgttcgatgacggagatgaaaagacactgcggcgctctagtctctgcctgaagggtgagcgtcacttcgccgagagcgagaccctggaccagctgccgctcacaaacccagagcattttgggacaccggtaatcggcaaaaaaaccaatcgtgggaggaggagcaatcatattcctgaggaggagtcttcctcttctagctccgatgaagatgaggacgatcgtaagcagattgatgagctgcttggcaaggtcgtctgtgtggactatatttctctagataaaaagaaagctctgtggttccctgctttggtcgtttgtcctgattgctcagatgaaattgccgtaaagaaggataatatcctcgtgcgttcgtttaaggacggaaaatttaccagcgttccgagaaaagacgttcatgagatcaccagcgacaccgcaccaaagccagatgccgtattaaagcaggccttcgagcaagcccttgagttccacaaaagccggaccatacctgctaactggaagaccgaattaaaagaggactctagctcctctgaggcagaggaggaggaggaggaggaagatgacgagaaggaaaaggaagacaactcttctgaagaggaagaagagattgagccttttcctgaggaacgcgagaatttcctgcagcagttgtacaagtttatggaggatagggggacacccatcaacaagagaccagtactcggctatcgaaacctgaatctgtttaagctgtttcgtctggtgcacaagctggggggcttcgacaatatcgaatccggcgcggtctggaaacaggtataccaggatctcggcataccagttctgaattctgccgccggctacaacgtgaagtgcgcttataaaaagtacttgtacggctttgaggaatattgccggtcggcaaacatcgagttccagatggccctgcctgaaaaagtggtgaacaaacagtgtaaggaatgtgaaaatgtcaaagaaatcaaggttaaggaggagaacgaaactgaaattaaggagatcaagatggaggaggaaagaaatatcattccacgagaagagaagccgatcgaagatgaaatcgagcgcaaggagaatatcaaacctagtctcggatcaaaaaagaatcttcttgagtctattcccactcattctgatcaagaaaaagaggtcaacattaaaaagcctgaggacaatgagaatctggacgataaggatgatgacaccacacgggtggatgagtctttaaacattaaggtggaggcggaggaagaaaaagccaaatctggttatgatgagtggattaaggccgataagatagtgaggccagccgataagaatgtgccgaaaattaagcaccggaaaaagattaaaaataagctggacaaagagaaggataaagacgaaaagtactccccaaaaaattgtaagctgcgtaggctttctaaacccccctttcaaaccaatccttcgccagaaatggtcagcaagctcgacctcaccgacgcaaaaaactccgacaccgcacacataaagtcaatcgaaatcacttccattctgaatggcctccaggcctccgagagttcagccgaggattcagaacaggaggatgaaaggggggcccaagatatggataacaatggcaaggaggaaagcaaaatcgaccaccttaccaacaaccgtaacgatctcatatctaaggaagagcagaactcaagttcgctgctagaagagaacaaggtgcacgctgatcttgtcataagcaaacctgtctccaaatctcccgagcgtcttcggaaggacattgaagtcctgtccgaggacacagattacgaggaagacgaagtcacaaaaaaacggaaagatgtgaaaaaggataccacggacaagagcagtaagccccagataaagagagggaaaagaaggtactgtaataccgaggagtgcctcaagactggctctcccggcaagaaagaagagaaggccaaaaacaaggagtccctatgcatggagaattcatccaacagcagttctgacgaagacgaggaggagacaaaagccaaaatgacacctaccaaaaagtacaatggcctggaagagaagcgtaagtccctgcgcacgactggcttttatagcggattcagcgaagtcgctgaaaaaaggattaaactcctgaacaactccgatgaacgcttacaaaacagcagggcaaaggacaggaaggatgtgtggtcctcaatccaaggacagtggccaaaaaaaaccctaaaggagttgttttcagatagcgataccgaagccgcagcctcacccccccaccctgcgccagaagagggagtggcggaagagtccttgcagaccgttgctgaagaagaatcttgctccccttctgtggagctcgagaaacctccacccgtgaatgtggatagtaagcccatcgaggagaaaacagtcgaggtgaacgatagaaaggcagaatttcccagctctggctcaaattccgtgctgaacacacctcctacaacccctgaatccccaagctcagtaaccgtgacagagggaagccgacaacaatcttctgtcaccgtgagcgagcctttagcaccaaaccaggaggaagtgagatccatcaaaagcgaaacagactccacaattgaggtcgatagcgttgcgggggagttacaggacttacagtccgaagggaattccagccccgccggatttgacgcctccgtgtcatcttcctctagcaaccagcccgagccagagcacccagagaaggcctgcaccggacaaaagagagttaaagacgcacaaggcggcggatcctctagtaagaaacagaaacggtctcacaaggccactgtcgttaataataaaaaaaagggcaagggcactaacagtagcgacagtgaagaactctcggcaggcgagtccatcaccaagagtcagccggtgaagtccgtgtcaacgggcatgaaatcccactcaaccaaaagtcctgccagaacccaatcccctggcaaatgtggtaaaaatggcgataaggacccagatctgaaggaaccgagcaaccgacttccaaaggtgtacaagtggagcttccagatgtccgatctggaaaatatgacctccgcggagcgcattacgatcctgcaggaaaaactgcaggaaatccggaaacattatctgagtcttaaatccgaagtggcgagcatcgaccgccgccgcaagagactgaagaagaaggagcgcgaatctgctgccacaagctcatcaagcagtagcccctctagctcctccattactgcagcggttatgctgacactggccgaacccagtatgtcatccgcctcccagaacgggatgtcggtggaatgccgttag

SEQ ID NO: 221604 - DNA, 3681 bp, Artificial Sequence
  derived and/or modified sequence
atgaaggccctagatgaacccccatatctcacagtggggactgatgtgtccgccaagtacagaggggcattttgtgaggctaagattaaaacggctaaaagactcgtaaaggtaaaggtcacttttagacacgatagttctaccgtggaagtacaggacgaccacattaaggggccattgaaagtgggcgcaatcgtggaagtcaaaaatctggatggggcttaccaggaagccgtgatcaataagctgactgacgcctcatggtacacagtagtatttgacgatggcgatgaaaaaaccctgagacggtcctcactgtgcctgaagggagagagacactttgctgagtctgagacgctcgatcaacttccattaactaatccagagcattttggtacccctgtcattggcaaaaagacaaatcgcggacggagatccaatcacatacccgaggaggaatcctccagtagctcgagcgacgaagacgaggacgatagaaaacagattgatgagctgctggggaaagtggtgtgtgtggattatatctcactggacaaaaaaaaggccctgtggtttcctgcgctcgtcgtgtgtcccgattgcagcgatgaaattgccgttaagaaagacaacatcttggtgcgctccttcaaagacggcaagtttacatccgttcctcgaaaggacgtgcatgaaatcaccagcgacaccgctccgaagccggacgccgtcttaaaacaagccttcgaacaggcattggaatttcataaatcccgcaccatccctgccaattggaagactgaactaaaggaggatagcagtagctctgaagcagaggaggaagaggaggaggaggacgatgaaaaggagaaagaagacaattcctctgaagaggaggaggagattgagccatttccggaagaacgcgagaactttttacagcagctatataagtttatggaagatagagggaccccaattaataaaagaccagttctcggataccgcaacctgaacctgttcaagcttttccgcctggtccataagcttgggggtttcgacaatatcgaatccggggctgtctggaagcaggtctaccaggacctggggattcctgtgctgaacagtgcagctggatacaacgtaaagtgcgcgtataagaaatacctctatggctttgaggaatattgcagaagcgctaatatagaatttcagatggcccttccagagaaggtcgttaacaaacagtgcaaggaatgtgagaatgtgaaggaaatcaaggtgaaggaggaaaacgagaccgagataaaggagataaagatggaagaggaaagaaatattataccaagagaagagaagccaattgaagatgaaatcgagcggaaagagaatatcaagcctagtcttggctcaaaaaagaacttattggagagtatcccaacgcattctgaccaggagaaggaggtcaacataaagaaacctgaggacaatgagaatctcgatgacaaggatgacgacacgacacgcgtcgacgaaagtctgaacataaaagtggaggctgaggaggaaaaggccaaatcgggatacgatgagtggatcaaagcggataagattgtacggccagccgataagaacgtacctaaaatcaaacaccggaagaaaattaaaaacaagctggacaaagaaaaagataaagacgagaagtactccccaaagaattgcaagctccgcaggctatctaagccaccatttcagaccaacccatctccagagatggtgagcaagctggacttgacagatgcgaagaactccgatactgcgcacatcaaaagtatcgaaataacgagtatcctcaacggtcttcaggctagtgagtcaagcgccgaagacagcgagcaggaagacgagaggggtgcccaagacatggacaacaacggcaaggaggagtcaaagatcgaccaccttacaaataaccgcaatgatctgataagtaaagaagaacagaactccagcagcctgcttgaggaaaacaaagtgcatgccgatctggtgattagcaaaccagtgagcaagtcccctgagaggctccggaaagatattgaagtgctctcagaagacaccgactacgaagaggatgaggtcaccaagaagagaaaggacgttaaaaaagatactaccgacaagagttccaaaccccagataaagcgtggtaaacgtcgctactgtaatacggaggagtgtcttaaaacaggtagcccaggcaagaaagaagaaaaagctaagaataaagagtctctgtgtatggagaactccagtaacagttctagtgacgaagatgaggaggagaccaaggcaaaaatgacacccaccaaaaaatacaacggactagaggaaaagaggaagtctttaagaaccactggtttttatagcggtttttcggaagttgctgaaaaacgtattaaacttctgaacaattccgacgaacgcctgcaaaattctagagccaaggaccggaaggatgtctggtcatccatacagggccaatggccgaagaaaacgctcaaagaattgttctctgatagcgatactgaggccgctgcttcacctccccaccccgcacccgaggagggagtagctgaggagagtttgcagacagtcgccgaggaagaatcttgtagtccgtcggtggagcttgaaaagcccccacctgtgaacgtcgactctaagccgatagaagagaagaccgtcgaagtcaacgacaggaaagccgagtttccctcatcaggttcgaatagcgtcctgaacactcctccgactacacctgagagcccctcgtctgtgactgttactgaaggatcacgacagcagtcgagcgtcactgtatcagaacctctggcccctaaccaagaggaggtgagatcgattaaaagtgaaacagattcaaccatcgaggtcgatagcgtcgccggagagctgcaggacctacagagcgaaggaaacagtagccccgcaggtttcgacgccagcgttagctcttcaagcagtaaccagcctgagcccgagcaccccgaaaaggcctgcactggccaaaagcgcgttaaagatgcccaggggggaggaagtagtagtaaaaagcagaaaaggagccacaaggcgaccgtggtaaataataagaagaaggggaaaggcaccaatagctccgacagcgaggagctgtctgctggagagagtataaccaaatctcagccagtgaagtctgtgtcaaccggcatgaagtctcatagcaccaagagtcccgctcgtactcaatccccaggaaagtgtggcaagaatggggacaaagatcccgatctgaaggagccgtctaatcgcctacccaaggtgtataaatggtcttttcagatgtcagatctggagaacatgacctcagccgaaaggataaccatcctgcaagagaaattacaggagattcgcaagcactacttgtcactgaagtcagaagttgcatccattgatcgtagacgcaagcggctgaagaaaaaggaaagagagtccgcagctacctcctcatcatcttcctctccttcaagttctagcatcacagccgcagtgatgctgaccttggctgagccttctatgtcttccgcaagccagaacggcatgtctgtcgaatgccgttag

SEQ ID NO: 221605 - DNA, 5811 bp, Artificial Sequence
  derived and/or modified sequence
agaaagggggggaacctagagtcggtgggggggaagcgatgtttgcccgtcagtcgagtccggagtgaggagctcggtcgccgaagcggagggagactcttgagcttcatcttgccgccgccacggccaccgcctggacctttgcccggagggagctgcagagggtccatcgccgccgtcctctggagggcagcgcgattgggggcccggacctccagtccgggggggatttttcgtcgtccccctccccccaaccagggagcccgagcggccgccaaacaaaggtaccagtcgccgccgcgggaggaggaggagccggagcctctgcctcagcagccgctggacccgccgcccttcttccccatctctcccccgggcctgctggttttgggggggagaaggagagaggggactctggacgtgccagggtcagatctcgcctccgaggaaggtgcagctgaacctggtgttttagaggataccttggtcccagagtcatcatgaaggcccttgatgagcctccctatttgacagtgggcactgatgtgagtgctaaatacagaggagccttttgtgaagccaagatcaagacagcaaaaagacttgtcaaagtcaaggtgacatttagacatgattcttcaacagtggaagttcaggatgaccacataaagggcccactaaaggtaggagctattgtggaagtgaagaatcttgatggtgcatatcaggaagctgttatcaataaactaacagatgcgagttggtacactgtagtttttgatgacggagatgagaagacactgagacgatcttcactgtgcctgaaaggagagaggcattttgctgaaagtgaaacattagaccagctcccactcaccaaccctgagcattttggcactccagtcataggaaagaaaacaaatagaggaagaagatctaatcatataccagaggaagagtcttcatcatcctccagtgatgaagatgaggatgataggaaacagattgatgagctactaggcaaagttgtatgtgtagattacattagtttggataaaaagaaagcactgtggtttcctgcattggtggtttgtcctgattgtagtgatgagattgctgtaaaaaaggacaatattcttgttcgatctttcaaagatggaaaatttacttcagttccaagaaaagatgtccatgaaattactagtgacactgcaccaaagcctgatgctgttttaaagcaagcctttgaacaggcacttgaatttcacaaaagtagaactattcctgctaactggaagactgaattgaaagaagatagctctagcagtgaagcagaggaagaagaggaggaggaagatgatgaaaaagaaaaggaggataatagcagtgaagaagaagaagaaatagaaccatttccagaagaaagggagaactttcttcagcaattgtacaaatttatggaagatagaggtacacctattaacaaacgacctgtacttggatatcgaaatttgaatctctttaagttattcagacttgtacacaaacttggaggatttgataatattgaaagtggagctgtttggaaacaagtctaccaagatcttggaatccctgtcttaaattcagctgcaggatacaatgttaaatgtgcttataaaaaatacttatatggttttgaggagtactgtagatcagccaacattgaatttcagatggcattgccagagaaagttgttaacaagcaatgtaaggagtgtgaaaatgtaaaagaaataaaagttaaggaggaaaatgaaacagagatcaaagaaataaagatggaggaggagaggaatataataccaagagaagaaaagcctattgaggatgaaattgaaagaaaagaaaatattaagccctctctgggaagtaaaaagaatttattagaatctatacctacacattctgatcaggaaaaagaagttaacattaaaaaaccagaagacaatgaaaatctggatgacaaagatgatgacacaactagggtagatgaatccctcaacataaaggtagaagctgaggaagaaaaagcaaaatctggatacgatgaatggattaaagcagataaaatagtaagacctgctgataaaaatgtgccaaagataaaacatcggaagaaaataaagaataaattagacaaagaaaaagacaaagatgaaaaatactctccaaaaaactgtaaacttcggcgcttgtccaaaccaccatttcagacaaatccatctcctgaaatggtatccaaactggatctcactgatgccaaaaactctgatactgctcatattaagtccatagaaattacttcgatccttaatggacttcaagcttctgaaagttctgctgaagacagtgagcaggaagatgagagaggtgctcaagacatggataataatggcaaagaggaatctaagattgatcatttgaccaacaacagaaatgatcttatttcaaaggaggaacagaacagttcatctttgctagaagaaaacaaagttcatgcagatttggtaatatccaaaccagtgtcaaaatctccagaaagattaaggaaagatatagaagtattatccgaagatactgattatgaagaagatgaagtcacaaaaaagagaaaggatgtcaagaaggacacaacagataaatcttcaaaaccacaaataaaacgtggtaaaagaaggtattgcaatacagaagagtgtctaaaaactggatcacctggcaaaaaggaagagaaggccaagaacaaagaatcactttgcatggaaaacagtagcaacagctcttcagatgaagatgaagaagaaacaaaagcaaagatgacaccaactaagaaatacaatggtttggaggaaaaaagaaaatctctacggacaactggtttctattcaggattttcagaagtggcagaaaaaaggattaaacttttaaataactctgatgaaagacttcaaaacagcagggccaaagatcgaaaagatgtctggtcaagtattcagggacagtggcctaaaaaaacgctgaaagagcttttttcagactctgatactgaggctgcagcttccccaccgcatcctgccccagaggagggggtggcagaggagtcactgcagactgtggctgaagaggagagttgttcacccagtgtagaactagaaaaaccacctccagtcaatgtcgatagtaaacccattgaagaaaaaacagtagaggtcaatgacagaaaagcagaatttccaagtagtggcagtaattcagtgctaaatacccctcctactacacctgaatcgccttcatcagtcactgtaacagaaggcagccggcagcagtcttctgtaacagtatcagaaccactggctccaaaccaagaagaggttcgaagtatcaagagtgaaactgatagcacaattgaggtggatagtgttgctggggagctccaagacctccagtctgaagggaatagctcgccagcaggttttgatgccagtgtgagctcaagcagtagtaatcagccagaaccagaacatcctgaaaaagcctgtacaggtcagaaaagagtgaaagatgctcagggaggaggaagttcatcaaaaaagcagaaaagaagccataaagcaacagtggtaaacaacaaaaagaagggaaaaggcacaaatagtagtgatagtgaagaactttcagctggtgaaagtataactaagagtcagccagtcaaatcagtttccactggaatgaagtctcatagtaccaaatctcccgcaaggacgcagtctccaggaaaatgtggaaagaatggtgataaggatcctgatctcaaggaacccagtaatcgattacccaaagtttacaaatggagttttcagatgtcggacctggaaaatatgacaagtgccgaacgcatcacaattcttcaagaaaaacttcaagaaatcagaaaacattatctgtcattaaaatctgaagtagcttccattgatcggaggagaaagcgtttaaagaagaaagagagagaaagtgctgctacatcctcatcctcctcttcaccttcatccagttccataacagctgctgttatgttaactttagctgaaccgtcaatgtccagcgcatcacaaaatggaatgtcagttgagtgcaggtgacagcaggacttgctaaagcactttgcacttaatggctgttgagggccactttttttttatactgcacagtggcacaaaaaaatatcagacaagcactattttatatttaaaaattgtttcttgacaagctgacttggcacttaagtgcacttttttatgaagaaaaagtacaatgaactgcttttcctcaagcaataattgtttccaacttgtctgggaattgtgtgtctggtaactggaaggccttccactgtggcaaatggaggcttttcactgcctgtagagacaatacagtaagcatagttaaggggtgggtcagaacatgttaagataacttactgtatatgtattcccttgtattttgttaaagctggaacatttgatatttttccatttatttatgaaaaaatatgaacctattttcatttgtacaaggtaattgttttttaaagcaagtcaccttagggtggctttaattgtataagtcaagcacatgtaataaattcaaaacctgcagttaacaggatattagacatcaatcctggtaaccaaatattaaagattctctttaaaaaagactgaacatgtttacaggtttgaattaggctaaaaggtcttgcagtggcttttcatggcccttcaaattggaatggaactactgtactttgccatttttctataaatcagtatttttttttaattttgatatacattgtgtgaaaaaagaaaatggctaataaactgtattaaatcttaaacaatgtataaagattgtacttagccagttcaaagtgtatatttattcataatgaattataacagttatatttttgtgttttcttgtaaatgtttcttttcccttaaatacagataattcatttgtattgcttattttattatgagctacaacaaaaggacttcaggaacaagtaatgtattagtatggttcaagattgttgataggaactgtctcaaaaggatggtggttattttaaatataaatagctaatgggggtggtaggcctataaaattaaatgccttgtataaaatccaaaatgaatgcaaaattgttttcacttgtattgactttatgttgtatgattccaatctctgttctgtttggcacttgtatttaattcttcacctttgtaagacatttgtatattgtggatgtgttcattcaagctatttaatatctggcactgttaatacacagtactttattgtacagactgttttactgttttaattgtagttctgtgtactttttttggatggggctggcatgttttctttgtttcctggcaatacgacgtgggaatttcaatgcgttttgttgtagatgctaacgtgtcagaatcctttacattcaacttttctaagaaaagcattttcagtcttgtagtgtgtgcttacagtaactaattttgttgaaaatggtttcaagttattcaaatttgtacaggactgtaaagatttgttgacagcaaaatgttgaagaaaaaagcttatagaataaaagctataaagtatatattaggatctgcaaacaatgaagaattatgtaatatattgtacaaatgtaagcaaaggctctgaaataaaatgccatagtttgtgaatccttga

SEQ ID NO: 221606 - DNA, 3681 bp, Artificial Sequence
  derived and/or modified sequence
atgaaggccctggacgagcccccctacctgaccgtgggcaccgacgtgagcgccaagtacagaggcgccttctgcgaggccaagatcaagaccgccaagagactggtgaaggtgaaggtgaccttcagacacgacagcagcaccgtggaggtgcaggacgaccacatcaagggccccctgaaggtgggcgccatcgtggaggtgaagaacctggacggcgcctaccaggaggccgtgatcaacaagctgaccgacgccagctggtacaccgtggtgttcgacgacggcgacgagaagaccctgagaagaagcagcctgtgcctgaagggcgagagacacttcgccgagagcgagaccctggaccagctgcccctgaccaaccccgagcacttcggcacccccgtgatcggcaagaagaccaacagaggcagaagaagcaaccacatccccgaggaggagagcagcagcagcagcagcgacgaggacgaggacgacagaaagcagatcgacgagctgctgggcaaggtggtgtgcgtggactacatcagcctggacaagaagaaggccctgtggttccccgccctggtggtgtgccccgactgcagcgacgagatcgccgtgaagaaggacaacatcctggtgagaagcttcaaggacggcaagttcaccagcgtgcccagaaaggacgtgcacgagatcaccagcgacaccgcccccaagcccgacgccgtgctgaagcaggccttcgagcaggccctggagttccacaagagcagaaccatccccgccaactggaagaccgagctgaaggaggacagcagcagcagcgaggccgaggaggaggaggaggaggaggacgacgagaaggagaaggaggacaacagcagcgaggaggaggaggagatcgagcccttccccgaggagagagagaacttcctgcagcagctgtacaagttcatggaggacagaggcacccccatcaacaagagacccgtgctgggctacagaaacctgaacctgttcaagctgttcagactggtgcacaagctgggcggcttcgacaacatcgagagcggcgccgtgtggaagcaggtgtaccaggacctgggcatccccgtgctgaacagcgccgccggctacaacgtgaagtgcgcctacaagaagtacctgtacggcttcgaggagtactgcagaagcgccaacatcgagttccagatggccctgcccgagaaggtggtgaacaagcagtgcaaggagtgcgagaacgtgaaggagatcaaggtgaaggaggagaacgagaccgagatcaaggagatcaagatggaggaggagagaaacatcatccccagagaggagaagcccatcgaggacgagatcgagagaaaggagaacatcaagcccagcctgggcagcaagaagaacctgctggagagcatccccacccacagcgaccaggagaaggaggtgaacatcaagaagcccgaggacaacgagaacctggacgacaaggacgacgacaccaccagagtggacgagagcctgaacatcaaggtggaggccgaggaggagaaggccaagagcggctacgacgagtggatcaaggccgacaagatcgtgagacccgccgacaagaacgtgcccaagatcaagcacagaaagaagatcaagaacaagctggacaaggagaaggacaaggacgagaagtacagccccaagaactgcaagctgagaagactgagcaagccccccttccagaccaaccccagccccgagatggtgagcaagctggacctgaccgacgccaagaacagcgacaccgcccacatcaagagcatcgagatcaccagcatcctgaacggcctgcaggccagcgagagcagcgccgaggacagcgagcaggaggacgagagaggcgcccaggacatggacaacaacggcaaggaggagagcaagatcgaccacctgaccaacaacagaaacgacctgatcagcaaggaggagcagaacagcagcagcctgctggaggagaacaaggtgcacgccgacctggtgatcagcaagcccgtgagcaagagccccgagagactgagaaaggacatcgaggtgctgagcgaggacaccgactacgaggaggacgaggtgaccaagaagagaaaggacgtgaagaaggacaccaccgacaagagcagcaagccccagatcaagagaggcaagagaagatactgcaacaccgaggagtgcctgaagaccggcagccccggcaagaaggaggagaaggccaagaacaaggagagcctgtgcatggagaacagcagcaacagcagcagcgacgaggacgaggaggagaccaaggccaagatgacccccaccaagaagtacaacggcctggaggagaagagaaagagcctgagaaccaccggcttctacagcggcttcagcgaggtggccgagaagagaatcaagctgctgaacaacagcgacgagagactgcagaacagcagagccaaggacagaaaggacgtgtggagcagcatccagggccagtggcccaagaagaccctgaaggagctgttcagcgacagcgacaccgaggccgccgccagccccccccaccccgcccccgaggagggcgtggccgaggagagcctgcagaccgtggccgaggaggagagctgcagccccagcgtggagctggagaagcccccccccgtgaacgtggacagcaagcccatcgaggagaagaccgtggaggtgaacgacagaaaggccgagttccccagcagcggcagcaacagcgtgctgaacaccccccccaccacccccgagagccccagcagcgtgaccgtgaccgagggcagcagacagcagagcagcgtgaccgtgagcgagcccctggcccccaaccaggaggaggtgagaagcatcaagagcgagaccgacagcaccatcgaggtggacagcgtggccggcgagctgcaggacctgcagagcgagggcaacagcagccccgccggcttcgacgccagcgtgagcagcagcagcagcaaccagcccgagcccgagcaccccgagaaggcctgcaccggccagaagagagtgaaggacgcccagggcggcggcagcagcagcaagaagcagaagagaagccacaaggccaccgtggtgaacaacaagaagaagggcaagggcaccaacagcagcgacagcgaggagctgagcgccggcgagagcatcaccaagagccagcccgtgaagagcgtgagcaccggcatgaagagccacagcaccaagagccccgccagaacccagagccccggcaagtgcggcaagaacggcgacaaggaccccgacctgaaggagcccagcaacagactgcccaaggtgtacaagtggagcttccagatgagcgacctggagaacatgaccagcgccgagagaatcaccatcctgcaggagaagctgcaggagatcagaaagcactacctgagcctgaagagcgaggtggccagcatcgacagaagaagaaagagactgaagaagaaggagagagagagcgccgccaccagcagcagcagcagcagccccagcagcagcagcatcaccgccgccgtgatgctgaccctggccgagcccagcatgagcagcgccagccagaacggcatgagcgtggagtgcagatag

SEQ ID NO: 221607 - protein, 420 aa, Artificial Sequence
  derived and/or modified sequence
MEVPPRLSHVPPPLFPSAPATLASRSLSHWRPRPPRQLAPLLPSLAPSSARQGARRAQRHVTAQQPSRLAGGAAIKGGRRRRPDLFRRHFKSSSIQRSAAAAAATRTARQHPPADSSVTMEDMNEYSNIEEFAEGSKINASKNQQDDGKMFIGGLSWDTSKKDLTEYLSRFGEVVDCTIKTDPVTGRSRGFGFVLFKDAASVDKVLELKEHKLDGKLIDPKRAKALKGKEPPKKVFVGGLSPDTSEEQIKEYFGAFGEIENIELPMDTKTNERRGFCFITYTDEEPVKKLLESRYHQIGSGKCEIKVAQPKEVYRQQQQQQKGGRGAAAGGRGGTRGRGRGQGQNWNQGFNNYYDQGYGNYNSAYGGDQNYSGYGGYDYTGYNYGNYGYGQGYADYSGQQSTYGKASRGGGNHQNNYQPY

SEQ ID NO: 221608 - protein, 98 aa, Artificial Sequence
  derived and/or modified sequence
MGLIYKCLPEKVTVNIETRCLPGVFQGSQHQWDQWVSPRWLHLLPPLSALAGCPTSARAATLWGSPGPPQMGPHCRTLSKGGAQSLPRQARPRACGSW

SEQ ID NO: 221609 - DNA, 1263 bp, Artificial Sequence
  derived and/or modified sequence
atggaagtgcccccccggctcagccatgtgcctccacctttatttccatccgcccctgcgaccttagcttctcgaagcttgtcccactggagaccaaggccaccgcgccagctcgcacccctccttccgtctcttgcacccagcagcgcgcgccagggtgctcgccgcgctcagaggcatgtaacggcgcagcagccctctcgactggcggggggcgcagctatcaagggaggtcgccggaggcgtcctgacctcttccgacggcatttcaagagcagcagcatacagcgctcagctgctgctgctgctgctactcgcacagcgagacagcacccgccagctgactcttcagtgactatggaggacatgaatgaatacagtaatatcgaggaattcgcagaaggttccaaaataaatgccagcaaaaatcaacaggatgatgggaaaatgttcataggcggtttgtcatgggacacctccaaaaaggacttgaccgagtatttgtcccgcttcggcgaggtcgtggactgcacaataaagaccgacccagttactggacgctctagaggttttggctttgtgctctttaaggatgcagcctccgtcgataaagtcctggagcttaaggaacacaaattggacggcaagctgatcgatccaaagcgcgcaaaagcgctgaagggcaaagagccccctaaaaaagtgtttgtgggaggactgtcacctgatacctctgaggaacagattaaggaatattttggagcctttggagagatcgagaacatcgaactgcccatggacacaaaaactaacgagcgtcgcggcttctgttttataacctatacagatgaggaacctgtaaagaaactacttgagagtaggtatcaccagattggcagtgggaagtgtgagattaaggttgcccagccgaaggaggtctacagacaacagcagcagcagcagaaaggggggcgcggggctgccgcaggtgggcgaggcggcaccagaggtcgcggcagagggcaggggcagaactggaaccagggttttaacaactactatgatcaggggtacgggaactataactctgcctatgggggggatcagaactatagcggttacggcggatatgattacactgggtataactacggaaattatggatatgggcagggctacgctgactacagtgggcagcagagcacctacggcaaggccagccgagggggtgggaatcatcagaacaactatcagccatattag

SEQ ID NO: 221610 - DNA, 1263 bp, Artificial Sequence
  derived and/or modified sequence
atggaggtcccccctcgactctcccacgtgcctcctcctctgtttccctcagctcctgcaaccctggcatctagaagtcttagtcactggaggcccagacctccccgacaactggctcccctactccccagcttggcgccctcttctgcccgacagggcgccaggagagcccaacgtcacgtgactgcgcaacaaccgagtcggcttgccggaggagccgctataaaagggggaagacgcagaaggcctgacctgttccgaaggcactttaagtcctcttccatccagcgatcagctgccgcagcggctgctacgcgaactgctcgacagcaccctccagcggactcctctgtgacaatggaagacatgaacgaatacagcaatatcgaagagttcgccgagggatcaaagatcaacgcctctaagaatcagcaggatgacggaaagatgttcatcggaggactgtcatgggatacgagtaagaaagatctcaccgaatacctgagccgctttggagaagtggttgactgcacaataaagaccgatcctgtaaccggcaggtcccgcgggttcgggttcgtgttgttcaaggatgccgcttccgtcgacaaagtgctggagctgaaggaacacaagttagacggcaagcttatcgatcctaagagagccaaggccctgaaagggaaggagccaccaaaaaaggtatttgtgggcggactgtctcctgacacttctgaggaacaaattaaagaatactttggggccttcggagagatagaaaacattgagctccctatggatacgaagacaaacgaacgccggggcttttgtttcattacatacacggatgaggaacccgtgaaaaaacttctggaatcccgataccaccagataggcagtggaaagtgcgaaattaaagtcgctcagccgaaggaagtatataggcagcaacagcaacagcaaaaaggcggacgcggtgctgcagcaggcggcagagggggcacccgtggaagaggtagaggccaaggacagaattggaatcaagggttcaacaattattacgaccagggatatgggaattacaatagcgcctatggcggggatcagaactactcggggtacggtgggtacgattacaccgggtataattatggcaactacggttacggccagggttacgcagactattctggtcagcaatcaacatacggtaaagcaagcagaggcggggggaaccatcaaaataactatcagccttattag

SEQ ID NO: 221611 - DNA, 3781 bp, Artificial Sequence
  derived and/or modified sequence
ccggacgccagagacaaaggctcccaaggcaagagggactgtggccctgcgtcggctctgctcgggactgctgaccccaggaatttacgccccttcgtttttctcttctgattcttctcttctcccaagcccgcgtcccctcacgcgtggcctctctccttgccgggagggccgcgatggaggtcccgcccaggctttcccatgtgccgccgccattgttcccctccgctcccgctactttagcctcccgcagcctctcccattggcggccgcggccgccgcggcagctagccccgctcctcccttcgctcgctcccagctccgcccggcagggggcgcgccgggcccagcgccacgtcaccgcccagcagccctcccgattggcgggcggggcggctataaagggagggcgcaggcggcgcccggatctcttccgccgccattttaaatccagctccatacaacgctccgccgccgctgctgccgcgacccggactgcgcgccagcacccccctgccgacagctccgtcactatggaggatatgaacgagtacagcaatatagaggaattcgcagagggatccaagatcaacgcgagcaagaatcagcaggatgacggtaaaatgtttattggaggcttgagctgggatacaagcaaaaaagatctgacagagtacttgtctcgatttggggaagttgtagactgcacaattaaaacagatccagtcactgggagatcaagaggatttggatttgtgcttttcaaagatgctgctagtgttgataaggttttggaactgaaagaacacaaactggatggcaaattgatagatcccaaaagggccaaagctttaaaagggaaagaacctcccaaaaaggtttttgtgggtggattgagcccggatacttctgaagaacaaattaaagaatattttggagcctttggagagattgaaaatattgaacttcccatggatacaaaaacaaatgaaagaagaggattttgttttatcacatatactgatgaagagccagtaaaaaaattgttagaaagcagataccatcaaattggttctgggaagtgtgaaatcaaagttgcacaacccaaagaggtatataggcagcaacagcaacaacaaaaaggtggaagaggtgctgcagctggtggacgaggtggtacgaggggtcgtggccgaggtcagggccaaaactggaaccaaggatttaataactattatgatcaaggatatggaaattacaatagtgcctatggtggtgatcaaaactatagtggctatggcggatatgattatactgggtataactatgggaactatggatatggacagggatatgcagactacagtggccaacagagcacttatggcaaggcatctcgagggggtggcaatcaccaaaacaattaccagccatactaaaggagaacattggagaaaacaggaggagatgttaaagtaacccatcttgcaggacgacattgaagattggtcttctgttgatctaagatgattattttgtaaaagactttctagtgtacaagacaccattgtgtccaactgtatatagctgccaattagttttctttgtttttactttgtcctttgctatctgtgttatgactcaatgtggatttgtttatacacattttatttgtatcatttcatgttaaacctcaaataaatgcttccttatgtgattgcttttctgcgtcaggtactacatagctctgtaaaaaatgtaatttaaaataagcaataattaaggcacagttgattttgtagagtattggtccatacagagaaactgtggtcctttataaatagccagccagcgtcaccctcttctccaatttgtaggtgtattttatgctcttaaggcttcatcttctccctgtaactgagatttctaccacacctttgaacaatgttctttcccttctggttatctgaagactgtcctgaaaggaagacataagtgttgtgattagtagaagctttctagtagaccatatttcttctggattgtaataaaattgttagtagctccttttactttgttcctgtctctggaaagccatttttgaattgctgattactttggctttaatcagtggtcacctagaaaaagctttgtaatcataacacaatgagtaattcttgataaaagttcagatacaaaaggagcactgtaaaactggtaggagctatggtttaagagcattggaagtagttacaactcaaggattttggtagaaaggtatgagtttggtcgaaaaattaaaatagtggcaaaataagatttagttgtgttttctcagagccgccacaagattgaacaaaatgttttctgtttgggcatcctgaggaagttgtattagctgttaatgctctgtgagtttagaaaaagtcttgatagtaaatctagtttttgacacagtgcatgaactaagtagttaaatatttacatattcagaaaggaatagtggaaaaggtatcttggttatgacaaagtcattacaaatgtgactaagtcattacaaatgtgactgagtcattacagtggaccctctgggtgcattgaaaagaatccgttttatatccaggtttcagaggacctggaataataaaaagctttggattttgcattcagtgtagttggattttgggaccttggcctcagtgttatttactgggattggcatacgtgttcacaggcagagtagttgatctcacacaacgggtgatctcacaaaactggtaagtttcttatgctcatgagccctccctttttttttttaatttggtgcctgcaactttcttaacaatgattctacttcctgggctatcacattataatgctcttggcctcttttttgctgctgttttgctattcttaaacttaggccaagtaccaatgttggctgttagaagggattctgttcattcaacatgcaactttagggaatggaagtaagttcatttttaagttgtgttgtcagtaggtgcggtgtctagggtagtgaatcctgtaagttcaaatttatgattaggtgacgagttgacattgagattgtccttttccctgatcaaaaaatgaataaagcctttttaaacaaaatccaaacttttaatcaagtcttgatatgtatgactgagaaaaaatacactacatctagagatgattgagatgttttgcaaagaattgaagggggagtgagaattggtttttcttgcaggggctttgaactctagatttgggctttgaactctagatttaattcagatttcagggtctatcagttcaccaactgatgcaaatttgaacagatactctaaggctaagtgtcctaggttggatgaactgaagctactatcaagatctcgttcccaaggattaatttagaacaaagtaattggacaagtttattggggaggggatagaaatgaattctaaagtacctataacaaatactctgtgtatgttttttacatcgtatttgccttttacattgtttagaccaaattctgtgtgatgttatcctcgggaagaggatagaaattaattctaaagtacctataacaaatgctcggtttgtatatgtttttatacatcgtatttgccttttgcattgttcagaccaaattctgtgtgatgttatcctaacaaaacaccttagtaatttctttggttaacatgttaatctgtaatctcacttttataagatgaggactattaaaatgagatgtctgttgggatgcta

SEQ ID NO: 221612 - DNA, 2096 bp, Artificial Sequence
  derived and/or modified sequence
ggaagaggcgcccgcgctgcgctgcccggaggagccgtcgcgcgcccgcttcctgttcggctggttcctgccagctcgaggacaaaacacgcgtgcgcgcggcgggcgagcgcgctcgccgcctcagtcgccagcgccgggcgcagtccgcctttttccggagcagactggccgcggtgctagtcggtagcagcggccgccgcagcggctccgcactggcgaaccgagggcagaaaaaggcggggttgacggctttttggtaggagtgggctggaccggacgccagagacaaaggctcccaaggcaagagggactgtggccctgcgtcggctctgctcgggactgctgaccccaggaatttacgccccttcgtttttctcttctgattcttctcttctcccaagcccgcgtcccctcacgcgtggcctctctccttgccgggagggccgcgatggaggtcccgcccaggctttcccatgtgccgccgccattgttcccctccgctcccgctactttagcctcccgcagcctctcccattggcggccgcggccgccgcggcagctagccccgctcctcccttcgctcgctcccagctccgcccggcagggggcgcgccgggcccagcgccacgtcaccgcccagcagccctcccgattggcgggcggggcggctataaagggagggcgcaggcggcgcccggatctcttccgccgccattttaaatccagctccatacaacgctccgccgccgctgctgccgcgacccggactgcgcgccagcacccccctgccgacagctccgtcactatggaggatatgaacgagtacagcaatatagaggaattcgcagagggatccaagatcaacgcgagcaagaatcagcaggatgacggtaaaatgtttattggaggcttgagctgggatacaagcaaaaaagatctgacagagtacttgtctcgatttggggaagttgtagactgcacaattaaaacagatccagtcactgggagatcaagaggatttggatttgtgcttttcaaagatgctgctagtgttgataaggttttggaactgaaagaacacaaactggatggcaaattgatagatcccaaaagggccaaagctttaaaagggaaagaacctcccaaaaaggtttttgtgggtggattgagcccggatacttctgaagaacaaattaaagaatattttggagcctttggagagattgaaaatattgaacttcccatggatacaaaaacaaatgaaagaagaggattttgttttatcacatatactgatgaagagccagtaaaaaaattgttagaaagcagataccatcaaattggttctgggaagtgtgaaatcaaagttgcacaacccaaagaggtatataggcagcaacagcaacaacaaaaaggtggaagaggtgctgcagctggtggacgaggtggtacgaggggtcgtggccgaggtcagggccaaaactggaaccaaggatttaataactattatgatcaaggatatggaaattacaatagtgcctatggtggtgatcaaaactatagtggctatggcggatatgattatactgggtataactatgggaactatggatatggacagggatatgcagactacagtggccaacagagcacttatggcaaggcatctcgagggggtggcaatcaccaaaacaattaccagccatactaaaggagaacattggagaaaacagcgggaacttcattgcaggccgtgtgtcaccctgaccacgtctatctctgggggtcgcacgttgcgggcagagcgcaaggcatacaccagaaaacgctgtcctgtggaggagatgttaaagtaacccatcttgcaggacgacattgaagattggtcttctgttgatctaagatgattattttgtaaaagactttctagtgtacaagacaccattgtgtccaactgtatatagctgccaattagttttctttgtttttactttgtcctttgctatctgtgttatgactcaatgtggatttgtttatacacattttatttgtatcatttcatgttaaacctcaaataaatgcttccttatgtg

SEQ ID NO: 221613 - DNA, 1263 bp, Artificial Sequence
  derived and/or modified sequence
atggaggtgcccccccggctgagccacgtgcccccacccctcttccccagcgccccagccaccctggccagccgcagcctgagccactggaggccccggcccccccggcagctggcccccctgctgcccagcctggcccccagcagcgcccggcagggcgcccggcgggcccagagacatgtgacagcccagcagcccagccggctggccggcggggccgccatcaagggcggcagaagaagaagaccagacctcttcagaagacacttcaagagcagcagcatccagaggtctgctgctgctgctgctgccaccaggacagcccggcagcaccccccagctgacagctctgtgaccatggaggacatgaatgagtacagcaacatcgaggagtttgctgagggcagcaagatcaatgccagcaagaaccagcaggatgatggcaagatgttcatcggcggcctgtcctgggacaccagcaagaaggacctgacagagtacctgagcagatttggagaggtggtggactgcaccatcaagacagatcctgtgacaggccgcagccggggctttggatttgtgctcttcaaggatgctgcctctgtggacaaggtgctggagctgaaggagcacaagctggatggcaagctgattgaccccaagagggccaaggccctgaagggcaaggagccccccaagaaggtgtttgtgggcggcctgagcccagacaccagcgaggagcagatcaaggagtactttggagccttcggggagattgagaacatcgagctgcccatggacaccaagaccaatgaaagaagaggcttctgcttcatcacctacacagatgaggagcctgtgaagaagctgctggagagccgctaccaccagatcggcagcgggaaatgtgagatcaaggtggcccagcccaaggaggtgtaccggcagcagcagcagcagcagaagggcggcagaggagctgctgctgggggccggggcggcacccggggccggggccggggccagggccagaactggaaccagggcttcaacaactactatgaccagggctacggcaactacaacagcgcctatggaggagaccagaactacagcggctacggcggctatgactacacaggctacaactacggcaactacggctacggccagggctacgccgactacagcggccagcagagcacctacggcaaggccagcagaggaggcggcaaccaccagaacaactaccagccctactag

SEQ ID NO: 221614 - DNA, 1263 bp, Artificial Sequence
  derived and/or modified sequence
atggaggtgcccccccggctgagccacgtgcccccccccctgttccccagcgcgccagcaaccctcgccagtcggagcttgtcccattggaggccgcggcctcctagacagcttgcccctctcctcccttctctggcaccttcctctgcccgccaaggggccagaagggctcagagacatgtgacagctcagcagcccagtcgacttgcgggaggggctgctatcaagggcggaaggcgccgccgcccagaccttttccggaggcatttcaagagttcatcaattcaacggagtgccgccgccgcagcagctacgcgcactgcccgccagcatccacctgccgatagttccgtaacaatggaggacatgaatgaatatagcaacatagaggagtttgccgagggatcaaaaatcaatgcttccaaaaatcagcaggacgatggaaaaatgtttatcgggggactctcgtgggatacctccaagaaggatctcaccgagtacttgtctaggtttggcgaagtcgtcgactgcacaatcaaaactgaccctgtcacaggcagaagtcgcggctttggcttcgtcctgttcaaagacgccgcaagcgtggacaaggttctagagttaaaagagcacaaactggacggcaagctgatagatcccaaaagggccaaagcactgaaaggcaaagaacctccaaaaaaagtgtttgtgggtggcctatcgcccgacacaagtgaggagcagatcaaagagtatttcggcgccttcggcgaaatcgaaaatattgagctgccaatggacacaaagaccaacgaaaggagaggcttttgcttcattacgtacacagacgaggagccggtgaaaaaactgctcgaatctcgataccaccagatcggatctggcaaatgtgaaatcaaagtagctcagcctaaagaagtctaccgccagcagcagcaacaacagaaggggggccgcggcgcggcggctggtgggcgcggcgggaccagaggccgaggcagagggcagggacagaactggaatcagggattcaacaattattacgatcagggttacgggaactataactccgcctacggaggtgatcagaactactctgggtatggaggctatgattatacaggctataattatggcaactatggctatggccagggctacgccgactattcgggacaacagtccacttacggcaaagcatccaggggcggcggtaaccaccagaacaactaccagccatattag

SEQ ID NO: 221615 - DNA, 1263 bp, Artificial Sequence
  derived and/or modified sequence
atggaggtgcccccccggctgagccacgtgcccccccccctgttcccaagcgccccagcgactttggcatcgcgaagcctgtctcattggagaccccgacctcctaggcagctggcgccattgctaccctctttggccccttcgagtgccaggcagggtgcccgccgggctcagaggcacgtcacagcacagcagccctccagactcgcggggggagcggccatcaagggtggcagaagacggaggccagacttattccgacggcatttcaagagctcttcgatccagaggtccgcagccgcagccgctgctactcggacagcgaggcaacatccacccgccgactcttctgtgacaatggaagatatgaacgaatactctaacatcgaagaatttgccgagggctctaaaatcaacgcaagtaagaaccagcaggacgacgggaaaatgttcattggagggttgtcctgggatacttccaagaaagatctgactgaatacctctcgcggttcggagaggtggtggactgcacgatcaagaccgatcctgtaactggaaggagcagaggttttgggttcgtgttgttcaaggacgccgcctccgtggataaggttcttgaacttaaggaacataagctggatgggaaactgatcgatcctaagcgtgccaaagcactgaaaggcaaggaaccacccaaaaaggtgtttgtgggcggcctatcccccgacacaagtgaggagcagattaaggaatattttggggcatttggtgaaatcgaaaatatcgaactcccgatggacacaaagacaaatgagcgaagaggattttgcttcatcacctataccgacgaggagcccgtaaagaaactgctggagagcaggtaccaccagattggaagtggtaagtgtgaaatcaaggtggcccagcccaaagaagtgtatagacagcagcagcagcagcagaagggcgggcgcggagcggcggccggcgggcgcggggggacaagaggccgcgggaggggccaagggcagaactggaatcagggtttcaataactactatgaccaggggtatgggaattataattccgcttatgggggggaccagaattatagcggttacgggggttatgactacaccggatacaattatggtaattatgggtatgggcagggatacgccgactattccggccagcagtcgacttatgggaaggcctcacggggaggcggcaaccaccagaacaattaccagccatattag

SEQ ID NO: 221616 - DNA, 1263 bp, Artificial Sequence
  derived and/or modified sequence
atggaagttccccctcggctatctcatgtgcccccaccactctttccatcagccccagctaccctggcaagccggagcctctcccattggcgtccacggccaccacggcaattggctccacttctgcccagtctggcccctagcagcgctcgtcagggggctcgaagggcccagcggcatgtaaccgcccagcaaccatcgagactcgccggaggagcagctattaaaggagggcgtaggcgcaggccagacttattcaggaggcactttaagagttcaagcatccaacgttctgccgcagctgcagcagcaacaagaaccgcgaggcagcacccaccagccgactcttccgtgactatggaagatatgaatgaatacagcaatatagaagagtttgctgaggggagtaagataaacgcgagcaagaatcaacaggacgacggaaagatgtttattgggggactgtcttgggacacttcgaagaaagaccttaccgaatatctcagtcgcttcggcgaggtagtggattgtacaattaagaccgacccggtgaccggccgttctcgaggctttggatttgtgctgttcaaagatgccgctagcgttgataaggtccttgagttaaaggaacacaaacttgacgggaagttgattgaccccaagagggccaaggccttaaagggcaaggagccccctaagaaagtgtttgttggagggttgtcaccagatacctctgaagagcagattaaggaatatttcggcgcttttggtgagatcgagaacatagaattaccgatggataccaagaccaatgagagaaggggattctgcttcattacatacactgacgaagagcctgtgaagaaactcttagagtctcggtaccaccagataggatccggcaaatgtgagatcaaagtcgcccagccaaaagaggtctaccgccagcagcagcaacaacaaaagggcggacggggtgcagccgcaggcggaaggggaggcacacgcggacgaggaagaggacaaggccaaaactggaaccagggctttaataactactacgatcaggggtacgggaattacaattcagcttatggaggggaccagaattacagcggatatgggggatacgactacacagggtataattatggaaactacggatacggccagggctacgctgattacagcgggcagcaaagcacgtacggcaaggcctcccgcggaggaggtaaccatcagaacaactaccagccctattag

SEQ ID NO: 221617 - DNA, 1263 bp, Artificial Sequence
  derived and/or modified sequence
atggaagttccaccacgcttaagccacgtccctccacctctatttccttccgctcccgctaccctggctagcagatccctgagccactggagacctcgacctcctagacagctcgctccccttcttcccagcctggctccctcttcagctaggcagggcgcacgcagagctcagcgtcatgttacggcccagcagccaagccgcctcgcgggaggagcagccattaagggcggtaggagacggagacccgacctgttcaggaggcacttcaaatcgtccagtattcaacggagcgctgccgctgccgctgcaacccgtacagcaaggcagcacccccctgcagatagcagcgtaacgatggaggatatgaacgaatactccaacatagaggagttcgctgagggctctaaaatcaacgcctccaaaaatcagcaggatgacggaaagatgttcatcggagggttgagctgggacacatcaaagaaagatctaacagagtacctgagccgattcggtgaggtggtggattgtactataaaaactgatcctgtcacaggtcggtcaagaggattcggctttgttctgtttaaggatgctgcgagcgtcgacaaagttctggagctgaaggagcataagttggatggtaaattaatcgaccctaaaagggccaaagccctgaagggaaaggaacctccgaaaaaagtgttcgtggggggtctgtcccccgatacatccgaagagcagattaaagagtattttggtgccttcggcgaaattgaaaacatagaattgccaatggacaccaagacgaatgaaaggagaggattttgtttcataacctacactgacgaagaacctgtgaagaaactgttggagagtaggtatcatcagataggctctggaaagtgcgaaattaaggtggcgcagccaaaggaagtgtatcgtcagcaacagcagcagcaaaagggaggccgaggagccgctgccggagggagaggagggacccgaggcagaggcagaggccaagggcagaactggaatcagggatttaataactactatgatcaagggtacggaaattacaacagtgcgtatggaggagaccaaaattattctggttacgggggttacgactacactgggtacaattatggtaattatgggtacgggcagggttatgccgactattctggtcagcagagcacctatggtaaagcgtcccggggtggcggtaaccaccagaacaactatcagccatactag

SEQ ID NO: 221618 - DNA, 1263 bp, Artificial Sequence
  derived and/or modified sequence
atggaggtgccccccagactgagccacgtgcccccccccctgttccccagcgcccccgccaccctggccagcagaagcctgagccactggagacccagaccccccagacagctggcccccctgctgcccagcctggcccccagcagcgccagacagggcgccagaagagcccagagacacgtgaccgcccagcagcccagcagactggccggcggcgccgccatcaagggcggcagaagaagaagacccgacctgttcagaagacacttcaagagcagcagcatccagagaagcgccgccgccgccgccgccaccagaaccgccagacagcacccccccgccgacagcagcgtgaccatggaggacatgaacgagtacagcaacatcgaggagttcgccgagggcagcaagatcaacgccagcaagaaccagcaggacgacggcaagatgttcatcggcggcctgagctgggacaccagcaagaaggacctgaccgagtacctgagcagattcggcgaggtggtggactgcaccatcaagaccgaccccgtgaccggcagaagcagaggcttcggcttcgtgctgttcaaggacgccgccagcgtggacaaggtgctggagctgaaggagcacaagctggacggcaagctgatcgaccccaagagagccaaggccctgaagggcaaggagccccccaagaaggtgttcgtgggcggcctgagccccgacaccagcgaggagcagatcaaggagtacttcggcgccttcggcgagatcgagaacatcgagctgcccatggacaccaagaccaacgagagaagaggcttctgcttcatcacctacaccgacgaggagcccgtgaagaagctgctggagagcagataccaccagatcggcagcggcaagtgcgagatcaaggtggcccagcccaaggaggtgtacagacagcagcagcagcagcagaagggcggcagaggcgccgccgccggcggcagaggcggcaccagaggcagaggcagaggccagggccagaactggaaccagggcttcaacaactactacgaccagggctacggcaactacaacagcgcctacggcggcgaccagaactacagcggctacggcggctacgactacaccggctacaactacggcaactacggctacggccagggctacgccgactacagcggccagcagagcacctacggcaaggccagcagaggcggcggcaaccaccagaacaactaccagccctactag

SEQ ID NO: 221619 - protein, 807 aa, Artificial Sequence
  derived and/or modified sequence
MVFSRRGGLGARDLLLWLLLLAAWEVGSGQLHYSIPEEAKHGTFVGRVAQDLGLELAELVPRLFRVASKTHRDLLEVNLQNGILFVNSRIDREELCQWSAECSIHLELIADRPLQVFHVEVKVKDINDNPPVFRGREQIIFIPESRLLNSRFPIEGAADADIGANALLTYTLSPSDYFSLDVEASDELSKSLWLELRKYLDREETPELHLLLTATDGGKPELQGTVELLITVLDVNDNAPLFDQAVYRVHLLETTANGTLVTTLNASDADEGVNGEVVFSFDSGISRDIQEKFKVDSSSGEIRLIDKLDYEETKSYEIQVKAVDKGSPPMSNHCKVLVKVLDVNDNAPELAVTSLYLPIREDAPLSTVIALITVSDRDSGANGQVTCSLMPHVPFKLVSTFKNYYSLVLDSALDRESLSVYELVVTARDGGSPSLWATARVSVEVADVNDNAPAFAQPEYTVFVKENNPPGCHIFTVSARDADAQENALVSYSLVERRVGERALSNYVSVHAESGKVYALQPLDHEELELLQFQVSARDAGVPPLGSNVTLQVFVLDENDNAPALLAPRVGGTIGAVSELVPRLVGAGHVVAKVRAVDADSGYNAWLSYELQPAAGGARIPFRVGLYTGEISTTRVLDEADLSRYRLLVLVKDHGEPALTATATVLVSLVESGQAPKASSRASVGVAGPEAALVDVNVYLIIAICAVSSLLVLTLLLYTALRCSVPPTEGAYVPGKPTLVCSSALGSWSNSQQRRQRVCSSEGPPKTDLMAFSPGLSPSLNTSERNEQPEANLDLSGNVSPTFEFWL

SEQ ID NO: 221620 - DNA, 2424 bp, Artificial Sequence
  derived and/or modified sequence
atggtattttccaggcggggtgggctgggcgcacgagatctcttactgtggctgcttcttcttgctgcatgggaggttggatccggccaactacactactccatcccagaggaagcgaagcacgggacattcgtgggtcgcgttgcccaagatcttggcctggaattggctgaattggtcccacgactattccgggtggcctcgaagacccaccgcgatctactcgaggttaatctccagaacggcatcctgtttgttaacagtcgaatcgaccgggaggagctgtgccagtggtctgccgaatgcagtatccaccttgagctgatcgctgatagacctttgcaggtgtttcacgtcgaggtaaaagttaaagacataaacgataacccccctgtttttcgaggccgcgagcaaatcatcttcattcccgaaagcagactcctcaattcacgatttcccattgagggcgcggctgacgcagacatcggcgccaacgctctattaacatacaccctctcccccagcgattattttagcctagatgtcgaggcctctgatgaactgagcaagagcctgtggctggaactgagaaaatacttagatcgggaagaaaccccggagcttcacctcctgctgacagccactgatgggggaaaacccgaattacaggggaccgtggagctcttgataactgtgctggatgtgaacgataatgcacctttgtttgatcaagcagtctaccgggtgcacttgctcgagaccaccgcaaatggcaccttggtaacaactctgaatgcttctgatgcggacgagggcgttaacggagaggtcgtcttctctttcgattcaggcatctctagagatatacaggaaaaatttaaagtcgattcgtccagcggcgagatcagactcattgacaaactcgattatgaggagacaaagtcctatgaaattcaagtgaaggccgtcgacaaaggttccccacctatgagcaatcactgcaaagtgctagtcaaggttctcgatgtgaatgacaacgctcctgagctggccgtaacttccctttacctccccatcagggaggatgctcccctctcaaccgtcatcgccctgatcaccgtgtccgatcgagactccggcgccaacggacaggtgacatgtagtctgatgcctcatgtgccgtttaagctggtgagtacatttaagaattattactctctagtgctcgacagcgccctcgatcgcgagtcattaagtgtctacgaacttgtggttacggctagagacggcgggagtccatcgctttgggccactgcacgggtctcggtggaagttgctgacgtcaacgataacgctccagccttcgcacagcctgagtacacagtttttgtaaaggagaacaaccctccgggatgccacatattcaccgtcagcgctcgcgacgctgacgctcaggagaatgccctggtttcttacagcctggtggaaagacgagttggggagcgcgccctgtcgaactacgtgtccgttcacgcagaaagtgggaaggtgtatgctctgcaacctctagaccatgaggagctggaactgctccagtttcaggtatcagcgagagatgctggggttccccccctgggcagtaacgttacactgcaggttttcgttctggatgagaacgataatgctcctgctctgcttgcacccagggtcggaggaacaattggagctgtgtccgagcttgtgcctcgcctcgtgggcgcgggccacgtcgtagctaaggtccgagccgtggatgccgatagcggatataatgcctggctctcatacgagctacagcccgcggcaggtggggctaggatccccttccgcgtgggtctatatactggggagatttccaccacacgcgttctagacgaggcggatctgtctcgctatcgactcttggtactggtgaaggaccacggcgagcctgccttgaccgccacagcaactgtgttggtgagtctggtggaatctggccaagcccccaaagcctcttccagggcttctgtgggggtagccggccccgaagcggcactggttgatgttaacgtgtacctgatcatagccatctgcgcggtctcgtcactcctggtcctcacactcttgctctacactgcactgagatgcagtgtgccccctactgagggtgcgtacgttccaggtaaacccaccctggtttgttcgtctgcacttggctcatggagcaatagccagcagcggcgacaacgcgtgtgcagttctgaaggaccacctaagacagatctgatggccttctcccccggtctaagtcccagcctgaatacttccgaacgtaacgaacaaccggaggctaaccttgatctcagcgggaatgtctctcctactttcgagttttggctatag

SEQ ID NO: 221621 - DNA, 2424 bp, Artificial Sequence
  derived and/or modified sequence
atggtgttcagcagaagaggaggcctgggcgcccgggacctgctgctgtggctgctgctgctggccgcctgggaggtgggcagcggccagctgcactacagcatccctgaggaggccaagcacggcacctttgtgggccgggtggcccaggacctgggcctggagctggccgagctggtgcccaggctcttccgggtggccagcaagacccaccgggacctgctggaggtgaacctgcagaatggcatcctgtttgtgaacagcagaattgaccgggaggagctgtgccagtggagcgcagaatgttccatccacctggagctgattgctgaccggcccctgcaggtgttccacgtggaggtgaaggtgaaggacatcaatgacaacccccctgtgttccggggccgggagcagatcatcttcatccctgagagccggctgctgaacagccgcttccccatcgagggcgctgctgatgctgacatcggggccaatgccctgctgacctacaccctgagccccagcgactacttcagcctggatgtggaggccagtgatgagctgagcaagagcctgtggctggagctgaggaagtacctggaccgggaggagaccccagagctgcacctgctgctgacagccacagatggcggcaagccagagctgcagggcaccgtggagctgctgatcaccgtgctggatgtgaatgacaatgcccccctgtttgaccaggccgtgtacagagtgcacctgctggagaccacagccaacggcaccctggtgaccaccctgaatgccagtgatgctgatgagggcgtgaatggagaggtggtgttctcctttgattctggcatcagccgggacatccaggagaagttcaaggtggacagcagcagtggagagatccggctgattgacaagctggactatgaggagaccaagagctatgagatccaggtgaaggctgtggacaagggcagcccccccatgagcaaccactgcaaggtgctggtgaaggtgctggatgtgaatgacaatgcccctgagctggccgtgaccagcctgtacctgcccatcagagaagatgcccccctgagcacagtgattgccctgatcaccgtgtctgaccgggacagcggggccaacggccaggtgacctgcagcctgatgccccacgtgcccttcaagctggtgtccaccttcaagaactactacagcctggtgctggacagcgccctggaccgggagagcctgtctgtgtatgagctggtggtgacagccagagatggcggcagccccagcctgtgggccacagcccgggtgtctgtggaggtggctgatgtgaatgacaatgccccagcctttgcccagcctgagtacacagtgtttgtgaaggagaacaaccccccaggctgccacatcttcaccgtgtctgccagagatgctgatgcccaggagaatgccctggtgtcctacagcctggtggagaggagagtgggggagcgggccctgagcaactacgtgtctgtgcacgccgagagcggcaaggtgtatgccctgcagcccctggaccacgaggagctggagctgctgcagttccaggtgtctgccagagatgctggggtgccccccctgggcagcaatgtgaccctgcaggtgtttgtgctggatgaaaatgacaatgccccagccctgctggccccccgggtgggcggcaccatcggggctgtgtctgagctggtgccccggctggtgggcgccggccacgtggtggccaaggtgcgggctgtggatgctgacagcggctacaatgcctggctgtcctatgagctgcagcctgctgctggaggagcccgcatccccttccgggtgggcctgtacaccggggagatcagcaccaccagggtgctggatgaggccgacctgagccgctaccgcctgctggtgctggtgaaggaccacggggagcccgccctgacagccacagccaccgtgctggtgtccctggtggagagcggccaggcccccaaggccagcagccgggcctctgtgggcgtggccggccctgaggccgccctggtggatgtgaatgtgtacctgatcatcgccatctgtgctgtgagcagcctgctggtgctgaccctgctgctgtacacagccctgcgctgcagcgtgcccccaacagagggcgcctacgtgcctgggaagcccaccctggtgtgcagcagcgccctgggctcctggagcaacagccagcagaggcggcagagggtgtgcagcagcgagggcccccccaagacagacctgatggccttcagccctggcctgagccccagcctgaacaccagcgagagaaatgagcagcctgaggccaacctggacctgtctggaaatgtgagccccacctttgagttctggctgtag

SEQ ID NO: 221622 - DNA, 2424 bp, Artificial Sequence
  derived and/or modified sequence
atggtgttcagccggcggggcggcctgggcgcccgggacctgctgctgtggctcctccttctggctgcatgggaggttggcagcggtcagctacactacagcattccagaggaggctaaacacgggactttcgtgggtcgcgtcgcccaggacctagggctcgagctggctgaactggtaccccggttgttcagggtggccagcaagactcacagagatctcctggaggtcaacttacaaaacgggatcctttttgtgaacagcagaatcgatcgagaagagttgtgtcagtggagtgccgagtgttccattcacctggagttaatagccgataggcccctgcaggtattccacgtagaggtcaaagtaaaggacatcaacgataacccaccggtgtttagaggccgagagcagattattttcattccagagagccggctgctaaatagtcgtttccccatagaaggggccgctgacgcggatatcggagcaaatgccctccttacatacaccctgtctccttccgactacttttcgctggatgtggaggctagtgatgagctgagtaaatccctgtggcttgagctgagaaagtacttagacagagaagagactccggaactacatttactactgacggccactgacggggggaaaccagagctccaaggcacagtcgaacttctgattacagtgctagatgtgaacgataatgctcccttgttcgatcaagctgtgtaccgggtccatcttttggaaaccactgcaaatggcactcttgtcactactctaaatgcctcggacgcggatgagggtgtcaacggggaagttgtgtttagttttgatagcgggatctcccgggacatacaggaaaagtttaaggttgactcatccagcggggaaatacgactgattgacaagctagactacgaggaaacaaaatcctacgagattcaagtcaaagcagtagacaaggggagccccccaatgtccaatcactgtaaagtgctagtcaaggttttggatgtgaacgataacgcccctgagttagccgtgacctcactgtatctccctatcagagaagacgccccactctcaaccgtgatcgctctgattaccgtttctgaccgggactcaggggccaatggccaggtgacctgctccctgatgccccatgtgcccttcaagctggtctccacttttaagaattactactcactggtgcttgatagtgcactggacagagagtctctcagtgtctacgaactggtggtgaccgcccgcgacggtgggagtccgtccctatgggctaccgccagggtgagtgttgaggttgcagatgtgaatgataacgcccctgcctttgcccagcctgaatatacagtgtttgtcaaagagaacaatcctccgggatgccacatctttacggtgtccgcccgcgacgccgacgcccaggaaaatgcactggtttcatattcgctcgttgagagaagggttggggaaagggctctgagtaactacgtgtctgtgcatgcagagtctggcaaagtgtatgctctgcaaccattggatcacgaggagctagagcttctgcagtttcaggtttctgcgcgcgacgcaggcgtgcctccccttggctcaaatgtgacattacaggtctttgtcctcgatgaaaacgacaacgcccccgcactcctggcgccgagagtgggcggcactataggagcagtgtctgaactagtgccacggctggtgggtgccggacatgtggtggcaaaagtgagagccgtggatgcagatagtggatataatgcttggctgagttatgaactgcagcctgccgccggcggcgctcgcattccctttcgcgttgggctgtatactggcgaaattagcacaaccagggtgcttgatgaagccgacctgagtagataccgcctcctggtgctggtgaaggatcacggagagcccgccctcactgccactgccactgtgctagtgagcctggtagagagcggccaggcgcccaaggcgagcagtcgagctagtgtaggcgtcgctggccccgaggctgctttggttgatgtaaatgtttacctgatcattgcaatctgtgccgtctcgtctcttttagtgcttactttgctgctgtacacagctctccgctgttctgttccccctaccgagggggcctacgtgccaggaaagcctacactggtctgcagctctgcactgggatcttggagcaactctcagcaacggaggcagcgagtttgtagcagtgaggggccaccaaaaaccgacttgatggccttttctccgggattatctccaagtctaaatacttcagagcgcaacgagcagcctgaagcaaacctagatctctccggaaatgtttctccgacctttgagttctggctgtag

SEQ ID NO: 221623 - DNA, 2424 bp, Artificial Sequence
  derived and/or modified sequence
atggtgttttcccgaaggggaggactgggagcacgggacctgctactttggctgctcctcctcgcagcttgggaggtcgggtctgggcaactccactactcgatccccgaagaggccaaacatgggacattcgtgggtagggtcgcacaggacctgggcctcgagctggccgaattagtcccacggttgttccgtgtcgcctctaagacccaccgcgacctcctagaagtgaaccttcagaatggcatcctgtttgtgaattcccgaatcgacagggaggagctgtgccagtggtccgccgagtgcagtatccacctggagcttatcgcagacaggcccctccaggtgtttcacgtggaagtgaaggtgaaggacatcaacgacaacccaccagtcttcagggggcgagagcagatcattttcatccctgagtcccgacttcttaactccagattccccatcgaaggagccgctgacgctgacatcggcgcaaatgcattgctgacctataccctgtccccgagcgattacttttcactggacgtcgaggcgtcagacgagctgtcgaagtcgctctggctcgagcttaggaagtacctagaccgcgaggaaacccccgaactgcacctccttctcacagctacagatggaggcaaacccgaactgcagggcaccgtggaactcctcattaccgtcttggacgtgaatgacaacgcaccactattcgatcaggcggtatacagagttcatctactagagactacagccaacggcaccctggtgacaactctgaacgccagcgacgcggacgagggtgtcaacggcgaggtcgtgtttagcttcgactccggcatttctcgagacatccaagaaaagttcaaggtcgacagctcatctggagagatcaggctgatcgataaactcgattatgaagaaacaaagtcttacgaaattcaggtgaaggctgtggacaagggatcgccaccaatgtctaatcactgtaaggtcctggtgaaagtgctggacgtgaatgacaatgcccctgaactcgcggtgaccagcctgtatctgccgatccgagaggatgcaccactttccaccgtgattgcgctgattacagtctcggatagggattccggggcaaacggccaagtcacgtgcagcttgatgccccacgtccctttcaagctggtgtccactttcaagaattactattccctggtgcttgactccgcactagatagagaaagtttatccgtatacgagctcgtggtgacggccagagacggtggctcaccgtccctgtgggcaactgcaagggtctcagtagaggtggccgatgtgaacgataacgctccagcctttgctcaaccagaatatacagtttttgtgaaggagaataacccccctgggtgccacatcttcacagtgagtgctcgggatgcagacgctcaggagaatgccctggtttcttattccttggttgagcggcgagtgggagaacgggctctgagcaattacgtgagtgtgcacgccgaatccggaaaggtgtatgctctgcaaccgttggaccatgaagagctagagctactgcagtttcaggtctctgccagagacgccggagttccccctctggggagtaatgtaacactacaagtgtttgtattggacgagaacgataatgcaccagcactgttagctcccagggtcggtggcactattggagccgtgtctgaactggtgccaaggctggtgggagcaggccacgtggttgccaaagttagagcagttgatgccgattcaggctacaatgcctggctttcctacgagctgcagccagccgctggaggcgctcggatcccgtttagggtcggactgtacaccggggagatttccacaactagggttttggatgaggctgatctgagccgctatagactcttggttctggtaaaggaccacggcgagcccgctctcacggccactgccactgttcttgtctcgctggtggagtctggccaagcacctaaggcctcctcgagggcctcagtgggtgtagctggcccagaagctgcccttgtggatgtgaatgtctacctaataattgctatatgcgcagtatcttccctgctcgtattaactcttttgctctatacggccttgcgctgctctgtaccacccacagaaggcgcatacgtgcccggaaaaccaacactcgtctgtagctctgcactcggctcctggtccaactcgcagcaacgcaggcagcgagtctgcagctccgagggaccccctaagacagatctcatggctttcagcccgggactatctccgtccttgaacaccagcgaaagaaatgagcagcccgaggccaatctcgacctgtctggtaatgtgtcaccaacgttcgaattctggttgtag

SEQ ID NO: 221624 - DNA, 2571 bp, Artificial Sequence
  derived and/or modified sequence
atggtgttttctaggagagggggcctgggagcccgggatctgcttctttggcttctgctcctcgcagcctgggaggtggggagcggccagctccactactcgatcccggaggaagccaaacacggcaccttcgttggccgcgttgctcaggacctgggactggagctggcggagctggtgcctcgcctgttccgggtggcgtccaaaacacacagggaccttctggaggtaaatctgcagaatggcattttgtttgtgaattctcggatcgatcgcgaggagctgtgccagtggagcgcggagtgcagcatccacctggagttgatcgccgacaggccgctgcaggttttccatgtggaggtgaaggtgaaagacattaacgataatccacccgtcttcaggggcagagaacaaataatatttattcctgaatctagactcctgaattcgcgttttccgatagaaggagctgctgatgcagacattggtgctaacgctcttctaacgtacacgctcagcccgagtgattatttctctttggatgtagaggcaagtgatgaactgagtaaatctctttggcttgaattgagaaaatatttggatagagaagaaacaccagaacttcacttattactgactgccactgatgggggcaaaccggagctgcaaggtacagttgagctgctgatcaccgtcctcgacgttaatgataacgccccactgtttgaccaggccgtatacagagtccacttgttagagactacagcaaatggaacattagtgaccacattaaatgcctctgatgctgacgaaggtgtaaatggtgaagtcgtcttttcctttgacagtggtatttctcgtgacattcaagaaaaattcaaagttgattccagctcaggagaaattaggttaattgataaactggattatgaagaaacaaaatcctacgaaattcaagtaaaggcagttgataaaggaagtcctccgatgtcaaatcactgtaaggttttggtgaaagtgctggatgtaaatgataatgctccagaactggcggtcacttcattgtatttgcctatcagagaggacgctccactcagcaccgtcatcgccctcatcaccgtgtctgaccgtgactcaggtgccaacgggcaggtgacttgctccttaatgccccacgtccccttcaagctggtgtccaccttcaagaattactactcgttggtgttggacagcgccctggatcgcgagagcctgtcggtctatgagctggtggtgaccgcgcgggacgggggctcgccttcgctgtgggccacggccagggtgtccgtggaggtggccgacgtgaatgacaacgcgcctgcgttcgcgcagcccgagtacacagtattcgtgaaggagaacaacccgccgggctgccacatcttcacggtgtctgcgcgggacgcggacgcgcaggagaacgcgctggtgtcctattcgctggtggaacggcgggtgggcgagcgcgcgctgtcgaactacgtgtcagtgcacgcggagagcggcaaggtgtacgcactgcagcccctggaccacgaggagctggagctgctgcagttccaggtgagcgcgcgggatgcgggcgtgccgcctctgggcagcaacgtgacgctgcaggtgttcgtgctggacgagaacgacaacgcgccggcgctgctggcgcctcgagtgggtggcactattggtgcagtcagtgagctggtgccgcgattggtgggtgcgggtcatgtggtggcgaaggtgcgcgcagtggacgccgactcgggctacaacgcgtggctgtcctatgaactgcagccggcagcaggcggcgcgcgcatcccgttccgcgtggggctgtacacgggcgagatcagcacgactcgtgtcctggacgaggctgacttgtcgcgctaccgccttctggtgctagtgaaggatcacggtgagccggcgctgacagccacggccactgtgcttgtatctctggtggagagcggccaggcgccaaaggcgtcttcgcgggcgtcggtgggtgtcgcgggcccagaggcggcgctggtggatgtcaacgtgtacctgatcatcgccatctgcgcggtgtccagcctgctggtgctcacactgctgctgtacacggcgctgcggtgctcagtgccgcccactgagggtgcgtatgtgccgggcaagcccactctggtgtgctccagcgcgttggggagctggtcgaactcacagcagaggcggcagagggtgtgctctagcgagggcccacccaagaccgacctcatggccttcagcccaggcctatctccaagtcttaacacgtcagaaagaaatgaacaaccagaagcaaatttggatctttctggtaatgtaagtccaactttcgagttttggctttaaatatttttcatatttaacttgtctaatcatcttttcaaatatcactttaaaaaatgtcttcaaggtgttcactaacgttgaaataaatcataccattgaatgtagatatcctattaatggcagttttgtcttgaatggaactagaaa

SEQ ID NO: 221625 - DNA, 2424 bp, Artificial Sequence
  derived and/or modified sequence
atggtgttcagcagaagaggcggcctgggcgccagagacctgctgctgtggctgctgctgctggccgcctgggaggtgggcagcggccagctgcactacagcatccccgaggaggccaagcacggcaccttcgtgggcagagtggcccaggacctgggcctggagctggccgagctggtgcccagactgttcagagtggccagcaagacccacagagacctgctggaggtgaacctgcagaacggcatcctgttcgtgaacagcagaatcgacagagaggagctgtgccagtggagcgccgagtgcagcatccacctggagctgatcgccgacagacccctgcaggtgttccacgtggaggtgaaggtgaaggacatcaacgacaacccccccgtgttcagaggcagagagcagatcatcttcatccccgagagcagactgctgaacagcagattccccatcgagggcgccgccgacgccgacatcggcgccaacgccctgctgacctacaccctgagccccagcgactacttcagcctggacgtggaggccagcgacgagctgagcaagagcctgtggctggagctgagaaagtacctggacagagaggagacccccgagctgcacctgctgctgaccgccaccgacggcggcaagcccgagctgcagggcaccgtggagctgctgatcaccgtgctggacgtgaacgacaacgcccccctgttcgaccaggccgtgtacagagtgcacctgctggagaccaccgccaacggcaccctggtgaccaccctgaacgccagcgacgccgacgagggcgtgaacggcgaggtggtgttcagcttcgacagcggcatcagcagagacatccaggagaagttcaaggtggacagcagcagcggcgagatcagactgatcgacaagctggactacgaggagaccaagagctacgagatccaggtgaaggccgtggacaagggcagcccccccatgagcaaccactgcaaggtgctggtgaaggtgctggacgtgaacgacaacgcccccgagctggccgtgaccagcctgtacctgcccatcagagaggacgcccccctgagcaccgtgatcgccctgatcaccgtgagcgacagagacagcggcgccaacggccaggtgacctgcagcctgatgccccacgtgcccttcaagctggtgagcaccttcaagaactactacagcctggtgctggacagcgccctggacagagagagcctgagcgtgtacgagctggtggtgaccgccagagacggcggcagccccagcctgtgggccaccgccagagtgagcgtggaggtggccgacgtgaacgacaacgcccccgccttcgcccagcccgagtacaccgtgttcgtgaaggagaacaacccccccggctgccacatcttcaccgtgagcgccagagacgccgacgcccaggagaacgccctggtgagctacagcctggtggagagaagagtgggcgagagagccctgagcaactacgtgagcgtgcacgccgagagcggcaaggtgtacgccctgcagcccctggaccacgaggagctggagctgctgcagttccaggtgagcgccagagacgccggcgtgccccccctgggcagcaacgtgaccctgcaggtgttcgtgctggacgagaacgacaacgcccccgccctgctggcccccagagtgggcggcaccatcggcgccgtgagcgagctggtgcccagactggtgggcgccggccacgtggtggccaaggtgagagccgtggacgccgacagcggctacaacgcctggctgagctacgagctgcagcccgccgccggcggcgccagaatccccttcagagtgggcctgtacaccggcgagatcagcaccaccagagtgctggacgaggccgacctgagcagatacagactgctggtgctggtgaaggaccacggcgagcccgccctgaccgccaccgccaccgtgctggtgagcctggtggagagcggccaggcccccaaggccagcagcagagccagcgtgggcgtggccggccccgaggccgccctggtggacgtgaacgtgtacctgatcatcgccatctgcgccgtgagcagcctgctggtgctgaccctgctgctgtacaccgccctgagatgcagcgtgccccccaccgagggcgcctacgtgcccggcaagcccaccctggtgtgcagcagcgccctgggcagctggagcaacagccagcagagaagacagagagtgtgcagcagcgagggcccccccaagaccgacctgatggccttcagccccggcctgagccccagcctgaacaccagcgagagaaacgagcagcccgaggccaacctggacctgagcggcaacgtgagccccaccttcgagttctggctgtag

SEQ ID NO: 221626 - protein, 686 aa, Artificial Sequence
  derived and/or modified sequence
MVFSRRGGLGARDLLLWLLLLAAWEVGSGQLHYSIPEEAKHGTFVGRVAQDLGLELAELVPRLFRVASKTHRDLLEVNLQNGILFVNSRIDREELCQWSAECSIHLELIADRPLQVFHVEVKVKDINDNPPVFRGREQIIFIPESRLLNSRFPIEGAADADIGANALLTYTLSPSDYFSLDVEASDELSKSLWLELRKYLDREETPELHLLLTATDGGKPELQGTVELLITVLDVNDNAPLFDQAVYRVHLLETTANGTLVTTLNASDADEGVNGEVVFSFDSGISRDIQEKFKVDSSSGEIRLIDKLDYEETKSYEIQVKAVDKGSPPMSNHCKVLVKVLDVNDNAPELAVTSLYLPIREDAPLSTVIALITVSDRDSGANGQVTCSLMPHVPFKLVSTFKNYYSLVLDSALDRESLSVYELVVTARDGGSPSLWATARVSVEVADVNDNAPAFAQPEYTVFVKENNPPGCHIFTVSARDADAQENALVSYSLVERRVGERALSNYVSVHAESGKVYALQPLDHEELELLQFQPRQPNPDWRYSASLRAGMHSSVHLEEAGILRAGPGGPDQQWPTVSSATPEPEAGEVSPPVGAGVNSNSWTFKYGPGNPKQSGPGELPDKFIIPGSPAIISIRQEPTNSQIDKSDFITFGKKEETKKKKKKKKGNKTQEKKEKGNSTTDNSDQ

SEQ ID NO: 221627 - DNA, 2061 bp, Artificial Sequence
  derived and/or modified sequence
atggtgtttagccggaggggagggttaggcgctcgagatctgctgctatggcttctgctgttggccgcatgggaggtgggcagcggccagctccactactccataccagaagaagcaaaacatggaaccttcgtaggacgagtggctcaggatttagggttagagctggctgaactggtaccgcgactattccgagtagcaagcaagacgcacagagacctcctcgaggttaacttgcagaacgggatcttattcgtaaactcgcgtattgaccgcgaggagctgtgccagtggtccgccgagtgtagcattcacctggagctcatcgcagataggccgcttcaagtatttcacgtggaggttaaagtaaaagacataaatgataatccccctgtgtttcggggcagagagcaaattatttttataccggaatcgcgactgttaaattcacgcttccccatcgaaggcgctgccgacgctgacattggtgccaatgcactgcttacatacacactctccccatccgattattttagtctagatgttgaagcgtcggacgagttatccaagagcctgtggctggaactccggaaatacctggatcgagaggaaacacctgaactccacctgctactcaccgccacagacggcggcaagcccgaactgcagggaactgtcgagctgttgatcactgtactggacgtgaatgacaacgctcctttattcgaccaggccgtataccgcgtgcacctgcttgaaaccacagcgaacggtactcttgtgacgactctcaacgcgtcagatgccgatgagggggtgaatggagaggtagtgttctcctttgattccggcattagtcgggacattcaggagaagtttaaagtcgatagtagcagcggtgagatccggcttatcgacaaactggactacgaggaaaccaagagctacgagatccaagtcaaagccgtcgataagggcagcccacctatgtccaaccactgcaaggtgcttgtcaaggtcctcgatgttaacgacaatgcccccgaattggcagtgacctccttatatttgccaatccgagaggatgcccccctgtcgaccgtcatagcacttatcacggtaagcgatagggacagcggcgctaatggccaggtcacctgcagtctgatgccacacgtgccattcaaactcgtaagcacctttaagaattactactctttggtgctggactccgccctggaccgagaatcactctccgtgtacgaattggtggtgacagcccgagacgggggatctccgagcttgtgggcaacggcaagggtatccgttgaagtggccgatgtgaacgacaatgctcccgcattcgcccaacccgaatataccgtttttgtgaaggaaaacaacccacctggatgccacatcttcactgttagtgcgagagacgccgacgcgcaggaaaatgccttagtatcctactccttggtggagcgccgggtgggcgaacgggcactgtccaactatgtgagcgttcacgccgaaagcgggaaggtttatgccttacagcctcttgaccacgaggaactcgaacttctgcaatttcaaccgagacaaccaaacccagactggcggtattccgccagcttgagggctggaatgcactcctcggtgcatctcgaagaagcggggattcttcgagcaggaccaggtggacccgaccagcagtggcccactgtctctagtgctactcccgaaccagaggcgggagaggtgagccctcccgttggagccggtgtgaatagcaattcttggacctttaagtacggacccggcaacccaaagcagtccggccccggagagctccccgataagtttattattccggggtcgccggcgatcattagtattcgccaggaaccaaccaacagccagatagacaaatccgacttcatcactttcgggaagaaggaggaaacaaaaaagaagaagaagaagaaaaaggggaataaaacccaggaaaaaaaagaaaaaggcaatagcactacagacaactccgaccagtag

SEQ ID NO: 221628 - DNA, 2061 bp, Artificial Sequence
  derived and/or modified sequence
atggtgttcagcagaagaggaggcctgggcgcccgggacctgctgctgtggctgctgctgctggccgcctgggaggtgggcagcggccagctgcactacagcatccctgaggaggccaagcacggcacctttgtgggccgggtggcccaggacctgggcctggagctggccgagctggtgcccaggctcttccgggtggccagcaagacccaccgggacctgctggaggtgaacctgcagaatggcatcctgtttgtgaacagcagaattgaccgggaggagctgtgccagtggagcgcagaatgttccatccacctggagctgattgctgaccggcccctgcaggtgttccacgtggaggtgaaggtgaaggacatcaatgacaacccccctgtgttccggggccgggagcagatcatcttcatccctgagagccggctgctgaacagccgcttccccatcgagggcgctgctgatgctgacatcggggccaatgccctgctgacctacaccctgagccccagcgactacttcagcctggatgtggaggccagtgatgagctgagcaagagcctgtggctggagctgaggaagtacctggaccgggaggagaccccagagctgcacctgctgctgacagccacagatggcggcaagccagagctgcagggcaccgtggagctgctgatcaccgtgctggatgtgaatgacaatgcccccctgtttgaccaggccgtgtacagagtgcacctgctggagaccacagccaacggcaccctggtgaccaccctgaatgccagtgatgctgatgagggcgtgaatggagaggtggtgttctcctttgattctggcatcagccgggacatccaggagaagttcaaggtggacagcagcagtggagagatccggctgattgacaagctggactatgaggagaccaagagctatgagatccaggtgaaggctgtggacaagggcagcccccccatgagcaaccactgcaaggtgctggtgaaggtgctggatgtgaatgacaatgcccctgagctggccgtgaccagcctgtacctgcccatcagagaagatgcccccctgagcacagtgattgccctgatcaccgtgtctgaccgggacagcggggccaacggccaggtgacctgcagcctgatgccccacgtgcccttcaagctggtgtccaccttcaagaactactacagcctggtgctggacagcgccctggaccgggagagcctgtctgtgtatgagctggtggtgacagccagagatggcggcagccccagcctgtgggccacagcccgggtgtctgtggaggtggctgatgtgaatgacaatgccccagcctttgcccagcctgagtacacagtgtttgtgaaggagaacaaccccccaggctgccacatcttcaccgtgtctgccagagatgctgatgcccaggagaatgccctggtgtcctacagcctggtggagaggagagtgggggagcgggccctgagcaactacgtgtctgtgcacgccgagagcggcaaggtgtatgccctgcagcccctggaccacgaggagctggagctgctgcagttccagccccggcagcccaacccagactggagatacagcgccagcctgcgggccggcatgcacagctctgtgcacctggaggaggccggcatcctgcgggccggccctgggggccctgaccagcagtggcccaccgtgagcagcgccaccccagagcctgaggccggggaggtgagcccccctgtgggcgctggggtgaacagcaacagctggaccttcaagtatggccctggcaaccccaagcagagcggccctggagagctgcctgacaagttcatcatccctggcagccctgccatcatcagcatccggcaggagcccaccaacagccagattgacaagagtgacttcatcaccttcggcaagaaggaggagaccaagaagaagaagaagaagaagaagggcaacaagacccaggagaagaaggagaagggcaacagcaccacagacaacagcgaccagtag

SEQ ID NO: 221629 - DNA, 2061 bp, Artificial Sequence
  derived and/or modified sequence
atggtgttcagccggcggggcggcctgggcgcccgggacctgctgctgtggcttttgctcctggccgcctgggaagtgggatcaggccagttgcactattcaatccccgaggaagccaagcatggaaccttcgttgggagggtggcccaggatctcggtctggagctagccgaactggtgccgagactgtttagggttgcctccaagacccatcgcgaccttcttgaggttaatctgcaaaatggaatcttgttcgttaatagcagaatcgacagggaggaactttgtcagtggagtgccgagtgttctattcacttggaacttatcgccgatcggcctctgcaagttttccacgtggaggtaaaggtgaaggatattaacgacaatccaccggtttttagaggcagggagcagattatatttatcccagaatcaagactcctgaactcaagattccccatagaaggagctgccgacgccgacatcggcgcaaacgctctgttgacctacaccctcagcccctccgattactttagcctagacgtcgaggcatccgatgagctcagcaaaagtctgtggctggagttaaggaagtacctggatcgggaggagacccccgagctccatctactgctaaccgcaacggacgggggcaagcccgagctacagggcaccgtcgaactgctgataactgtgttggacgtgaacgacaatgccccgttgtttgaccaggccgtgtatcgggtccatttactagagacaaccgcaaatggaactctagttaccacactgaatgcgagtgacgccgatgagggggtaaacggagaagtcgttttcagcttcgactcagggattagcagggacattcaggaaaaattcaaagtggactcatcttctggagagatccggttaatcgacaaattggattatgaagagaccaagagttacgaaatccaggtaaaggctgtagacaaggggtcacctcccatgagtaatcattgcaaggtcctggttaaagtgctcgacgtaaatgataatgcccccgagctcgcggtgacgtctctctatcttccaatccgtgaggatgccccgctgtccactgtcatcgcgctgatcaccgtctccgacagagactccggcgccaatggccaggtgacttgttccttgatgccgcatgtgccattcaagctcgttagtacattcaagaactactacagcttggtgctcgattccgcgcttgaccgtgagtcattgagtgtgtacgagttggttgtgacagcacgagacggggggtctccctccctctgggctaccgcaagagtctccgttgaggtcgctgatgtgaatgataatgcacctgcttttgctcagcccgaatacacagtattcgtcaaggagaataatccacctgggtgccatatcttcacggtgtcagcacgtgatgccgatgctcaggagaacgcgctggtaagttattcccttgtagaacgacgggtcggtgagcgggcactctctaattacgtcagcgttcacgccgaatccgggaaggtttatgccttacagccattggaccacgaggagctcgagttgctacagttccagccccggcagcccaaccccgactggagatacagcgcctcgctgcgcgccggaatgcacagcagcgtgcacctggaagaggcaggaatattgagagcaggcccaggaggtccagaccaacaatggcctactgtcagcagcgccacccccgaaccggaggcgggcgaagtgtctccgccagtgggcgccggggtcaactccaattcctggacctttaagtatggccccggcaatcctaagcagagtgggcctggcgaactcccggacaaatttataattcccgggtcccccgcaataatctctattcggcaggaacctactaacagccagatagacaaatctgattttatcaccttcggtaagaaggaagagacaaaaaaaaagaagaaaaaaaagaaagggaataagacacaagaaaagaaggagaaggggaactctactaccgataacagcgaccagtag

SEQ ID NO: 221630 - DNA, 2061 bp, Artificial Sequence
  derived and/or modified sequence
atggtcttcagccgcagaggcggtctgggcgcacgcgatctgttactatggctcctcctgttggccgcttgggaggttggctctggtcagcttcattattcaattcctgaggaggccaaacacggaacctttgtgggacgagtcgcccaggaccttggactcgaactggcagagttagtccctcgactgtttcgtgtggcttctaagacacacagagatcttttagaggtgaacctgcagaatggcattctgttcgtgaactcacgcatagatcgcgaagaactctgtcagtggtccgccgaatgctccatacatctggaacttatagctgaccggccactgcaggtgttccacgtggaggttaaggtgaaagatattaacgataatcccccagtcttccgaggcagggagcaaattatcttcatcccggaaagccggttattaaacagtcgcttcccgattgaaggggcagccgatgcagatatcggggctaatgccctgttgacctacaccctgtctccaagcgactacttctcattggacgtggaggcaagtgatgagctatctaagtcgctgtggctcgaactgaggaagtatctggaccgcgaagaaacaccagaactccatctgcttctgactgccacagacggcggaaagcccgagctgcaaggcacggtggagctcctgatcaccgtcctggatgtcaatgataatgcccctttgttcgaccaggccgtctatcgagtgcacctcctagagacaaccgcaaatgggacactggtgaccaccctgaacgcttccgatgctgatgaaggggtgaatggcgaagtggttttcagcttcgattccggaatctcccgggacatacaggaaaagttcaaggtggatagcagctctggcgaaatccgcctgatcgataaactggattacgaagagaccaagtcttacgaaattcaagtcaaagctgtcgataagggttctcctccaatgtcaaaccattgcaaggtgctggtgaaggtgctggacgtcaatgataatgcccctgagttggccgtgacttcgctatatctgcccatccgggaggatgctcccctctccacagtgattgccctgatcactgtatccgatcgggactccggtgccaacggtcaggtaacctgtagcttaatgccacatgtgcctttcaagctcgtgagcacatttaaaaattactattcactggtgctggacagtgctcttgaccgagagagcttgtccgtatacgagctagttgtaaccgccagggatgggggtagccctagcctttgggctacagctcgcgtgagtgtcgaagtagcagacgtcaatgataatgccccagcctttgcacaacccgagtacacagtgttcgtgaaggaaaataatcccccaggctgccacatctttacggtgtctgccagagacgcagacgcccaggagaacgccttggtgtcatacagtcttgtcgagcgtcgcgtcggcgaaagggctctgagcaattatgtgtccgtgcatgctgagtcagggaaagtctacgcactgcaacctctggatcatgaagaacttgagttactgcagttccagcccagacagccaaaccctgactggcgctacagcgcatccctgcgggctggcatgcatagctcagttcacttggaggaagctgggatacttcgggctggaccaggaggccctgatcagcaatggcctaccgttagctctgccacaccagaacctgaagcaggcgaggtgagtccacctgtgggggcaggcgtcaattccaatagctggaccttcaagtatggccctggcaaccccaaacagtctggccctggcgagctaccagacaagttcataatccctgggagtccagcgattattagcattcgacaagaacctaccaactcccagattgacaaatccgactttatcacattcgggaagaaggaagaaaccaagaagaaaaaaaaaaaaaagaagggaaacaagacacaggaaaagaaggaaaaaggaaattctactacagacaattcagaccagtag

SEQ ID NO: 221631 - DNA, 4468 bp, Artificial Sequence
  derived and/or modified sequence
atggtgttttctaggagagggggcctgggagcccgggatctgcttctttggcttctgctcctcgcagcctgggaggtggggagcggccagctccactactcgatcccggaggaagccaaacacggcaccttcgttggccgcgttgctcaggacctgggactggagctggcggagctggtgcctcgcctgttccgggtggcgtccaaaacacacagggaccttctggaggtaaatctgcagaatggcattttgtttgtgaattctcggatcgatcgcgaggagctgtgccagtggagcgcggagtgcagcatccacctggagttgatcgccgacaggccgctgcaggttttccatgtggaggtgaaggtgaaagacattaacgataatccacccgtcttcaggggcagagaacaaataatatttattcctgaatctagactcctgaattcgcgttttccgatagaaggagctgctgatgcagacattggtgctaacgctcttctaacgtacacgctcagcccgagtgattatttctctttggatgtagaggcaagtgatgaactgagtaaatctctttggcttgaattgagaaaatatttggatagagaagaaacaccagaacttcacttattactgactgccactgatgggggcaaaccggagctgcaaggtacagttgagctgctgatcaccgtcctcgacgttaatgataacgccccactgtttgaccaggccgtatacagagtccacttgttagagactacagcaaatggaacattagtgaccacattaaatgcctctgatgctgacgaaggtgtaaatggtgaagtcgtcttttcctttgacagtggtatttctcgtgacattcaagaaaaattcaaagttgattccagctcaggagaaattaggttaattgataaactggattatgaagaaacaaaatcctacgaaattcaagtaaaggcagttgataaaggaagtcctccgatgtcaaatcactgtaaggttttggtgaaagtgctggatgtaaatgataatgctccagaactggcggtcacttcattgtatttgcctatcagagaggacgctccactcagcaccgtcatcgccctcatcaccgtgtctgaccgtgactcaggtgccaacgggcaggtgacttgctccttaatgccccacgtccccttcaagctggtgtccaccttcaagaattactactcgttggtgttggacagcgccctggatcgcgagagcctgtcggtctatgagctggtggtgaccgcgcgggacgggggctcgccttcgctgtgggccacggccagggtgtccgtggaggtggccgacgtgaatgacaacgcgcctgcgttcgcgcagcccgagtacacagtattcgtgaaggagaacaacccgccgggctgccacatcttcacggtgtctgcgcgggacgcggacgcgcaggagaacgcgctggtgtcctattcgctggtggaacggcgggtgggcgagcgcgcgctgtcgaactacgtgtcagtgcacgcggagagcggcaaggtgtacgcactgcagcccctggaccacgaggagctggagctgctgcagttccagccacgacagcccaaccctgactggcgttactctgcctccctgagagcaggcatgcacagctctgtgcacctagaggaggctggcattctacgggctggtccaggagggcctgatcagcagtggccaacagtatccagtgcaacaccagaaccagaggcaggagaagtgtcccctccagtcggtgcgggtgtcaacagcaacagctggacctttaaatacggaccaggcaaccccaaacaatccggtcccggtgagttgcccgacaaattcattatcccaggatctcctgcaatcatctccatccggcaggagcctactaacagccaaattgacaaaagtgacttcataaccttcggcaaaaaggaggagaccaagaaaaagaagaaaaagaagaagggtaacaagacccaggagaaaaaagagaaagggaacagcacgactgacaacagtgaccagtgaggtcctcaaatggaaacaagccacttagccagtttttgtaataatggcaaatctctcccatgtagcaattccctgctcctttttcctatctacatgagccctcttagagacctcagaaatctgcagaaagttccctgtgtctgtctagaacgcatttaacaggttttgtcgtaaaagctttactaagtctggtgttaactctttctctccactctggcttgttttcagaacctaaaaagcagacccaagtttcctttctcctccgccgcaaaggagaggcttcccagccccgccagtgagaggttggactctctgccctgtgctccggggatcctgtcttgatgacacttgcagggcaggctgaaaagttttgagattgagcagcttgggagtttgtggccactgggtatgtgtggctaccgcgggtatgcgagtgccagatattggctgagacgagccagcttagactaattggtacaaggaaggcaagaaaacaaagacaaataaacagcggaagttatcagtatggaggggaagtgtaaacttaaagggaccagactttctaaatcttacaactcaagaggtggcagccaccctctaggagacaaaactacccccactgacaaggctttaggagaccctaaagtctgttggctgtgacgtcattatacctaaaatctgcatcatacctgcaagccaacagttcagtgttttaacagagaaccaccctgggaaacagaagcagatctgatgtgtttcctatacatgtcctgtgctcactttattaaaaattcttttgcacacaatgtttatgaaaaggccagatccttttccaatacttatgcaaaagcaaaagaaaaccccgacacctcacctttcgctgtttgttgtttcatagatttatttaaaaaaagagaaagtctatagctataaatctttaaagagaaatatgaatacaattcccctaaactctcctcaaaagagaattcagtctacagccatttaaatgatcattgctgctacagaagtgctttaagagaattgcctgaaacatctgtattatatcggccacctgccaatcacagctttactctttcaggtcactctggggctgcctcttgcatgtattactaaataaaatgatctctctttctctctctctctctcttttctaagaaacaattatgtgcactttgatacacaaccttctctaaccaactatatatcaagacccaaaaattgaagaaaaatattgttttctcatacagtgagcagatttttcaatctactaattctgtgacttgtcttggtgtgctagcctacaccttctctttggtttagttttccttttctataacactctgaattgctaatcttactaacacctatgatgttacctgaaatcaatctcccatatgtatgctgtatgctatgctaagactcctgaaatatacttactctgtgcttgtgtatgtgaatgttaatgcaactattacctagagtgaactttaagctttattgttgaatgtaattccattatatttccttttgtacacctgtgaaaaagtggagtagtgtttttttaaccattgttaatcagcttttgtgtatgaaagacacagtaaaatttctttcttaaatcaagatactggtgattcaaggaattttatttatggtccagccaagagccatctcgtgccaagacttctgctggcaagggaatggataaagctgttttgttctagtaacaattttggaatgaatactgacaatattccatgagggtgtgcaagcacaaattttaccaatctgacctctttgaagttgcagaatgctttgaaattctaatggtatctgaaatatcagctcatagaaagtaacaaaatttgctgtcaccttaaataagacattttaattttgttataatgtacaatttagaagtttgattaattatattatctatttaggcattaatataaaagaggtaggagtctgttatttaaaaaaagcattaaatttaaaaaaaaactgtcttgtctacttttagcttcattctcccatattttgaagggtgtgtaacttcagctctgcaggattgcatggggtaaaacttgttaccaacacatgtgaaccattgctacattgtaggttgtgatcattttgccccactgaagcccatgtatctgaccttacgtgccttttgaactaggagaatcgggctaatttattaatgatgataattataatgtatctgtacagcactttttacatttgcgaagtgctttccaatccatgttagttactagttattacagctgtaaggataaaacacgtcatgtggattcattttgaattggtgctattggtatttcctctgttattgctaataaatgaaaatggtggtatg

SEQ ID NO: 221632 - DNA, 2061 bp, Artificial Sequence
  derived and/or modified sequence
atggtgttcagcagaagaggcggcctgggcgccagagacctgctgctgtggctgctgctgctggccgcctgggaggtgggcagcggccagctgcactacagcatccccgaggaggccaagcacggcaccttcgtgggcagagtggcccaggacctgggcctggagctggccgagctggtgcccagactgttcagagtggccagcaagacccacagagacctgctggaggtgaacctgcagaacggcatcctgttcgtgaacagcagaatcgacagagaggagctgtgccagtggagcgccgagtgcagcatccacctggagctgatcgccgacagacccctgcaggtgttccacgtggaggtgaaggtgaaggacatcaacgacaacccccccgtgttcagaggcagagagcagatcatcttcatccccgagagcagactgctgaacagcagattccccatcgagggcgccgccgacgccgacatcggcgccaacgccctgctgacctacaccctgagccccagcgactacttcagcctggacgtggaggccagcgacgagctgagcaagagcctgtggctggagctgagaaagtacctggacagagaggagacccccgagctgcacctgctgctgaccgccaccgacggcggcaagcccgagctgcagggcaccgtggagctgctgatcaccgtgctggacgtgaacgacaacgcccccctgttcgaccaggccgtgtacagagtgcacctgctggagaccaccgccaacggcaccctggtgaccaccctgaacgccagcgacgccgacgagggcgtgaacggcgaggtggtgttcagcttcgacagcggcatcagcagagacatccaggagaagttcaaggtggacagcagcagcggcgagatcagactgatcgacaagctggactacgaggagaccaagagctacgagatccaggtgaaggccgtggacaagggcagcccccccatgagcaaccactgcaaggtgctggtgaaggtgctggacgtgaacgacaacgcccccgagctggccgtgaccagcctgtacctgcccatcagagaggacgcccccctgagcaccgtgatcgccctgatcaccgtgagcgacagagacagcggcgccaacggccaggtgacctgcagcctgatgccccacgtgcccttcaagctggtgagcaccttcaagaactactacagcctggtgctggacagcgccctggacagagagagcctgagcgtgtacgagctggtggtgaccgccagagacggcggcagccccagcctgtgggccaccgccagagtgagcgtggaggtggccgacgtgaacgacaacgcccccgccttcgcccagcccgagtacaccgtgttcgtgaaggagaacaacccccccggctgccacatcttcaccgtgagcgccagagacgccgacgcccaggagaacgccctggtgagctacagcctggtggagagaagagtgggcgagagagccctgagcaactacgtgagcgtgcacgccgagagcggcaaggtgtacgccctgcagcccctggaccacgaggagctggagctgctgcagttccagcccagacagcccaaccccgactggagatacagcgccagcctgagagccggcatgcacagcagcgtgcacctggaggaggccggcatcctgagagccggccccggcggccccgaccagcagtggcccaccgtgagcagcgccacccccgagcccgaggccggcgaggtgagcccccccgtgggcgccggcgtgaacagcaacagctggaccttcaagtacggccccggcaaccccaagcagagcggccccggcgagctgcccgacaagttcatcatccccggcagccccgccatcatcagcatcagacaggagcccaccaacagccagatcgacaagagcgacttcatcaccttcggcaagaaggaggagaccaagaagaagaagaagaagaagaagggcaacaagacccaggagaagaaggagaagggcaacagcaccaccgacaacagcgaccagtag

SEQ ID NO: 221633 - protein, 117 aa, Artificial Sequence
  derived and/or modified sequence
MKFQYKEVHPFEYRKKEGEKIRKKYPDRVPLIVEKAPKARVPDLDRRKYLVPSDLTDGQFYLLIRKRIHLRPEDALFFFVNNTIPPTSATMGQLYEDSHEEDDFLYVAYSNESVYGK

SEQ ID NO: 221634 - protein, 117 aa, Artificial Sequence
  derived and/or modified sequence
MKFQYKEDHPFEYRKKEGEKIRKKYPDRVPVIVEKAPKARVPDLDKRKYLVPSDLTVGQFYFLIRKRIHLRPEDALFFFVNNTIPPTSATMGQLYEDNHEEDYFLYVAYSDESVYGK

SEQ ID NO: 221635 - DNA, 354 bp, Artificial Sequence
  derived and/or modified sequence
atgaagttccagtacaaggaggtgcaccccttcgagtacagaaagaaggagggcgagaagatcagaaagaagtaccccgacagagtgcccctgatcgtggagaaggcccccaaggccagagtgcccgacctggacagaagaaagtacctggtgcccagcgacctgaccgacggccagttctacctgctgatcagaaagagaatccacctgagacccgaggacgccctgttcttcttcgtgaacaacaccatcccccccaccagcgccaccatgggccagctgtacgaggacagccacgaggaggacgacttcctgtacgtggcctacagcaacgagagcgtgtacggcaagtag

SEQ ID NO: 221636 - DNA, 354 bp, Artificial Sequence
  derived and/or modified sequence
atgaaattccagtataaagaggtgcatcccttcgaatatcgtaaaaaggagggcgagaagataagaaaaaaataccccgatagggtgcccctgattgtagagaaggcgccgaaagcacgggttcccgacctggacagacggaaatatctcgttccaagcgacttgaccgacggccagttctaccttctgattcgcaaaaggatccacctgcggcctgaagacgcactgtttttcttcgttaacaataccatccctcccacgtctgccacaatggggcagctgtacgaagacagccatgaggaagacgattttctatacgtggcctattcaaatgagagtgtttatggaaaatag

SEQ ID NO: 221637 - DNA, 354 bp, Artificial Sequence
  derived and/or modified sequence
atgaagttccagtacaaggaggtgcacccctttgagtacaggaagaaggagggggagaagatcaggaagaagtacccagacagagtgcccctcatcgtggagaaggcccccaaggcccgggtgcctgacctggacaggaggaagtacctggtgcccagcgacctgacagatggccagttctacctgctgatcaggaagaggatccacctgcggccagaagatgccctcttcttctttgtgaacaacaccatcccccccaccagcgccaccatgggccagctgtatgaggacagccatgaagaagatgacttcctgtatgtggcctacagcaatgaatctgtgtatggcaagtag

SEQ ID NO: 221638 - DNA, 354 bp, Artificial Sequence
  derived and/or modified sequence
atgaagttccagtacaaggaggtgcaccccttcgagtaccggaagaaggagggtgagaaaattcggaaaaagtatcctgacagggtgccactgattgtcgaaaaggcccctaaagctcgcgtgcctgatctcgatcgacgaaagtacctagtgccctcagacctgaccgacggccagttctacctgttaattcgaaaacgcatccatcttcgtccagaggacgctctgttctttttcgtgaataataccattccacccacttctgcaaccatgggacagctgtatgaggacagccacgaggaagacgactttctgtatgtggcatactcgaacgagagcgtgtacggcaagtag

SEQ ID NO: 221639 - DNA, 1851 bp, Artificial Sequence
  derived and/or modified sequence
gaaaagccgccggtatttctccacctggctctcctctacctccaggcaggcgcacccgaggtccccctcccaccccaccttctgccctcccgcacacttggaccagtgctgttgacccggaagcggacatttctgcagctattctaagcacacgtcggcggagggagcgggacgtggccagcggtcagcggcgaaggaggcaggccctgcgcggggatcacggaagccctgtgattcaccatgaagttccagtacaaggaggtccatccctttgagtatcggaaaaaggaaggagaaaagatccggaagaaatatccggacagggtccccttgattgtagagaaggctccaaaagcaagggtgcctgatctggacaggaggaagtacctagtgccctccgaccttaccgatggccagttctaccttttaatccggaagagaatccacctgagacctgaggacgccttattcttctttgtcaacaacactatccctcccactagtgctaccatgggccaactatatgaggacagtcatgaggaagatgattttctgtatgtggcctacagtaatgagagtgtctatgggaaatgagtggttggaagcccagcagatggaagcacctggacttaggggtaggggaggggtgtgtgtgtgacttggggaaagagagggcggctcccaccgtgaggagacagaaggtgaagacatatagaaactttacaccgcacacaccgtcaacgcattttcacatgctcaactgatattttttgttgcttccttggcccagggagaaagcatgtcaggacagagctgttggattggctttgatagaggaatggggatgatgtaattttatggcattcctgagatttaatttttgtgcagtttcatagaaaggtcggtcaggaggtggacaagttggggtcagagatgatggcagtccagcagcaactccctgtgctcccttctctttgggcagagattctgtttttgacagttgcacaagacaggtagggaaaggggacttgtggtagtgggccatacctggggacgaaaagagacccactgtaattgatgcatcgtggcccccgatcttccgtatcccacacttcttttctcccatcccagttgcaatctcactcacaaacatcacagtaccaccccaggggcggcagtagacaccaacccagaaatttagacagggatctcttatctttggaaaataggggttaggcatgagggtggttatgattaagaagataattttgttgttaaatagcattaaactggaattgacagagtgagttgagcatctctgtctaacctgctctttctctctggtgctcctcatctcacccctaccttggaatttaataagcttcaggcatttccaattgcagactaaaaccacttctaccatctcctctagtattttccatgtatcaggacagagatgtcttatgtagggaaggggcaggtatgaagtgaggtagattatctatacctctcactcattcaggattctcgctcccatgctgctgtcccttcattctcacactcacaggaatgctatgtgatggccagctgcttcccttcttggttatccactgcagctgctagttagaaaggtttgcagggatgacttttagtaaatcatggggattttattgatttattatcacttataggattttgtggggtgggagtggggagcaggaattgcactcagacatgacatttcaattcatctctgcaaatgaaaagggttcttcctcttgggggaaatctgtgtgtcagttctgtcagctgcaagttcttgtgtaatgaagtcaatgctgtcaggccaag

SEQ ID NO: 221640 - DNA, 354 bp, Artificial Sequence
  derived and/or modified sequence
atgaagtttcaatacaaggaggtccacccctttgaatatcgcaagaaagagggagagaaaatccggaaaaaatatcccgatcgcgtccccttgatcgttgagaaggcccctaaagccagagttcctgatttggatcggagaaagtatctggtgccctccgatctgacagatggacagttttacttactgattagaaaacgcatccatcttagacctgaagatgctctgttcttcttcgtcaataataccataccccctacttccgcaacgatgggccagctttatgaagacagtcatgaggaggacgacttcctgtatgtcgcctattctaatgaatctgtatacggaaaatag

SEQ ID NO: 221641 - DNA, 1955 bp, Artificial Sequence
  derived and/or modified sequence
ctgggcgcctggcgcatggggggcggggcggggctcgcggggtgacgtcacagcccgacgcgccacccagctgtttttgtgctcccagctctagcgaaaagccgccggtatttctccatctggctctcctctacctccaggcaggctcacccgagatccccgccccgaaccccccctgcacactcggcccagcgctgttgcccccggagcggacgtttctgcagctattctgagcacaccttgacgtcggctgagggagcgggacagggtcagcggcgaaggaggcaggccccgcgcggggatctcggaagccctgcggtgcatcatgaagttccagtacaaggaggaccatccctttgagtatcggaaaaaggaaggagaaaagatccggaagaaatatccggacagggtccccgtgattgtagagaaggctccaaaagccagggtgcctgatctggacaagaggaagtacctagtgccctctgaccttactgttggccagttctacttcttaatccggaagagaatccacctgagacctgaggacgccttattcttctttgtcaacaacaccatccctcccaccagtgctaccatgggccaactgtatgaggacaatcatgaggaagactattttctgtatgtggcctacagtgatgagagtgtctatgggaaatgagtggttggaagcccagcagatgggagcacctggacttgggggtaggggaggggtgtgtgtgcgcgacatggggaaagagggtggctcccaccgcaaggagacagaaggtgaagacatctagaaacattacaccacacacaccgtcatcacattttcacatgctcaattgatattttttgctgcttcctcggcccagggagaaagcatgtcaggacagagctgttggattggctttgatagaggaatggggatgatgtaagtttacagtattcctggggtttaattgttgtgcagtttcatagatgggtcaggaggtggacaagttggggccagagatgatggcagtccagcagcaactccctgtgctcccttctctttgggcagagattctatttttgacatttgcacaagacaggtagggaaaggggacttgtggtagtggaccatacctggggaccaaaagagacccactgtaattgatgcattgtggcccctgatcttccctgtctcacacttcttttctcccatcccggttgcaatctcactcagacatcacagtaccaccccaggggtggcagtagacaacaacccagaaatttagacagggatctcttacctttggaaaataggggttaggcatgaaggtggttgtgattaagaagatggttttgttattaaatagcattaaactggaattgacaagagtgttgagcatccctgtctaacctgctctttctctttggtgccccttatctcaccccttccttggaatttaataagtctcaggcatttccaattgtagactaaaaccactcttagcatctcctctagtattttccatgtatcaggacagaggtgtcttatgtagggagggggcaagtatgaagtaaggtaattatatactactctcattcaggattcttgctcccatgctgctgtcccttcaggctcacatgcacaggaatgctacatgatggccagctgcttccctccttggttatcatccactgcagctgctagttagaaaggtttggagggatgacttttagtaaatcatggggattttattgatttattttcacttttgggattttgtggggtgggagtggggagcaggaattgcactcagacatgacatttcaattcatctctgctaatgaaaagggttctttctcttgggggaaatgtgtgtgtcagttctgtcagctgcaagttcttgtataatgaagtcaatgccatcaggccaaggaaataaaataattgcttaccttaaaaa

SEQ ID NO: 221642 - DNA, 553 bp, Artificial Sequence
  derived and/or modified sequence
gtatttgttttggggcccaaccaagaaaaacagtggagggggaataaaacatgtttaaatcttttttttgtcttaaaaccatctttaatttcacagtcacaaaataaaacataactcgaatgttttgatgtttgcagtgacatcgattgtgaaaaaggcaggctcacccgagatccccgccccgaaccccccctgcacactcggcccagcgctgttgcccccggagcggacgtttctgcagctattctgagcacaccttgacgtcggctgagggagcgggacagggtcagcggcgaaggaggcaggccccgcgcggggatctcggaagccctgcggtgcatcatgaagttccagtacaaggaggaccatccctttgagtatcggaaaaaggaaggagaaaagatccggaagaaatatccggacagggtccccgtgattgtagagaaggctccaaaagccagggtgcctgatctggacaagaggaagtacctagtgccctctgaccttactgttggccagttctacttcttaatccggaagagaatccacctga

SEQ ID NO: 221643 - DNA, 571 bp, Artificial Sequence
  derived and/or modified sequence
ctctcctctacctccaggcaggctcacccgagatccccgccccgaaccccccctgcacactcggccccgcgcggggatctcggaagccctgcggtgcatcatgaagttccagtacaaggaggaccatccctttgagtatcggaaaaaggaaggagaaaagatccggaagaaatatccggacagggtccccgtgattgtagagaaggctccaaaagccagggtgcctgatctggacaagaggaagtacctagtgccctctgaccttactgttggccagttctacttcttaatccggaagagaatccacctgagacctgaggacgccttattcttctttgtcaacaacaccatccctcccaccagtgctaccatgggccaactgtatgaggacaatcatgaggaagactattttctgtatgtggcctacagtgatgagagtgtctatgggaaatgagtggttggaagcccagcagatgggagcacctggacttgggggtaggggaggggtgtgtgtgcgcgacatggggaaagagggtggctcccaccgcaaggagacagaaggtgaagacat

SEQ ID NO: 221644 - DNA, 354 bp, Artificial Sequence
  derived and/or modified sequence
atgaagttccagtacaaggaggaccaccccttcgaataccgcaagaaggagggcgagaagatcaggaagaagtaccctgacagggtgcccgtgatagttgaaaaggccccaaaggccagggtgcctgatctggacaagcggaaatacctcgtccccagcgatctgactgttgggcagttctattttcttattcggaaacggatccatctgcgtcccgaggatgccctgtttttttttgtgaataataccattccaccaacatctgcaactatgggtcagttgtatgaggacaatcatgaagaagactatttcctgtacgtcgcttattcagacgagtctgtttacggtaagtag

SEQ ID NO: 221645 - DNA, 213 bp, Artificial Sequence
  derived and/or modified sequence
atgaagtttcagtacaaggaggaccacccgtttgaatacagaaagaaggagggggaaaaaatcagaaagaagtaccctgatcgagttcccgtcatagtagaaaaggctcccaaggcacgcgtaccagatctagataaacgaaaatacctagtcccctctgacctgactgtaggacagttttatttcctaatcaggaaacggattcacctctag

SEQ ID NO: 221646 - DNA, 354 bp, Artificial Sequence
  derived and/or modified sequence
atgaaattccagtacaaggaagaccatccctttgagtataggaagaaggagggtgagaaaattcggaaaaagtatcctgatagggtccctgtaattgtggagaaagcccctaaggctagagtccccgacctcgacaaaaggaaatatctggtgccatctgacttgacagtcggacaattctatttcctgattcgaaaaagaatccatctaagaccagaagacgccctgttcttcttcgtaaacaacaccattcccccaacttccgcgacgatgggtcagctttatgaagacaaccacgaagaggactatttcctgtatgttgcgtacagcgacgaatcggtttacggaaagtag

SEQ ID NO: 221647 - DNA, 354 bp, Artificial Sequence
  derived and/or modified sequence
atgaagttccagtacaaggaggaccacccctttgagtacaggaagaaggagggggagaagatcaggaagaagtacccagacagagtgcctgtgattgtggagaaggcccccaaggcccgggtgcctgacctggacaagaggaagtacctggtgcccagcgacctgactgtgggccagttctacttcctgatcaggaagaggatccacctgcggccagaagatgccctcttcttctttgtgaacaacaccatcccccccaccagcgccaccatgggccagctgtatgaggacaaccacgaggaggactacttcctgtatgtggcctacagtgatgaatctgtgtatggcaagtag

SEQ ID NO: 221648 - DNA, 213 bp, Artificial Sequence
  derived and/or modified sequence
atgaagttccagtacaaggaggaccacccctttgagtacaggaagaaggagggggagaagatcaggaagaagtacccagacagagtgcctgtgattgtggagaaggcccccaaggcccgggtgcctgacctggacaagaggaagtacctggtgcccagcgacctgactgtgggccagttctacttcctgatcaggaagaggatccacctgtag

SEQ ID NO: 221649 - DNA, 354 bp, Artificial Sequence
  derived and/or modified sequence
atgaagttccagtacaaggaggaccaccccttcgagtaccggaagaaagaaggggagaaaattcgtaaaaagtacccagaccgggtcccagtaatcgtggaaaaggctcccaaggctcgagtgcctgatttggacaaaagaaaatacttagtgccgtcggacttgaccgttgggcagttttattttttgatcaggaagaggattcatttgcggccagaggatgccctgtttttttttgtgaacaacacaataccaccgacttccgctacaatgggacagctttacgaagacaaccacgaggaagattatttcctttacgtcgcgtactccgatgaatctgtgtatggtaagtag

SEQ ID NO: 221650 - DNA, 213 bp, Artificial Sequence
  derived and/or modified sequence
atgaagttccagtacaaggaggaccaccccttcgagtaccggaagaaagagggggagaagatccgaaaaaaatatcccgacagggtgccggtgatagtcgagaaggctccaaaggcacgagtgccagacctcgataaaaggaaatatctggtcccctcggatcttacggtggggcagttctatttcttgatcagaaagcgaattcatctctag

SEQ ID NO: 221651 - DNA, 354 bp, Artificial Sequence
  derived and/or modified sequence
atgaagttccagtacaaggaggaccaccccttcgagtaccggaagaaggagggcgagaagattcggaagaagtaccctgatagggtgcctgtgattgtggagaaggctcccaaagctcgggtaccagacctggataaacggaagtaccttgtacctagtgatctgacagtgggccagttttatttcttgatacgaaagcggattcacctacggcctgaggatgccctgtttttttttgttaacaatactatccctcccacctccgccactatgggccaactttacgaagacaaccacgaggaggattactttctttacgtggcctattctgacgaaagtgtgtacggtaagtag

SEQ ID NO: 221652 - DNA, 354 bp, Artificial Sequence
  derived and/or modified sequence
atgaaatttcagtataaggaggatcacccgttcgaatatcggaagaaggaaggagagaaaatccgcaagaaatatcctgatagagtgcctgtaatcgtggaaaaagcccctaaggccagggtcccggatcttgataagaggaagtatttggttcctagcgacctgaccgttggccagttctactttttgattaggaaaaggatacacctcaggcccgaggatgcactgtttttcttcgtcaataatacaataccacctaccagtgctacaatggggcagctttacgaggacaatcacgaagaggactatttcctgtatgtcgcgtacagcgatgagagcgtatatgggaagtag

SEQ ID NO: 221653 - DNA, 213 bp, Artificial Sequence
  derived and/or modified sequence
atgaaatttcagtacaaggaagatcacccatttgaatatcgcaaaaaggagggggagaagattcgaaagaaatatccagaccgggtccctgtcatcgttgagaaagcccctaaagcgagggtgcccgatcttgacaaaaggaaataccttgttccatccgaccttacagtgggacagttttattttctcataaggaagaggatccacctctag

SEQ ID NO: 221654 - DNA, 354 bp, Artificial Sequence
  derived and/or modified sequence
atgaagttccagtacaaggaggatcacccttttgagtatcgaaagaaggagggggaaaagattcgcaaaaaatacccggatagagtgccagtcatcgtcgaaaaggctcccaaagctagagtgcctgacctcgacaaaaggaaatacctcgtgccctctgacctgaccgtggggcaattttatttcctgattaggaaacggattcacctccgcccagaagacgcactgttcttctttgtgaacaacacgattccccctacctccgccaccatgggacagctgtacgaagacaatcatgaggaggactactttctctacgttgcctactctgacgagagcgtctacggcaaatag

SEQ ID NO: 221655 - DNA, 354 bp, Artificial Sequence
  derived and/or modified sequence
atgaagttccagtacaaggaggaccaccccttcgagtacagaaagaaggagggcgagaagatcagaaagaagtaccccgacagagtgcccgtgatcgtggagaaggcccccaaggccagagtgcccgacctggacaagagaaagtacctggtgcccagcgacctgaccgtgggccagttctacttcctgatcagaaagagaatccacctgagacccgaggacgccctgttcttcttcgtgaacaacaccatcccccccaccagcgccaccatgggccagctgtacgaggacaaccacgaggaggactacttcctgtacgtggcctacagcgacgagagcgtgtacggcaagtag

SEQ ID NO: 221656 - DNA, 213 bp, Artificial Sequence
  derived and/or modified sequence
atgaagttccagtacaaggaggaccaccccttcgagtacagaaagaaggagggcgagaagatcagaaagaagtaccccgacagagtgcccgtgatcgtggagaaggcccccaaggccagagtgcccgacctggacaagagaaagtacctggtgcccagcgacctgaccgtgggccagttctacttcctgatcagaaagagaatccacctgtag

SEQ ID NO: 221657 - protein, 996 aa, Artificial Sequence
  derived and/or modified sequence
MDEDTHYDKVEDVVGSHIEDAVTFWAQSINRNKDIMKIGCSLSEVCPQASSVLGNLDPNKIYGGLFSEDQCWYRCKVLKIISVEKCLVRYIDYGNTEILNRSDIVEIPLELQFSSVAKKYKLWGLHIPSDQEVTQFDQGTTFLGSLIFEKEIKMRIKATSEDGTVIAQAEYGSVDIGEEVLKKGFAEKCRLASRTDICEEKKLDPGQLVLRNLKSPIPLWGHRSNQSTFSRPKGHLSEKMTLDLKDENDAGNLITFPKESLAVGDFNLGSNVSLEKIKQDQKLIEENEKLKTEKDALLESYKALELKVEQIAQELQQEKAAAVDLTNHLEYTLKTYIDTRMKNLAAKMEILKEMRHVDISVRFGKDLSDAIQVLDEGCFTTPASLNGLEIIWAEYSLAQENIKTCEYVSEGNILIAQRNEMQQKLYMSVEDFILEVDESSLNKRLKTLQDLSVSLEAVYGQAKEGANSDEILKKFYDWKCDKREEFTSVRSETDASLHRLVAWFQRTLKVFDLSVEGSLISEDAMDNIDEILEKTESSVCKELEIALVDQGDADKEIISNTYSQVLQKIHSEERLIATVQAKYKDSIEFKKQLIEYLNKSPSVDHLLSIKKTLKSLKALLRWKLVEKSNLEESDDPDGSQIEKIKEEITQLRNNVFQEIYHEREEYEMLTSLAQKWFPELPLLHPEIGLLKYMNSGGLLTMSLERDLLDAEPMKELSSKRPLVRSEVNGQIILLKGYSVDVDTEAKVIERAATYHRAWREAEGDSGLLPLIFLFLCKSDPMAYLMVPYYPRANLNAVQANMPLNSEETLKVMKGVAQGLHTLHKADIIHGSLHQNNVFALNREQGIVGDFDFTKSVSQRASVNMMVGDLSLMSPELKMGKPASPGSDLYAYGCLLLWLSVQNQEFEINKDGIPKVDQFHLDDKVKSLLCSLICYRSSMTAEQVLNAECFLMPKEQSVPNPEKDTEYTLYKKEEEIKTENLDKCMEKTRNGEANFDC

SEQ ID NO: 221658 - protein, 1019 aa, Artificial Sequence
  derived and/or modified sequence
MWVQGHSSRASATESVSFSGIVQMDEDTHYDKVEDVVGSHIEDAVTFWAQSINRNKDIMKIGCSLSEVCPQASSVLGNLDPNKIYGGLFSEDQCWYRCKVLKIISVEKCLVRYIDYGNTEILNRSDIVEIPLELQFSSVAKKYKLWGLHIPSDQEVTQFDQGTTFLGSLIFEKEIKMRIKATSEDGTVIAQAEYGSVDIGEEVLKKGFAEKCRLASRTDICEEKKLDPGQLVLRNLKSPIPLWGHRSNQSTFSRPKGHLSEKMTLDLKDENDAGNLITFPKESLAVGDFNLGSNVSLEKIKQDQKLIEENEKLKTEKDALLESYKALELKVEQIAQELQQEKAAAVDLTNHLEYTLKTYIDTRMKNLAAKMEILKEMRHVDISVRFGKDLSDAIQVLDEGCFTTPASLNGLEIIWAEYSLAQENIKTCEYVSEGNILIAQRNEMQQKLYMSVEDFILEVDESSLNKRLKTLQDLSVSLEAVYGQAKEGANSDEILKKFYDWKCDKREEFTSVRSETDASLHRLVAWFQRTLKVFDLSVEGSLISEDAMDNIDEILEKTESSVCKELEIALVDQGDADKEIISNTYSQVLQKIHSEERLIATVQAKYKDSIEFKKQLIEYLNKSPSVDHLLSIKKTLKSLKALLRWKLVEKSNLEESDDPDGSQIEKIKEEITQLRNNVFQEIYHEREEYEMLTSLAQKWFPELPLLHPEIGLLKYMNSGGLLTMSLERDLLDAEPMKELSSKRPLVRSEVNGQIILLKGYSVDVDTEAKVIERAATYHRAWREAEGDSGLLPLIFLFLCKSDPMAYLMVPYYPRANLNAVQANMPLNSEETLKVMKGVAQGLHTLHKADIIHGSLHQNNVFALNREQGIVGDFDFTKSVSQRASVNMMVGDLSLMSPELKMGKPASPGSDLYAYGCLLLWLSVQNQEFEINKDGIPKVDQFHLDDKVKSLLCSLICYRSSMTAEQVLNAECFLMPKEQSVPNPEKDTEYTLYKKEEEIKTENLDKCMEKTRNGEANFDC

SEQ ID NO: 221659 - DNA, 3060 bp, Artificial Sequence
  derived and/or modified sequence
atgtgggtacaggggcacagctcgcgagcgtccgctactgagtccgtctctttctcaggaatagtccagatggatgaggacacccactatgataaggtagaagacgtcgtgggttctcacatagaagacgccgttacgttttgggctcagtccatcaataggaataaggatatcatgaagatcggatgttccctctcagaagtgtgccctcaggccagctctgtattggggaacctggaccctaataaaatttatggcgggcttttcagcgaggatcagtgctggtacagatgcaaggtcctcaagatcatctctgtggagaaatgcctggttcgttacattgactacggaaatactgagattttgaacagatccgacatcgttgagataccactcgagcttcagttttctagtgtcgctaagaaatataaattgtgggggctgcacataccttctgatcaagaagttacgcagttcgaccaggggacgacgttccttggttccctgattttcgagaaagagatcaagatgcgcataaaagccacatccgaggatggaacagtgatcgcgcaagccgagtatggctccgtggacataggagaggaagtgctgaaaaaaggatttgcagaaaagtgtcgactggcaagtcgtaccgacatttgtgaagagaaaaagctggacccaggtcagctggtactgcgtaacctgaagtcgccgattcccctctggggccatagaagtaaccaatctacattctcaagaccaaagggtcatttatcagagaagatgaccctggacctcaaagacgaaaatgatgctggaaacttgatcacctttccaaaagaatcattggcagtcggcgattttaatctgggcagtaacgtcagtcttgagaagatcaagcaagaccagaagcttatcgaggaaaacgaaaaactaaaaacagaaaaggatgccctcctggaatcgtacaaagcgcttgaactaaaggtggaacagattgctcaggagctgcagcaggagaaggcagccgcggtagatctgacaaaccaccttgagtacacacttaaaacgtacatcgatacaaggatgaagaacttagctgcaaagatggaaatcctcaaggagatgcgtcacgtcgatatatcagtgcggttcggcaaggacctttctgatgcaatccaggtacttgatgagggttgcttcaccaccccggcgagtttgaatgggcttgaaatcatctgggcagaatattccctcgcacaagagaacattaaaacttgcgagtacgtgagtgaaggcaatattttgattgcgcaacggaatgagatgcagcaaaaactgtacatgagcgttgaggatttcatcctagaggtggacgagtcttcactgaacaaacgccttaagaccttgcaggacctcagcgtgtcgctggaagccgtttatggccaagcgaaggagggggctaacagtgatgaaattcttaaaaaattctatgattggaaatgcgacaagagagaggaatttacgtcagtgcgcagcgagacagacgcgagtcttcaccgcctcgtggcgtggtttcagaggaccctgaaggtgtttgacctttcagtagaaggctccttgatctccgaggacgcaatggacaatattgatgagatactggagaaaaccgaatcatccgtgtgcaaagagttggagatcgcactcgttgaccaaggcgatgccgataaggaaataatctccaatacatatagtcaggtcctgcagaagatccacagtgaggagcggctgatcgctaccgttcaggcaaaatacaaagatagcattgaattcaaaaagcagctcatcgagtatctaaacaaatctccgagcgtggatcacctgctttctatcaaaaaaaccttgaagtcgctaaaggccctcctgaggtggaaactcgtggagaaaagtaatctggaggaatccgacgaccctgatggctcccagatcgaaaaaatcaaggaagagatcacacagcttcgcaacaacgtgtttcaggagatatatcacgaaagagaagagtacgagatgctgactagcctggcccagaaatggtttcctgaacttcctttattgcacccggaaatcgggctccttaaatatatgaacagcggcggactgttaacaatgagccttgaacgagacctcttggacgccgaacccatgaaagagctgagttcaaaacggccactggttcggagtgaagtgaacggacagatcatcctcctgaaggggtatagcgtggatgtagacactgaggctaaggtcatcgagagggcagccacttatcatagagcttggagggaagctgagggcgatagtggactgcttcctcttatcttcttatttctgtgcaagtccgaccccatggcatacctgatggtgccatactaccctcgagccaatcttaatgcggtgcaggccaatatgcccttaaactcggaagagaccctgaaagtaatgaaaggagtggcccagggattacatactctacacaaagcggacatcatccacgggtctctccaccagaacaacgtcttcgccctaaaccgcgaacaggggattgtgggggatttcgatttcacgaagagcgtatcccagcgcgcatccgtaaacatgatggttggtgacttgagcttgatgtccccggagctcaagatgggcaagcctgcttcacctgggtctgacctgtatgcctacggctgccttttgctctggttaagcgtccagaaccaggagtttgagattaataaagatggcatccctaaggtcgatcagtttcacctcgacgacaaagtgaagtctctcctgtgttccctcatctgttatcggtcatctatgaccgccgagcaggtgctcaacgcagagtgcttcctcatgcccaaagaacaatctgtgcctaaccccgagaaagataccgagtataccctatataaaaaagaagaggagattaagactgagaatctggataaatgtatggagaaaacccgcaacggcgaggcaaactttgactgctag

SEQ ID NO: 221660 - DNA, 3060 bp, Artificial Sequence
  derived and/or modified sequence
atgtgggtgcagggccacagcagccgggccagcgccacagaatctgtgtccttctctggaattgtgcagatggatgaggacacccactatgacaaggtggaggatgtggtgggcagccacattgaagatgctgtgaccttctgggcccagagcatcaacagaaacaaggacatcatgaagattggctgcagcctgtctgaggtgtgcccccaggccagctctgtgctgggcaacctggaccccaacaagatctatggaggcctcttcagcgaggaccagtgctggtaccgctgcaaggtgctgaagatcatctctgtggagaagtgcctggtgcgctacatcgactatggcaacacagagatcctgaacagaagtgacatcgtggagatccccctggagctgcagttcagctctgtggccaagaagtacaagctgtggggcctgcacatccccagcgaccaggaggtgacccagtttgaccagggcaccaccttcctgggcagcctcatctttgagaaggagatcaagatgaggatcaaggccaccagtgaagatggcaccgtgattgcccaggccgagtatggctctgtggacattggagaggaggtgctgaagaagggctttgctgagaagtgccgcctggccagcaggacagacatctgtgaggagaagaagctggaccccggccagctggtgctgaggaacctgaagagccccatccccctgtggggccacaggagcaaccagagcaccttcagccggcccaagggccacctgtctgagaagatgaccctggacctgaaggatgaaaatgatgctggcaacctgatcaccttccccaaggagagcctggccgtgggggacttcaacctgggcagcaatgtgtccctggagaagatcaagcaggaccagaagctgattgaagaaaatgagaagctgaagacagagaaggatgccctgctggagagctacaaggccctggagctgaaggtggagcagatcgcccaggagctgcagcaggagaaggctgctgctgtggacctgaccaaccacctggagtacaccctgaagacctacatcgacaccaggatgaagaacctggccgccaagatggagatcctgaaggagatgagacatgtggacatctctgtgcgctttgggaaggacctgagtgatgccatccaggtgctggatgagggctgcttcaccaccccagccagcctgaatggcctggagatcatctgggccgagtacagcctggcccaggagaacatcaagacctgtgaatatgtgtctgagggcaacatcctgattgcccagagaaatgagatgcagcagaagctgtacatgtctgtggaggacttcatcctggaggtggatgagagcagcctgaacaagaggctgaagaccctgcaggacctgtctgtgtccctggaggccgtgtatggccaggccaaggagggcgccaacagtgatgagatcctgaagaagttctatgactggaagtgtgacaagcgggaggagttcacctctgtgcgctcagaaacagatgccagcctgcaccggctggtggcctggttccagaggaccctgaaggtgtttgacctgtctgtggagggcagcctcatcagtgaagatgccatggacaacattgatgagatcctggagaagacagagagctctgtgtgcaaggagctggagatcgccctggtggaccagggagatgctgacaaggagatcatcagcaacacctacagccaggtgctgcagaagatccacagcgaggagcggctgattgccaccgtgcaggccaagtacaaggacagcattgagttcaagaagcagctgattgagtacctgaacaagagccccagcgtggaccacctgctgagcatcaagaagaccctgaagagcctgaaggccctgctgcgctggaagctggtggagaagagcaacctggaggagagtgatgatcctgatggcagccagatcgagaagatcaaggaggagatcacccagctgagaaataatgtgttccaggagatctaccacgagcgggaggagtatgagatgctgaccagcctggcccagaagtggttccctgagctgcccctgctgcaccctgagatcggcctgctgaagtacatgaacagcggcggcctgctgaccatgagcctggagcgggacctgctggatgctgagcccatgaaggagctgagcagcaagaggcccctggtgcgctctgaggtgaatggccagatcatcctgctgaagggctacagcgtggatgtggacacagaggccaaggtgattgagcgggccgccacctaccaccgggcctggagggaggccgagggggacagcggcctgctgcccctcatcttcctgttcctgtgcaagagtgaccccatggcctacctgatggtgccctactacccccgggccaacctgaatgctgtgcaggccaacatgcccctgaacagcgaggagaccctgaaggtgatgaagggcgtggcccagggcctgcacaccctgcacaaggctgacatcatccacggcagcctgcaccagaacaacgtgtttgccctgaaccgggagcagggcatcgtgggggactttgacttcaccaagtctgtgtcccagagggcctctgtgaacatgatggtgggggacctgagcctgatgagccctgagctgaagatgggcaagccagccagccctggcagtgacctgtatgcctacggctgcctgctgctgtggctgtctgtgcagaaccaggagtttgagatcaacaaggatggcatccccaaggtggaccagttccacctggatgacaaggtgaagagcctgctgtgcagcctcatctgctaccgcagctccatgacagctgagcaggtgctgaatgctgagtgcttcctgatgcccaaggagcagagcgtgcccaaccctgagaaggacacagagtacaccctgtacaagaaggaggaggagatcaagacagagaacctggacaagtgcatggagaagaccagaaatggagaggccaactttgactgctag

SEQ ID NO: 221661 - DNA, 3060 bp, Artificial Sequence
  derived and/or modified sequence
atgtgggtgcagggccacagcagccgggccagcgccaccgagagcgtgtccttctctggtatcgtgcagatggatgaggatacccattacgacaaggtcgaggacgtggtcggttctcatatcgaggacgcggtgacattttgggctcaaagtatcaaccgcaacaaagatatcatgaaaatcggatgctccctgtcagaagtctgcccccaggcctcatctgttcttggcaacctggacccgaacaaaatctacggagggctgttcagtgaggaccagtgctggtatcgctgtaaggtgctgaagatcatatctgtggagaaatgtctggtaaggtacatcgattacggcaacacagaaatcctaaatcggagcgatatcgtggaaatcccattagaactgcagtttagctcggttgccaaaaaatacaaactttggggcctccacataccctccgaccaagaggtgacacaatttgaccagggcacaacctttttaggcagtctgatcttcgagaaagaaataaagatgcgaatcaaggctacttcagaggacggtacagttatcgcacaggcagagtacggcagcgtggatataggagaggaggtgctcaagaagggatttgccgaaaagtgccgcctcgcgtcccggaccgatatttgtgaagaaaagaagctggatccagggcagttagtgctacgtaatctgaagtcgccaatcccactgtggggtcatcgatccaaccaatcaacattcagtagacccaagggccatttaagcgaaaagatgactctggatctgaaagatgagaacgatgcaggcaatctcattacattcccaaaggagtctctcgccgtaggcgacttcaatctgggctcaaatgtctctctcgagaagatcaaacaggatcagaagttaattgaggagaacgagaaactgaaaacggaaaaagatgcactgctggagtcttacaaagcacttgagctgaaagtcgagcaaatcgcccaggaactgcagcaggagaaggctgccgccgtggatctcacaaaccacctggagtatacccttaaaacctatattgacacgcgaatgaagaatctggccgccaaaatggaaattcttaaagagatgcggcacgttgacattagtgttcggtttgggaaagatttaagtgacgccattcaggtcctcgatgaaggatgctttactaccccggcctctctcaatggcctggaaattatctgggccgaatattctctcgcacaggagaatattaagacttgcgaatatgtcagcgagggcaacatcctcatcgcccagagaaatgagatgcagcagaaactgtatatgtcggtggaagatttcatactggaggtggacgagtcatcgctgaataagcgactgaagactctccaggatctgtctgtctccttagaggcagtgtacggtcaggctaaggagggcgctaactcagacgaaattctgaaaaagttctacgactggaagtgcgataaaagagaagagttcacgagcgtgagaagcgaaactgatgcatctctgcaccgtttggtggcttggtttcagagaaccttgaaagtgtttgacttgtcggtcgaaggcagcctcataagtgaagacgccatggataatatcgacgagatcttagagaagacggaatcatctgtctgtaaagaactggaaatagccctggtcgatcagggagatgccgataaagagattattagcaacacatattctcaggtgctccagaaaattcactcagaggaacgccttatcgcaacggtgcaggcaaagtacaaagactccattgagttcaaaaaacagctcattgagtatctgaacaagagtccctctgtggaccacctgttaagcatcaaaaagactctgaaatccctgaaggcgctgctccggtggaagctggtcgagaagtcaaatcttgaagagtccgatgaccccgacggaagtcagatcgaaaagatcaaggaggagataacgcagctgagaaataacgtgttccaggagatctaccacgaacgcgaggaatacgagatgcttacgtccctcgcccagaaatggttcccggagctcccattgctccatcctgagataggactgctaaagtatatgaacagtgggggattgttaacaatgtcacttgaacgggacttactggacgctgagcctatgaaggagcttagcagcaagcgacctcttgtgcggtcagaagttaacggccagataatactcctcaagggatactccgttgatgtagataccgaggcgaaggtgattgaaagagccgccacctaccatagggcctggagagaggccgagggcgattccggtctgctgcccctcattttccttttcctttgtaagagtgaccccatggcctatcttatggtgccatattacccccgggctaatctgaatgccgttcaggccaacatgcctctcaattcagaggagaccctcaaagttatgaaaggcgttgcccaagggttgcacacactccataaggctgacattatacatgggtccctccaccagaataacgtcttcgctctgaaccgcgaacagggaatcgtgggagattttgactttactaaaagcgtctcgcagcgggcgtcggtgaatatgatggtgggagatctgtctctaatgtctccagagctgaagatgggaaagcctgcaagtcccgggtcagatctgtatgcctatggttgtctgctcctttggctgtccgtccagaatcaggaatttgagattaataaagacgggataccaaaagtcgaccagttccacctggatgacaaagtgaagagcctgctttgtagcctaatatgttatcgatcttcgatgaccgccgagcaggtgctgaatgctgagtgcttcctcatgccaaaagagcagtcagtgccgaaccccgaaaaggacactgagtacacactgtacaaaaaagaagaagagatcaagaccgagaacttagataagtgcatggagaagacacggaatggggaagccaattttgactgttag

SEQ ID NO: 221662 - DNA, 3060 bp, Artificial Sequence
  derived and/or modified sequence
atgtgggtacaggggcacagttctagggctagcgctaccgaatccgtaagcttttccgggatcgtgcagatggatgaggacacccattatgataaggtagaggacgttgtgggatctcatatcgaggatgctgttactttttgggcccagagtattaaccggaataaggacattatgaaaatagggtgctctctatcggaagtgtgcccgcaggcttcctcggtcctcgggaacctcgatcctaacaaaatctacgggggactgttctccgaagatcagtgttggtatcggtgcaaagtgctcaagatcatttctgtcgaaaagtgtctggtgaggtatatcgactatggtaacaccgagatcttgaatcgctcagacattgttgagatcccattagagctgcaatttagttctgtcgctaagaaatataagttgtggggccttcacattccatcagatcaggaggtcactcagttcgatcagggaacaaccttcctcggatctctgatctttgagaaagagatcaaaatgcggattaaggccacctctgaggacggtacagtgatcgcccaagccgagtacggctctgtagacatcggagaagaggtcctgaagaaaggatttgctgagaaatgtcgcctggcttcaagaactgatatctgtgaggagaaaaagctggatcccggacagttagtcctgcgtaatctcaaatcccctataccactgtggggtcatcgcagtaatcagtccacattttcaagaccaaaggggcatctgtctgaaaagatgacactcgacctcaaagacgagaacgacgctgggaatttaatcactttcccaaaggagtcactggccgtcggtgattttaatctaggctctaacgtgtccctggaaaaaattaagcaggatcagaagcttatcgaagagaatgaaaagcttaagacagaaaaggacgctctgctggaatcctataaggccctcgagctaaaggtggagcagatcgcacaggaactgcagcaggagaaggccgcagccgtggatcttaccaaccatctcgaatataccctgaaaacctatatcgatactcggatgaagaatctagccgcaaagatggagatcctgaaggagatgcgccacgttgatatctctgtgaggtttggcaaggacttaagtgacgctatccaggtgttggatgaaggatgttttacgacacctgcatccctaaatggattggaaatcatctgggcggaatactcgttagctcaggaaaatatcaaaacctgtgagtatgtctccgaggggaatatactaatcgcccaacggaatgaaatgcagcagaaactctatatgtccgtggaggactttatcctcgaagtggatgagagcagcctgaataagagactgaagactctgcaagatttgtcagtaagtttggaagccgtgtacggacaggctaaagaaggcgcaaatagtgacgagatactgaaaaaattctatgactggaaatgtgataaaagagaggagtttactagcgttcggagtgagaccgatgcaagcttgcatcgtctcgtagcatggtttcaacggacactgaaggtcttcgacctgagtgtggaaggaagtctcattagtgaagacgccatggataatattgacgaaatactggagaagacagaaagcagcgtatgtaaggagctcgagattgccttggttgatcagggtgacgcggataaagagattatttccaacacctactctcaggtgttgcaaaagatacacagcgaggaacggctaatcgccacagttcaggcgaagtacaaggattcgattgaatttaagaaacagctcatcgagtatctcaataaatctccatccgtagaccatctgctgtctatcaaaaagaccctgaagagcctgaaagccctactgagatggaagctggtggaaaaatccaatcttgaagagtcagacgaccctgacggaagtcaaattgagaagatcaaggaggaaattacccagcttaggaacaatgtgtttcaagaaatctaccatgaacgggaagaatacgagatgctcacctccctagcgcagaaatggtttcctgaactccctctgttgcaccctgagatcggcctgttaaaatatatgaactccggcggactcctgaccatgtcattggaacgggacttgctagacgctgagcctatgaaagaactgtcttcaaaaaggcccctggtgcggtctgaagttaatgggcagatcattctcctgaaaggctacagtgtagacgtggacacagaagccaaagtcattgaaagagccgctacctaccatcgagcctggagagaggccgagggggattccgggctgctaccattgatttttctattcttatgcaagtctgatcccatggcatacctgatggtcccctactaccctagagccaacttgaacgcagtgcaggccaatatgcccctgaactcagaggaaaccctgaaggtaatgaaaggggttgctcaagggcttcacactttacacaaggctgacattattcacggtagtctacaccagaataacgtttttgccctaaatagagaacaaggcattgttggcgatttcgattttactaagagtgtttctcagcgcgcatccgtaaacatgatggtgggcgatctcagtctgatgagccctgagctcaagatgggcaagccggcaagcccaggctctgatctgtatgcatacggctgtttactcttgtggctgtccgtccagaatcaggagtttgaaatcaataaagatgggattccgaaggttgaccaattccacttggatgataaagtaaaaagcctgctctgttccctgatttgttatcgatcttctatgacggcagagcaggtgttgaacgccgagtgcttcctaatgcctaaggaacagagtgtgcctaacccagaaaaggacaccgagtatactctttacaagaaggaagaggagatcaaaaccgagaatcttgacaaatgtatggaaaaaactcggaacggagaggcgaatttcgactgttag

SEQ ID NO: 221663 - DNA, 3596 bp, Artificial Sequence
  derived and/or modified sequence
aaagtgtgaggtcagtagtagtttttgtggtacgtgcagtggtggccgcttcaaggactattttcgtcgctgcttgcgttttaagtctccaatcctgggacgaggcccatttcagggttttctgtcaccttctagccgcccgccaccccagaggggtgccagatgccccagtttttgagtgcatgcaggcaggcgaaagtggctcgaaaagacctccggcctgaatgatctccatgaagacgcggtcacgcagcctccacactctcttccccttctcgaaaattctgtgccatttaagtttcaaaatcccttataaaataagtgtcagagagctacgtgtacccgtttcttccaaattttcatcacgaagtggagatttggacgtactattttgtgatctctgtttgcagaaagtgggtacggcatcagtgccttcataatcaggtttttcaggaattgttcaaatggatgaagatacacattacgataaagtggaagatgtggttggaagtcacatagaagatgcagtaacattttgggcccagagtatcaatagaaataaggatatcatgaagattggttgctcactgtctgaagtttgcccccaggccagttcagttttggggaatcttgacccaaacaagatttatggtggattattttctgaagatcagtgttggtacagatgcaaagtactgaaaatcatcagcgttgaaaagtgtctggtgaggtacattgactatggaaatactgaaattctaaatcgatctgatatagttgaaattcctttggagctgcagttttctagtgttgccaaaaagtataaactttggggactacacattccttctgatcaagaagttacccagtttgatcagggcacaacctttttggggagcttgatttttgaaaaggaaataaaaatgagaattaaagcaacctctgaagatggaacagttattgctcaggctgagtatggcagtgtggatataggggaagaggtgcttaagaaaggatttgcagagaaatgcagacttgcttccagaactgacatctgtgaggaaaaaaaattggatcctggtcaacttgttctcaggaacctcaaaagccccattcctttgtgggggcatagatcaaaccagtcaaccttcagcaggcccaaggggcacttaagtgagaaaatgactcttgacttgaaggatgaaaatgatgcaggcaatcttataacatttccaaaggaaagtttggctgttggtgactttaatttagggtctaacgtcagcctggaaaaaattaagcaggaccagaaactgattgaagaaaatgaaaaacttaaaacagagaaggacgctcttcttgaaagttataaggcgttagaattgaaagtagagcagattgcccaggagctgcagcaagagaaggcagctgctgtggatttgactaaccacttagaatacactctgaagacctatatagataccagaatgaaaaatctggcagctaagatggaaatactgaaagaaatgaggcatgtcgacatcagtgtccgtttcggaaaagacctttcagatgctatacaagtgttggatgaagggtgctttactactccagcttctttgaatggattagagataatatgggcagaatacagtctggctcaggagaatattaaaacttgtgaatatgtgagtgaagggaatattttgattgcccaaagaaatgaaatgcagcagaagctgtacatgtcagtagaagattttattctggaagttgatgagtcatctcttaataaacgcttaaaaacattgcaggatttgtcagtctctttagaagcagtgtatggacaagccaaagaaggagcaaattctgatgaaatacttaaaaaattttatgactggaagtgtgataaaagagaggagttcaccagtgttagaagtgaaacagacgcttctctgcaccgtcttgtagcatggttccaaagaaccttaaaggtttttgacctatctgtggaaggatcactgatttcagaagacgcaatggataatattgatgaaatcctagagaagactgagtcaagtgtctgcaaagagctggagatagctctggttgatcaaggtgatgcagacaaggagataatttcaaatacatatagtcaagtactgcaaaagattcattcagaggaaaggctcattgccacagtacaagctaagtacaaggacagtattgagtttaaaaagcagcttattgaatatttaaataagagtcccagtgtggatcacttgctatccattaagaagacattgaaaagcttaaaagctctactcagatggaaattggttgaaaagagtaatttggaagagtcagatgatcctgatggctctcaaattgagaaaataaaagaagaaataactcagctgcgcaataatgtctttcaggaaatttatcatgagagagaggaatatgagatgctaactagtttggcacagaaatggttccctgagctgcctctgcttcatcctgaaataggattactcaaatacatgaactctggtggtctccttacaatgagcttggaacgagatcttcttgatgctgagcccatgaaggaacttagcagcaagcgtcctttggtacgttctgaggttaatgggcagataattctgttaaagggctattctgtggatgttgacacagaagccaaggtgattgagagagcagccacctaccatagagcttggagagaagctgaaggagactcagggttactgccattgatattcctgtttttatgtaagtctgatcctatggcttatctgatggtcccatactaccctagggcaaacctgaatgctgttcaagccaacatgcctttaaattcagaagaaactttaaaggtcatgaaaggtgttgcccagggtctgcatacattgcataaggctgacataattcatggatcacttcatcagaacaatgtatttgctttaaaccgtgaacaaggaattgttggagattttgacttcaccaaatctgtgagtcagcgagcctcggtgaacatgatggttggtgacttgagtttgatgtcacctgagttgaaaatgggaaaacctgcttctccaggttcagacttatatgcttatggctgcctcttattatggctttctgttcaaaatcaggagtttgagataaataaagatggaatccccaaagtggatcagtttcatctggatgataaagtcaaatccctcctctgtagcttgatatgttatagaagttcaatgactgctgaacaagttttaaatgctgaatgtttcttgatgccaaaggagcaatcagttccaaacccagaaaaagatactgaatacaccctatataaaaaggaagaagaaataaagacggagaacttggataaatgtatggagaagacaagaaatggtgaagccaactttgattgttaaattattattgttgttgttgcagaggttctttttaaaaactttggtttggttaatacacagaaatatctagaaatgttctgggactagttgagttgtatctttagtattcaggttgtgaaaaataaagatgtttggctatgc

SEQ ID NO: 221664 - DNA, 3326 bp, Artificial Sequence
  derived and/or modified sequence
aacaccggatgatggcgcagcgctgtgcacgcaggcgcagtgtggggcccttgcggtcgaagctcacgcggtaagccgctgcacgtgtgctacggcgggcggagggccgaaagtccagtatgtgggtccagggtcactcttctagagcttccgcaacggaaagtgtgagtttttcaggaattgttcaaatggatgaagatacacattacgataaagtggaagatgtggttggaagtcacatagaagatgcagtaacattttgggcccagagtatcaatagaaataaggatatcatgaagattggttgctcactgtctgaagtttgcccccaggccagttcagttttggggaatcttgacccaaacaagatttatggtggattattttctgaagatcagtgttggtacagatgcaaagtactgaaaatcatcagcgttgaaaagtgtctggtgaggtacattgactatggaaatactgaaattctaaatcgatctgatatagttgaaattcctttggagctgcagttttctagtgttgccaaaaagtataaactttggggactacacattccttctgatcaagaagttacccagtttgatcagggcacaacctttttggggagcttgatttttgaaaaggaaataaaaatgagaattaaagcaacctctgaagatggaacagttattgctcaggctgagtatggcagtgtggatataggggaagaggtgcttaagaaaggatttgcagagaaatgcagacttgcttccagaactgacatctgtgaggaaaaaaaattggatcctggtcaacttgttctcaggaacctcaaaagccccattcctttgtgggggcatagatcaaaccagtcaaccttcagcaggcccaaggggcacttaagtgagaaaatgactcttgacttgaaggatgaaaatgatgcaggcaatcttataacatttccaaaggaaagtttggctgttggtgactttaatttagggtctaacgtcagcctggaaaaaattaagcaggaccagaaactgattgaagaaaatgaaaaacttaaaacagagaaggacgctcttcttgaaagttataaggcgttagaattgaaagtagagcagattgcccaggagctgcagcaagagaaggcagctgctgtggatttgactaaccacttagaatacactctgaagacctatatagataccagaatgaaaaatctggcagctaagatggaaatactgaaagaaatgaggcatgtcgacatcagtgtccgtttcggaaaagacctttcagatgctatacaagtgttggatgaagggtgctttactactccagcttctttgaatggattagagataatatgggcagaatacagtctggctcaggagaatattaaaacttgtgaatatgtgagtgaagggaatattttgattgcccaaagaaatgaaatgcagcagaagctgtacatgtcagtagaagattttattctggaagttgatgagtcatctcttaataaacgcttaaaaacattgcaggatttgtcagtctctttagaagcagtgtatggacaagccaaagaaggagcaaattctgatgaaatacttaaaaaattttatgactggaagtgtgataaaagagaggagttcaccagtgttagaagtgaaacagacgcttctctgcaccgtcttgtagcatggttccaaagaaccttaaaggtttttgacctatctgtggaaggatcactgatttcagaagacgcaatggataatattgatgaaatcctagagaagactgagtcaagtgtctgcaaagagctggagatagctctggttgatcaaggtgatgcagacaaggagataatttcaaatacatatagtcaagtactgcaaaagattcattcagaggaaaggctcattgccacagtacaagctaagtacaaggacagtattgagtttaaaaagcagcttattgaatatttaaataagagtcccagtgtggatcacttgctatccattaagaagacattgaaaagcttaaaagctctactcagatggaaattggttgaaaagagtaatttggaagagtcagatgatcctgatggctctcaaattgagaaaataaaagaagaaataactcagctgcgcaataatgtctttcaggaaatttatcatgagagagaggaatatgagatgctaactagtttggcacagaaatggttccctgagctgcctctgcttcatcctgaaataggattactcaaatacatgaactctggtggtctccttacaatgagcttggaacgagatcttcttgatgctgagcccatgaaggaacttagcagcaagcgtcctttggtacgttctgaggttaatgggcagataattctgttaaagggctattctgtggatgttgacacagaagccaaggtgattgagagagcagccacctaccatagagcttggagagaagctgaaggagactcagggttactgccattgatattcctgtttttatgtaagtctgatcctatggcttatctgatggtcccatactaccctagggcaaacctgaatgctgttcaagccaacatgcctttaaattcagaagaaactttaaaggtcatgaaaggtgttgcccagggtctgcatacattgcataaggctgacataattcatggatcacttcatcagaacaatgtatttgctttaaaccgtgaacaaggaattgttggagattttgacttcaccaaatctgtgagtcagcgagcctcggtgaacatgatggttggtgacttgagtttgatgtcacctgagttgaaaatgggaaaacctgcttctccaggttcagacttatatgcttatggctgcctcttattatggctttctgttcaaaatcaggagtttgagataaataaagatggaatccccaaagtggatcagtttcatctggatgataaagtcaaatccctcctctgtagcttgatatgttatagaagttcaatgactgctgaacaagttttaaatgctgaatgtttcttgatgccaaaggagcaatcagttccaaacccagaaaaagatactgaatacaccctatataaaaaggaagaagaaataaagacggagaacttggataaatgtatggagaagacaagaaatggtgaagccaactttgattgttaaattattattgttgttgttgcagaggttctttttaaaaactttggtttggttaatacacagaaatatctagaaatgttctgggactagttgagttgtatctttagtattcaggttgtgaaaaataaagatgtttggctatgcacaaaa

SEQ ID NO: 221665 - DNA, 3512 bp, Artificial Sequence
  derived and/or modified sequence
aaggactattttcgtcgctgcttgcgttttaagtctccaatcctgggacgaggcccatttcagggttttctgtcaccttctagccgcccgccaccccagaggggtgccagatgccccagtttttgagtgcatgcaggcaggcgaaagtggctcgaaaagacctccggcctgaatgatctccatgaagacgcggtcacgcagcctccacactctcttccccttctcgaaaattctgtgccatttaagtttcaaaatcccttataaaataagtgtcagagagctacgtgtacccgtttcttccaaattttcatcacgaagtggagatttggacgtactattttgtgatctctgtttgcagaaatttttcaggaattgttcaaatggatgaagatacacattacgataaagtggaagatgtggttggaagtcacatagaagatgcagtaacattttgggcccagagtatcaatagaaataaggatatcatgaagattggttgctcactgtctgaagtttgcccccaggccagttcagttttggggaatcttgacccaaacaagatttatggtggattattttctgaagatcagtgttggtacagatgcaaagtactgaaaatcatcagcgttgaaaagtgtctggtgaggtacattgactatggaaatactgaaattctaaatcgatctgatatagttgaaattcctttggagctgcagttttctagtgttgccaaaaagtataaactttggggactacacattccttctgatcaagaagttacccagtttgatcagggcacaacctttttggggagcttgatttttgaaaaggaaataaaaatgagaattaaagcaacctctgaagatggaacagttattgctcaggctgagtatggcagtgtggatataggggaagaggtgcttaagaaaggatttgcagagaaatgcagacttgcttccagaactgacatctgtgaggaaaaaaaattggatcctggtcaacttgttctcaggaacctcaaaagccccattcctttgtgggggcatagatcaaaccagtcaaccttcagcaggcccaaggggcacttaagtgagaaaatgactcttgacttgaaggatgaaaatgatgcaggcaatcttataacatttccaaaggaaagtttggctgttggtgactttaatttagggtctaacgtcagcctggaaaaaattaagcaggaccagaaactgattgaagaaaatgaaaaacttaaaacagagaaggacgctcttcttgaaagttataaggcgttagaattgaaagtagagcagattgcccaggagctgcagcaagagaaggcagctgctgtggatttgactaaccacttagaatacactctgaagacctatatagataccagaatgaaaaatctggcagctaagatggaaatactgaaagaaatgaggcatgtcgacatcagtgtccgtttcggaaaagacctttcagatgctatacaagtgttggatgaagggtgctttactactccagcttctttgaatggattagagataatatgggcagaatacagtctggctcaggagaatattaaaacttgtgaatatgtgagtgaagggaatattttgattgcccaaagaaatgaaatgcagcagaagctgtacatgtcagtagaagattttattctggaagttgatgagtcatctcttaataaacgcttaaaaacattgcaggatttgtcagtctctttagaagcagtgtatggacaagccaaagaaggagcaaattctgatgaaatacttaaaaaattttatgactggaagtgtgataaaagagaggagttcaccagtgttagaagtgaaacagacgcttctctgcaccgtcttgtagcatggttccaaagaaccttaaaggtttttgacctatctgtggaaggatcactgatttcagaagacgcaatggataatattgatgaaatcctagagaagactgagtcaagtgtctgcaaagagctggagatagctctggttgatcaaggtgatgcagacaaggagataatttcaaatacatatagtcaagtactgcaaaagattcattcagaggaaaggctcattgccacagtacaagctaagtacaaggacagtattgagtttaaaaagcagcttattgaatatttaaataagagtcccagtgtggatcacttgctatccattaagaagacattgaaaagcttaaaagctctactcagatggaaattggttgaaaagagtaatttggaagagtcagatgatcctgatggctctcaaattgagaaaataaaagaagaaataactcagctgcgcaataatgtctttcaggaaatttatcatgagagagaggaatatgagatgctaactagtttggcacagaaatggttccctgagctgcctctgcttcatcctgaaataggattactcaaatacatgaactctggtggtctccttacaatgagcttggaacgagatcttcttgatgctgagcccatgaaggaacttagcagcaagcgtcctttggtacgttctgaggttaatgggcagataattctgttaaagggctattctgtggatgttgacacagaagccaaggtgattgagagagcagccacctaccatagagcttggagagaagctgaaggagactcagggttactgccattgatattcctgtttttatgtaagtctgatcctatggcttatctgatggtcccatactaccctagggcaaacctgaatgctgttcaagccaacatgcctttaaattcagaagaaactttaaaggtcatgaaaggtgttgcccagggtctgcatacattgcataaggctgacataattcatggatcacttcatcagaacaatgtatttgctttaaaccgtgaacaaggaattgttggagattttgacttcaccaaatctgtgagtcagcgagcctcggtgaacatgatggttggtgacttgagtttgatgtcacctgagttgaaaatgggaaaacctgcttctccaggttcagacttatatgcttatggctgcctcttattatggctttctgttcaaaatcaggagtttgagataaataaagatggaatccccaaagtggatcagtttcatctggatgataaagtcaaatccctcctctgtagcttgatatgttatagaagttcaatgactgctgaacaagttttaaatgctgaatgtttcttgatgccaaaggagcaatcagttccaaacccagaaaaagatactgaatacaccctatataaaaaggaagaagaaataaagacggagaacttggataaatgtatggagaagacaagaaatggtgaagccaactttgattgttaaattattattgttgttgttgcagaggttctttttaaaaactttggtttggttaatacacagaaatatctagaaatgttctgggactagttgagttgtatctttagtattcaggttgtgaaaaataaagatgtttggctatgc

SEQ ID NO: 221666 - DNA, 3060 bp, Artificial Sequence
  derived and/or modified sequence
atgtgggtgcagggccacagcagcagagccagcgccaccgagagcgtgagcttcagcggcatcgtgcagatggacgaggacacccactacgacaaggtggaggacgtggtgggcagccacatcgaggacgccgtgaccttctgggcccagagcatcaacagaaacaaggacatcatgaagatcggctgcagcctgagcgaggtgtgcccccaggccagcagcgtgctgggcaacctggaccccaacaagatctacggcggcctgttcagcgaggaccagtgctggtacagatgcaaggtgctgaagatcatcagcgtggagaagtgcctggtgagatacatcgactacggcaacaccgagatcctgaacagaagcgacatcgtggagatccccctggagctgcagttcagcagcgtggccaagaagtacaagctgtggggcctgcacatccccagcgaccaggaggtgacccagttcgaccagggcaccaccttcctgggcagcctgatcttcgagaaggagatcaagatgagaatcaaggccaccagcgaggacggcaccgtgatcgcccaggccgagtacggcagcgtggacatcggcgaggaggtgctgaagaagggcttcgccgagaagtgcagactggccagcagaaccgacatctgcgaggagaagaagctggaccccggccagctggtgctgagaaacctgaagagccccatccccctgtggggccacagaagcaaccagagcaccttcagcagacccaagggccacctgagcgagaagatgaccctggacctgaaggacgagaacgacgccggcaacctgatcaccttccccaaggagagcctggccgtgggcgacttcaacctgggcagcaacgtgagcctggagaagatcaagcaggaccagaagctgatcgaggagaacgagaagctgaagaccgagaaggacgccctgctggagagctacaaggccctggagctgaaggtggagcagatcgcccaggagctgcagcaggagaaggccgccgccgtggacctgaccaaccacctggagtacaccctgaagacctacatcgacaccagaatgaagaacctggccgccaagatggagatcctgaaggagatgagacacgtggacatcagcgtgagattcggcaaggacctgagcgacgccatccaggtgctggacgagggctgcttcaccacccccgccagcctgaacggcctggagatcatctgggccgagtacagcctggcccaggagaacatcaagacctgcgagtacgtgagcgagggcaacatcctgatcgcccagagaaacgagatgcagcagaagctgtacatgagcgtggaggacttcatcctggaggtggacgagagcagcctgaacaagagactgaagaccctgcaggacctgagcgtgagcctggaggccgtgtacggccaggccaaggagggcgccaacagcgacgagatcctgaagaagttctacgactggaagtgcgacaagagagaggagttcaccagcgtgagaagcgagaccgacgccagcctgcacagactggtggcctggttccagagaaccctgaaggtgttcgacctgagcgtggagggcagcctgatcagcgaggacgccatggacaacatcgacgagatcctggagaagaccgagagcagcgtgtgcaaggagctggagatcgccctggtggaccagggcgacgccgacaaggagatcatcagcaacacctacagccaggtgctgcagaagatccacagcgaggagagactgatcgccaccgtgcaggccaagtacaaggacagcatcgagttcaagaagcagctgatcgagtacctgaacaagagccccagcgtggaccacctgctgagcatcaagaagaccctgaagagcctgaaggccctgctgagatggaagctggtggagaagagcaacctggaggagagcgacgaccccgacggcagccagatcgagaagatcaaggaggagatcacccagctgagaaacaacgtgttccaggagatctaccacgagagagaggagtacgagatgctgaccagcctggcccagaagtggttccccgagctgcccctgctgcaccccgagatcggcctgctgaagtacatgaacagcggcggcctgctgaccatgagcctggagagagacctgctggacgccgagcccatgaaggagctgagcagcaagagacccctggtgagaagcgaggtgaacggccagatcatcctgctgaagggctacagcgtggacgtggacaccgaggccaaggtgatcgagagagccgccacctaccacagagcctggagagaggccgagggcgacagcggcctgctgcccctgatcttcctgttcctgtgcaagagcgaccccatggcctacctgatggtgccctactaccccagagccaacctgaacgccgtgcaggccaacatgcccctgaacagcgaggagaccctgaaggtgatgaagggcgtggcccagggcctgcacaccctgcacaaggccgacatcatccacggcagcctgcaccagaacaacgtgttcgccctgaacagagagcagggcatcgtgggcgacttcgacttcaccaagagcgtgagccagagagccagcgtgaacatgatggtgggcgacctgagcctgatgagccccgagctgaagatgggcaagcccgccagccccggcagcgacctgtacgcctacggctgcctgctgctgtggctgagcgtgcagaaccaggagttcgagatcaacaaggacggcatccccaaggtggaccagttccacctggacgacaaggtgaagagcctgctgtgcagcctgatctgctacagaagcagcatgaccgccgagcaggtgctgaacgccgagtgcttcctgatgcccaaggagcagagcgtgcccaaccccgagaaggacaccgagtacaccctgtacaagaaggaggaggagatcaagaccgagaacctggacaagtgcatggagaagaccagaaacggcgaggccaacttcgactgctag

SEQ ID NO: 221667 - protein, 508 aa, Artificial Sequence
  derived and/or modified sequence
MPSMLERISKNLVKEIGSKDLTPVKYLLSATKLRQFVILRKKKDSRSSFWEQSDYVPVEFSLNDILEPSSSVLETVVTGPFHFSDIMIQKHKADMGVNVGIEVSVSGEASVDHGCSLEFQIVTIPSPNLEDFQKRKLLDPEPSFLKECRRRGDNLYVVTEAVELINNTVLYDSSSVNILGKIALWITYGKGQGQGESLRVKKKALTLQKGMVMAYKRKQLVIKEKAILISDDDEQRTFQDEYEISEMVGYCAARSEGLLPSFHTISPTLFNASSNDMKLKPELFLTQQFLSGHLPKYEQVHILPVGRIEEPFWQNFKHLQEEVFQKIKTLAQLSKDVQDVMFYSILAMLRDRGALQDLMNMLELDSSGHLDGPGGAILKKLQQDSNHAWFNPKDPILYLLEAIMVLSDFQHDLLACSMEKRILLQQQELVRSILEPNFRYPWSIPFTLKPELLAPLQSEGLAITYGLLEECGLRMELDNPRSTWDVEAKMPLSALYGTLSLLQQLAEA

SEQ ID NO: 221668 - DNA, 1527 bp, Artificial Sequence
  derived and/or modified sequence
atgccctctatgctggaacgcatctccaagaacttagtcaaagagatcgggtctaaggatttgacccccgtgaagtacctgcttagtgccactaagctccgtcagttcgtgatcctgaggaagaagaaggacagtcgatccagtttctgggagcagtctgattacgtgccggttgagtttagcttgaacgacattctggaaccctcgtcaagcgtgctggaaacggtggtgacaggccctttccacttcagcgatataatgattcagaagcacaaggccgacatgggggttaacgtgggaattgaggtgtccgtgagcggcgaggccagtgtggatcatggctgttccctcgaattccagatagtgaccattccttccccgaatctagaagacttccagaagaggaaactgctggatcccgagccctccttcctgaaggaatgtcgacgcaggggcgacaatctgtacgtcgtcacagaagcagtcgagctgatcaataacacagtgctctatgactcttcctccgtcaatatcctggggaagatcgcgctctggatcacctacgggaagggccagggccagggtgagtctctacgggtcaagaagaaggctttgactctccagaagggaatggtgatggcgtataaaagaaaacagctggtgattaaagagaaggcgatacttatcagtgatgacgatgagcaacgaacatttcaggatgagtacgagatcagtgaaatggttggctactgcgcagctagaagcgaaggcctcctgccttccttccacacaatcagtccaaccctcttcaatgcttccagcaacgatatgaagctgaagccggaactctttttgactcagcaatttttgagtggccacctcccgaagtacgagcaggtgcatatactgcctgtgggcaggattgaagagcctttttggcaaaacttcaaacacttgcaagaggaggtatttcagaaaatcaagaccctggcccagctgagcaaagatgtccaagacgtaatgttctatagtattttagccatgctccgggacagaggcgcccttcaggacttaatgaacatgctggagctggattctagcggccacctggacggccctggtggcgccatccttaaaaaattacagcaagactccaatcacgcctggtttaatcctaaggatcctattctgtacctgctggaggccatcatggtcctgtctgacttccaacacgatctgttagcatgctctatggagaagaggattttgctgcaacagcaggagctggtgcgtagcatcctggaacccaacttcaggtatccttggagtatccctttcacccttaagcccgaactgctcgcacctctccagtctgaagggttggcaattacatacgggctgcttgaagaatgcgggctcaggatggagctggacaatccccggtcaacatgggacgtggaagctaagatgcccctgagcgctctctatggcacgttaagcttattacaacagctagccgaagcttag

SEQ ID NO: 221669 - DNA, 2714 bp, Artificial Sequence
  derived and/or modified sequence
ccacatgtaggcagttcagaggtgcttcccagggccctggcgctagtgcctgtccctcctgctgaagttgcctttcctggtgtccagtgattgaattctaaattcagcacatataccagaggaatacgagccaaagaagttgttccagctagagttgctgggaatccatgaatcaaagacttgctcagctagttctgtatgtgaaaggaaatgggtgtgactctgaggaagcctttttaattctgattcaggagatacataattagatgccacttgattttgttccacagactttttgctgaggacttgagagctaaggttctgtgatccagaactagttccagacttactcttctggaaatgaacagggccctcctgtgcttatttttccaggatactgcattggaaattgagtcagggacccattggtgagaagagaacagtgaacagaatcacattgatctggtcctggagtttgtctgacaatttctacttgaccgcaggaggtctgaagattggaaggggccctactcaattgtgctatttttctctcttttttttttttttgagacggagttgcccaggctggagtgcagcggcatggtctcagctcactgcaacctctgcctcccgggttcaagcagttctctgcctcagcctcccaagtagctgggattacaggtgcctgccaccattcctggctaatttttgtattttcagtagagacagggtttcaccatcttggcctggctgatcttgaactcctgacctcgtgatccaccggcctcagcctcccaaagtgctgggattacagacgtgagccaccgtgcccggccaatcctgctatttctctacaggacaaagggatatataatctgcaacatgccctccatgttggaacgcattagcaaaaatttggtcaaagagattggaagcaaagacctgacacctgtcaaatacctattgagtgccaccaaattacgtcagtttgttatattacgaaagaagaaggattctcgttcatcattttgggaacaatctgactatgttccagttgaattctccctcaatgacatcctggagccaagttcttcagtcctagaaactgttgtgacaggaccgttccacttcagtgacattatgatccagaagcataaggctgacatgggtgtgaatgttggtatagaagtgagtgtgtcaggggaggcctctgtggaccatggatgctccctcgagtttcaaattgttaccatcccatcaccaaacctggaagactttcaaaaaaggaaactgttggatccagagccatcatttctgaaggagtgccggaggagaggggacaacctgtacgtggtgacagaggctgttgaactgatcaacaatactgtgctgtacgatagcagtagtgtgaatattttagggaaaattgctctttggattacctatggcaagggtcaaggccaaggagagagtctcagagtgaagaagaaggcgctgactcttcagaaaggcatggtgatggcttataagagaaagcagctggttatcaaggagaaagccattctcatctcagatgatgatgaacagagaacctttcaagatgagtacgaaatttccgaaatggtaggctactgtgctgcgaggagtgaggggttgctaccatcatttcataccatctctccaaccctcttcaatgcctcatccaatgatatgaagttaaaaccagagctatttctgacacagcaatttttgagcgggcatttgccaaaatacgaacaagttcacatcctcccagtaggaagaatagaggaacccttctggcaaaatttcaagcatctacaagaggaggttttccagaaaataaagacactggctcagctctcaaaggatgttcaggatgtcatgttctacagtatcctggccatgctcagagacagaggggctctacaggacctgatgaacatgctggaattggacagctcaggtcatttggatggccctggtggtgccatcctaaagaaacttcaacaggattcaaaccatgcatggtttaacccaaaggaccccattctttatctccttgaagccataatggtgctgagtgacttccaacacgatttgctggcctgttccatggagaagaggatcctgcttcagcaacaggagctggtaaggagcatcctggagccaaacttcagatacccctggagcattcccttcaccctcaaacctgagctcctcgccccactccagagtgagggtttggccatcacctatggcctgctggaggagtgtggccttaggatggagctggataaccccaggtcaacctgggatgtagaagcaaagatgcccctgtctgccctctatgggactctctcgttgctgcagcagctggctgaggcctaagccctccctgatgggcagtcagtccagagatgctggccctcgcccagtctatgctgtgagtgtccttatgggtgcaagagatagggctgtgcctctctgcgtttccaggtggagtagagacagtaatgggtagagactttaggaaatgttttggggtggtggaatactctatatattgacaagagtttatatattgacaagagtttatatatttgtcaaaactcctcaaatagtatgttaaagacgtaagcgtttcactatgtataaattttacttcaaaataataaaaacaaatactgactcta

SEQ ID NO: 221670 - DNA, 1527 bp, Artificial Sequence
  derived and/or modified sequence
atgcccagcatgctggagcgcatcagcaagaacctggtgaaggagatcggcagcaaggacctgacccctgtgaagtacctgctgagcgccaccaagctgcggcagtttgtgatcctgaggaagaagaaggacagccgcagcagcttctgggagcagagcgactatgtgcctgtggagttcagcctgaatgacatcctggagcccagcagctctgtgctggagaccgtggtgacaggccccttccacttcagtgacatcatgatccagaagcacaaggctgacatgggcgtgaatgtgggcatcgaggtgtctgtgtctggagaggcctctgtggaccacggctgcagcctggagttccagatcgtgaccatccccagccccaacctggaggacttccagaagaggaagctgctggaccctgagcccagcttcctgaaggaatgtagaagaagaggagacaacctgtatgtggtgacagaagctgtggagctgatcaacaacacagtgctgtatgacagcagctctgtgaacatcctgggcaagatcgccctgtggatcacctacggcaagggccagggccagggcgagagcctgcgggtgaagaagaaggccctgaccctgcagaagggcatggtgatggcctacaagaggaagcagctggtgatcaaggagaaggccatcctgatcagtgatgatgatgagcagaggaccttccaggatgaatatgagatcagcgagatggtgggctactgtgccgcccggtctgagggcctgctgcccagcttccacaccatcagccccaccctcttcaatgccagcagcaatgacatgaagctgaagccagagctgttcctgacccagcagttcctgagcggccacctgcccaagtatgagcaggtgcacatcctgcctgtgggccgcatcgaggagcccttctggcagaacttcaagcacctgcaggaggaggtgttccagaagatcaagaccctggcccagctgagcaaggatgtgcaggatgtgatgttctacagcatcctggccatgctgcgggacagaggagccctgcaggacctgatgaacatgctggagctggacagcagcggccacctggatggccctggaggagccatcctgaagaagctgcagcaggacagcaaccacgcctggttcaaccccaaggaccccatcctgtacctgctggaggccatcatggtgctgagtgacttccagcacgacctgctggcctgcagcatggagaagaggatcctgctgcagcagcaggagctggtgcgcagcatcctggagcccaacttccgctacccctggagcatccccttcaccctgaagccagagctgctggcccccctgcagagcgagggcctggccatcacctacggcctgctggaggagtgtggcctgaggatggagctggacaaccccaggagcacctgggatgtggaggccaagatgcccctgagcgccctgtatggcaccctgagcctgctgcagcagctggccgaggcctag

SEQ ID NO: 221671 - DNA, 1527 bp, Artificial Sequence
  derived and/or modified sequence
atgcccagcatgctggagcggatcagcaagaacctggtgaaggagatcggctcaaaggacttgaccccggttaagtacctgttatccgcaaccaaactaagacaattcgtgatactccggaagaagaaggactccagatcaagcttctgggaacagagcgactacgtgccggtcgaatttagcctcaatgatattctggagccaagtagtagtgtactggagactgtggtgacaggcccttttcacttttccgacataatgattcagaagcacaaggctgacatgggggttaacgtcggcattgaagtgagtgtgtcgggggaagcctcagtcgatcacggctgcagcctggaattccagatagtgactatcccatcacctaacctggaagactttcaaaaacggaagctcctggatccagagccatcattcctgaaggaatgtcgacgcaggggtgacaacctgtacgtcgtcaccgaagctgtcgagctgatcaacaacacagtgctgtatgacagtagctctgtgaatattttgggcaaaatcgctctctggatcacatatggcaaagggcagggacagggtgaatctctgcgggttaagaagaaggcgctgacgctgcaaaaaggcatggttatggcttataaaaggaaacaacttgtaataaaggagaaagcgatactgatttcggacgacgacgaacaaaggacctttcaggatgaatacgaaatcagcgaaatggttgggtattgcgctgccagatccgaaggcctccttccatccttccatacgatttcccccaccctgtttaatgctagttcaaatgatatgaaactgaagccggagctgtttctgacacagcagttcctgagcggacacctgcctaaatatgagcaggtgcatatactgccggttggacggatcgaggagcctttttggcagaatttcaaacacctgcaagaagaggtcttccagaagatcaaaaccttggcccagctgagcaaagatgtgcaggatgtgatgttctactccattctcgccatgctgcgtgataggggcgctctccaggatctgatgaatatgctggagcttgactcctctggccatctggatggccccggcggggctattctgaaaaaactgcagcaagattccaaccacgcgtggttcaatcccaaagaccccatcctgtacctcttggaggctatcatggtcttatctgacttccagcacgatcttctcgcatgtagcatggagaaacgtattttactgcaacagcaagagttggtgcggtcaatactcgagccaaacttccgttatccctggtccataccatttacactgaagccagagttgctggcgcctctgcaaagcgaggggttagccatcacatacggcctgcttgaggagtgtggtctgaggatggaactggataacccgagatctacatgggatgtggaggcaaagatgccactcagtgccctgtatggcacattgtcactgctccagcagctggctgaggcttag

SEQ ID NO: 221672 - DNA, 1527 bp, Artificial Sequence
  derived and/or modified sequence
atgccctcaatgttggagcgcatctccaaaaatctcgtgaaggagattgggagcaaagatcttacacctgttaagtatctgctgtccgcgaccaaactcaggcagttcgtcatcctacggaagaagaaagattccaggagcagcttttgggaacagtctgactatgtgccagtagagttcagcctgaatgatattttggagccttcctcttcagtgttagaaaccgtggtgacgggaccattccactttagtgacatcatgatccaaaaacacaaagccgacatgggggtgaatgttggcatagaagtaagcgtaagcggagaggcctcagtggaccacgggtgttccctcgagttccagatcgtgaccattccttcccctaacttagaggacttccaaaaacgcaaactcctggaccctgagccgagtttcctcaaagagtgtcgcagaagaggggacaatctgtacgtcgtgacagaggccgtggagctcattaacaatactgtcctgtatgattcgagtagcgttaacatcctgggtaaaatcgctctctggataacatacgggaaagggcagggacagggcgagtccttacgtgttaaaaagaaggcgctgaccttgcaaaaagggatggtcatggcttataagcggaaacagctcgtgattaaggaaaaagccattctgatcagcgacgacgacgaacagaggacctttcaggacgagtacgagatatccgagatggtgggttactgcgctgcgagaagcgaaggccttctgccatccttccacacaatttcacccacgctgttcaacgcttctagcaatgatatgaagctcaagccagagttgttcctaacacagcaattcctgagcggccatcttcccaagtatgagcaggtccatattttgcccgttggcagaatcgaggagcctttctggcagaactttaagcacttgcaggaggaggtgttccagaaaataaaaaccctagcccagttgtccaaggacgtacaggacgtaatgttctattccattctggctatgcttagggacagaggcgcactgcaggacctcatgaatatgctagagctcgatagttccggacatctggatggcccaggtggggctattctgaaaaaactgcagcaggatagcaaccacgcgtggttcaaccctaaggatccaatcctgtacctcttggaggccatcatggtcctgagcgacttccaacacgaccttctcgcttgctccatggagaagcgaatattgctccagcagcaggaactggtacggtcgatcctcgagcccaacttccgctacccatggtccattccattcacattaaagcctgagttactggcgcctctccagtctgagggactggccatcacctacggcctgttggaggaatgcggtcttagaatggagctcgataatccgagaagcacttgggatgtcgaggccaagatgcccctgtcggctctatatggcacgctctctctgctgcagcagctcgctgaggcgtag

SEQ ID NO: 221673 - DNA, 1527 bp, Artificial Sequence
  derived and/or modified sequence
atgcccagcatgctggagagaatcagcaagaacctggtgaaggagatcggcagcaaggacctgacccccgtgaagtacctgctgagcgccaccaagctgagacagttcgtgatcctgagaaagaagaaggacagcagaagcagcttctgggagcagagcgactacgtgcccgtggagttcagcctgaacgacatcctggagcccagcagcagcgtgctggagaccgtggtgaccggccccttccacttcagcgacatcatgatccagaagcacaaggccgacatgggcgtgaacgtgggcatcgaggtgagcgtgagcggcgaggccagcgtggaccacggctgcagcctggagttccagatcgtgaccatccccagccccaacctggaggacttccagaagagaaagctgctggaccccgagcccagcttcctgaaggagtgcagaagaagaggcgacaacctgtacgtggtgaccgaggccgtggagctgatcaacaacaccgtgctgtacgacagcagcagcgtgaacatcctgggcaagatcgccctgtggatcacctacggcaagggccagggccagggcgagagcctgagagtgaagaagaaggccctgaccctgcagaagggcatggtgatggcctacaagagaaagcagctggtgatcaaggagaaggccatcctgatcagcgacgacgacgagcagagaaccttccaggacgagtacgagatcagcgagatggtgggctactgcgccgccagaagcgagggcctgctgcccagcttccacaccatcagccccaccctgttcaacgccagcagcaacgacatgaagctgaagcccgagctgttcctgacccagcagttcctgagcggccacctgcccaagtacgagcaggtgcacatcctgcccgtgggcagaatcgaggagcccttctggcagaacttcaagcacctgcaggaggaggtgttccagaagatcaagaccctggcccagctgagcaaggacgtgcaggacgtgatgttctacagcatcctggccatgctgagagacagaggcgccctgcaggacctgatgaacatgctggagctggacagcagcggccacctggacggccccggcggcgccatcctgaagaagctgcagcaggacagcaaccacgcctggttcaaccccaaggaccccatcctgtacctgctggaggccatcatggtgctgagcgacttccagcacgacctgctggcctgcagcatggagaagagaatcctgctgcagcagcaggagctggtgagaagcatcctggagcccaacttcagatacccctggagcatccccttcaccctgaagcccgagctgctggcccccctgcagagcgagggcctggccatcacctacggcctgctggaggagtgcggcctgagaatggagctggacaaccccagaagcacctgggacgtggaggccaagatgcccctgagcgccctgtacggcaccctgagcctgctgcagcagctggccgaggcctag

SEQ ID NO: 221674 - protein, 462 aa, Artificial Sequence
  derived and/or modified sequence
MSSRTVLAPGNDRNSDTHGTLGSGRSSDKGPSWSSRSLGARCRNSIASCPEEQPHVGNYRLLRTIGKGNFAKVKLARHILTGREVAIKIIDKTQLNPSSLQKLFREVRIMKGLNHPNIVKLFEVIETEKTLYLVMEYASAGEPPTLSALPLCHLPLPLHLTLTPLGLCPAGEVFDYLVSHGRMKEKEARAKFRQIVSAVHYCHQKNIVHRDLKAENLLLDAEANIKIADFGFSNEFTLGSKLDTFCGSPPYAAPELFQGKKYDGPEVDIWSLGVILYTLVSGSLPFDGHNLKELRERVLRGKYRVPFYMSTDCESILRRFLVLNPAKRCTLEQIMKDKWINIGYEGEELKPYTEPEEDFGDTKRIEVMVGMGYTREEIKESLTSQKYNEVTATYLLLGRKTEPDEHGGGGAEGGAAARPEGELQHRGEWESRAAPLQPHGQQRPQPQQGRDPRAAEGQHEHP

SEQ ID NO: 221675 - protein, 688 aa, Artificial Sequence
  derived and/or modified sequence
MSSRTVLAPGNDRNSDTHGTLGSGRSSDKGPSWSSRSLGARCRNSIASCPEEQPHVGNYRLLRTIGKGNFAKVKLARHILTGREVAIKIIDKTQLNPSSLQKLFREVRIMKGLNHPNIVKLFEVIETEKTLYLVMEYASAGEVFDYLVSHGRMKEKEARAKFRQIVSAVHYCHQKNIVHRDLKAENLLLDAEANIKIADFGFSNEFTLGSKLDTFCGSPPYAAPELFQGKKYDGPEVDIWSLGVILYTLVSGSLPFDGHNLKELRERVLRGKYRVPFYMSTDCESILRRFLVLNPAKRCTLEQIMKDKWINIGYEGEELKPYTEPEEDFGDTKRIEVMVGMGYTREEIKESLTSQKYNEVTATYLLLGRKTEEGGDRGAPGLALARVRAPSDTTNGTSSSKGTSHSKGQRSSSSTYHRQRRHSDFCGPSPAPLHPKRSPTSTGEAELKEERLPGRKASCSTAGSGSRGLPPSSPMVSSAHNPNKAEIPERRKDSTSTPNNLPPSMMTRRNTYVCTERPGAERPSLLPNGKENSSGTPRVPPASPSSHSLAPPSGERSRLARGSTIRSTFHGGQVRDRRAGGGGGGGVQNGPPASPTLAHEAAPLPAGRPRPTTNLFTKLTSKLTRRVTLDPSKRQNSNRCVSGASLPQGSKIRSQTNLRESGDLRSQVAIYLGIKRKPPPGCSDSPGV

SEQ ID NO: 221676 - DNA, 1909 bp, Artificial Sequence
  derived and/or modified sequence
ctgtggtgtagctttgctgtctcctgtgtcaatgtcaggaggacaggctgagctcctgggaccagaacccctcagattccaggaggagcagagaaagcacagatggcctggagagtcccaggggtgaggccagcaagtactttcttcccccaggtgctcagagcatcctctgagttgccaaacagactcccagaggggtcaactgtgggccctaaaccagacagcagctgggaagcaggctctcaggggaactggggtctcaccagctcaggagcaggccaggactcctcagcacagaagctgggaatcttgagtgtccagatcagcctgaaaatctggacttgggaaaagccatctggctggggccacctgcatgccgctgtgactggggcatcctgctgctctcctctctcacaaggtggtgccatctgccttgtcactgctcctcaggacaagcctgactgctctccctgcacctctggccattgagaatccggctgctccatcgtggtggaaaatcttccatgctcagagggacaccttccgacactggggttctggagagcctggtgccacgagacaaggagccatgtgacaagagggggaggggtaggagtgggagacacaagtgtggtttgggacaaaatagggcctgaggctcacgtgttataaaaccccctttgctctgcctgtctccttgaattgtggccagtttcacatgggaagcaacgtcgagggacagggagactgcaggtgaggcctcagggctctgcattcccatccccaaaagtcaccagcgtgtggccttgtgggtgtcactcccctctgtggagtcaactttgtgcagtgacatgcagaggctggactgctgccacctcatgcccctcctggcatgatggtcgcatgaggctgagtgatttgcaggtctatggggaaacccgcctcagagatgtggaggagaagccaggcagagcgctgttcattccatttctttctttttttaatctaaaggagggaaagagctttattaactcaaacaaagggatgccatacaacttcccaacgatactgtgcagtgatggtattagcttccacctgttcttccattctgggggcagggtgtgaggactggctgctctgggagacgctctgagctgagagagaagaaatagctatgctaatagctgccccttactgagtgctcactctgtgtccggggctacaccgagtgcttgcagcgggttctcaggcgcacttagaacagcactgtgagaaaggcacttttgctgccccttgtgtacagatgaggacaaagagggacagagaggtttagaaccttgacctatatcacacagccagtgagcagacgaccggaatttgaatcctgcaatctctctgcagagcctgcgcatttaataccacacacagttctggcctgcagtgaatttggttgttcttcctgcctggggtggtcagtttccaagcctttccagatggacttctgcagcccaaagctgcgtgctccccgtgcaggcccttgtcagagcagagaaagatggctgaagttgttgtccatctagatttttatcttcaaaacattgctgaaatcaatctctcttctaccgtctccgatttcctttgtccttatgggtggtctacaactttactatcattttagtggatgcaagaggagtggagataaacacgtgttcagcctgctgtgaatctctgcagtggctatgttgtttcttaaacagatgtaatgaggcatctattccctgtgtgccatgtgccccttgagtaggggacatctgttttgtgttgtctgtgtctccagcattagaatggaacctggcacacaatagaggctcaattagtatttgttgaataaatgaacattaagaaacag

SEQ ID NO: 221677 - DNA, 1389 bp, Artificial Sequence
  derived and/or modified sequence
atgagttctcggactgtgttggcccccggcaatgacagaaactctgacacccacggcacacttggctctgggaggtccagcgataaaggcccaagctggtcatcccggtccctcggtgccagatgccgcaactccatcgccagttgtcccgaagaacaaccacatgttggaaactatcggttgctgcgtaccatcgggaagggaaactttgctaaggtcaaattggccaggcatatcctgacggggcgggaggtggccatcaagattatagacaagacgcagctcaacccctcgtctctgcaaaagctgttccgggaggtgaggattatgaagggcttgaaccatcctaacattgtgaagctttttgaagtcatcgagactgagaagaccctgtacctggttatggagtacgcatcggctggcgaacctccaactttgagcgctctccctctttgtcaccttccacttcccctccacttgactcttacccctctagggttgtgtcccgccggggaagtatttgattatctggtgtctcacggtagaatgaaagagaaggaagcacgagctaagttcaggcagatcgtatcagctgtgcactactgccatcagaagaacatagtgcacagagacctgaaggctgaaaatctccttctggatgccgaagccaatattaaaatcgccgatttcggatttagcaacgaatttactctgggttctaaactggatactttctgtggaagcccaccttacgcggcccccgaactcttccagggaaagaaatacgacggtccagaagtagacatctggtccttgggagtgattctctacacactcgtgtcagggagtctgcctttcgacggccataacctgaaggaactcagagagcgtgtgctgcgcggaaagtatcgcgtgcctttttacatgagcaccgattgcgagtcaattctgcggaggttcctggttctgaatcctgccaaacgttgcaccctcgagcaaattatgaaggataagtggataaacatcggttacgagggggaagagcttaaaccttatactgagccggaagaggattttggcgacacaaaacggatcgaggtcatggtggggatggggtatacccgggaggaaatcaaagagagcctcacctcccagaagtataatgaagttaccgccacttaccttctgcttggtagaaaaactgagccagacgaacacggagggggcggggctgaaggaggagctgccgcaaggcccgagggagagttgcaacatagaggcgagtgggaatccagagcagctcccttacaaccgcatggacaacagcggccacaacctcagcaaggtcgcgacccacgcgcagcggaaggccaacacgaacatccatag

SEQ ID NO: 221678 - DNA, 2067 bp, Artificial Sequence
  derived and/or modified sequence
atgagctcccgaaccgtcttagccccaggtaacgatcggaatagcgacacccacgggactctggggtcgggccgctctagtgataaaggtccgagctggtcctcaagatccctcggagcccggtgcagaaactccatagccagctgccccgaggagcagcctcacgtagggaattatcgactgctgaggactattgggaaaggcaattttgcgaaagtcaaactcgcaagacatatattgaccggcagagaagtggcaattaaaattatcgataaaacccagctgaatccatcatcgttgcagaagcttttccgtgaggtcagaatcatgaaaggacttaatcacccaaacattgtgaaactgttcgaggttatagaaacagaaaaaacactgtacctcgtcatggagtacgccagcgctggggaggtgttcgactacttagtgtcacacgggcgtatgaaagagaaagaagcgagggccaaattccgccagatagtctccgccgttcactattgccaccaaaagaacatcgtccatagggatctaaaagcggagaatctgctgttagatgccgaggccaatataaagatcgccgactttggatttagcaacgaatttaccttgggtagcaagcttgacaccttctgcggatctccgccatatgctgcacctgagttattccaaggaaagaaatatgacggtccggaagtcgacatctggtccctcggagtgatcctttacacactggtgtctgggagcttaccatttgacggccataacttgaaggaactcagggagcgcgttctgcggggaaaataccgtgttcccttctacatgtccacggactgcgagtctatcctgcgtcgcttcctagtgctcaatcctgctaagaggtgcacactcgagcagattatgaaggataagtggattaatatcgggtatgaaggcgaagaactcaaaccctatactgagccggaagaggattttggagatactaagcggatcgaagtcatggtaggaatggggtataccagggaggagattaaagagagtttaaccagccagaagtataatgaggtcaccgccacatacctcctgctgggtagaaagaccgaagaagggggggaccgtggagcacctggactggcactggccagggtccgcgcaccgtcagacacaaccaacggcacctcatccagtaaaggcacatcacacagcaaggggcagcgcagctccagttccacttatcataggcagcggcggcatagcgacttctgcggacccagcccagctccgctccatcctaagagatcacccacctctactggcgaagcggaactgaaggaggaaaggctgccaggtcgcaaagcaagctgtagtactgctgggtctggctctcgtggactccctcccagctctcccatggtctcatctgcgcataatcctaacaaggctgaaatcccagaacggaggaaagattcgacgtcaactccgaacaaccttccaccctccatgatgaccaggcggaatacttatgtctgcacagagaggccaggagccgagagacctagtctgcttccaaacgggaaggagaattcatccggtactcccagggtgcctcccgcttccccctctagccactcactagctccaccttccggggaacgctctagactggcgagaggctcaactatcagatcaacattccacggcgggcaggtcagagatagacgggccgggggcggtggaggtggaggcgtgcagaatgggcctccagctagccctacccttgcacacgaggcagctcccctgcccgccggcaggccccgacccactaccaacctatttactaaattgacctctaagttaacacgcagagttactttagatccaagtaagaggcaaaacagtaatcgctgcgtgagcggcgcgagcctaccccagggctccaagataaggagccagacaaatctccgtgagtctggcgacctgaggagtcaagtggcgatttaccttggaattaagcgaaagcctcctcccggatgttctgacagtccaggtgtctag

SEQ ID NO: 221679 - DNA, 1389 bp, Artificial Sequence
  derived and/or modified sequence
atgagcagcaggacagtgctggcccctggaaatgacaggaacagcgacacccacggcaccctgggcagcggccgcagcagtgacaagggccccagctggagcagccgcagcctgggcgcccgctgcagaaattccatcgccagctgcccagaggagcagccccacgtgggcaactaccgcctgctgcggaccatcggcaaaggaaactttgccaaggtgaagctggcccggcacatcctgaccggccgggaggtggccatcaagatcatcgacaagacccagctgaaccccagcagcctgcagaagctgttccgggaggtgcgcatcatgaagggcctgaaccaccccaacatcgtgaagctgtttgaggtgattgaaacagagaagaccctgtacctggtgatggagtatgccagcgctggggagccccccaccctgagcgccctgcccctgtgccacctgcccctgcccctgcacctgaccctgacccccctgggcctgtgcccagctggggaggtgtttgactacctggtgagccacggccgcatgaaggagaaggaggcccgggccaagttccggcagatcgtgtctgctgtgcactactgccaccagaagaacatcgtgcaccgggacctgaaggccgagaacctgctgctggatgctgaggccaacatcaagattgctgactttggcttcagcaatgagttcaccctgggcagcaagctggacaccttctgtggcagccccccctatgctgcccctgagctgttccagggcaagaagtatgatggccctgaggtggacatctggagcctgggcgtcatcctgtacaccctggtgtctggcagcctgccctttgatggccacaacctgaaggagctgcgggagcgggtgctgcggggcaagtacagagtgcccttctacatgagcacagactgtgagagcatcctgcggcgcttcctggtgctgaacccagccaagcgctgcaccctggagcagatcatgaaggacaagtggatcaacatcggctatgaaggagaggagctgaagccctacacagagccagaagaagattttggagacaccaagagaattgaggtgatggtgggcatgggctacacccgggaggagatcaaggagagcctgaccagccagaagtacaatgaggtgacagccacctacctgctgctgggcaggaagacagagccagatgagcacggcggcggcggcgctgagggcggggccgccgcccggcctgagggggagctgcagcacagaggagagtgggagagcagagctgcccccctgcagccccacggccagcagaggccccagccccagcagggccgggaccccagggctgctgagggccagcacgagcacccctag

SEQ ID NO: 221680 - DNA, 2067 bp, Artificial Sequence
  derived and/or modified sequence
atgagcagcaggacagtgctggcccctggaaatgacaggaacagcgacacccacggcaccctgggcagcggccgcagcagtgacaagggccccagctggagcagccgcagcctgggcgcccgctgcagaaattccatcgccagctgcccagaggagcagccccacgtgggcaactaccgcctgctgcggaccatcggcaaaggaaactttgccaaggtgaagctggcccggcacatcctgaccggccgggaggtggccatcaagatcatcgacaagacccagctgaaccccagcagcctgcagaagctgttccgggaggtgcgcatcatgaagggcctgaaccaccccaacatcgtgaagctgtttgaggtgattgaaacagagaagaccctgtacctggtgatggagtatgccagcgctggggaggtgtttgactacctggtgagccacggccgcatgaaggagaaggaggcccgggccaagttccggcagatcgtgtctgctgtgcactactgccaccagaagaacatcgtgcaccgggacctgaaggccgagaacctgctgctggatgctgaggccaacatcaagattgctgactttggcttcagcaatgagttcaccctgggcagcaagctggacaccttctgtggcagccccccctatgctgcccctgagctgttccagggcaagaagtatgatggccctgaggtggacatctggagcctgggcgtcatcctgtacaccctggtgtctggcagcctgccctttgatggccacaacctgaaggagctgcgggagcgggtgctgcggggcaagtacagagtgcccttctacatgagcacagactgtgagagcatcctgcggcgcttcctggtgctgaacccagccaagcgctgcaccctggagcagatcatgaaggacaagtggatcaacatcggctatgaaggagaggagctgaagccctacacagagccagaagaagattttggagacaccaagagaattgaggtgatggtgggcatgggctacacccgggaggagatcaaggagagcctgaccagccagaagtacaatgaggtgacagccacctacctgctgctgggcaggaagacagaggagggcggggacagaggagcccctggcctggccctggcccgggtgcgggcccccagcgacaccaccaacggcaccagcagcagcaagggcaccagccacagcaagggccagaggagcagcagcagcacctaccaccggcagaggaggcacagcgacttctgtggccccagccctgcccccctgcaccccaagaggagccccaccagcactggagaggccgagctgaaggaggagcggctgcccggcaggaaggccagctgcagcacagctggcagcggcagccggggcctgccccccagcagccccatggtgagcagcgcccacaaccccaacaaggccgagatccctgagaggaggaaggacagcaccagcacccccaacaacctgccccccagcatgatgaccaggaggaacacctacgtgtgcacagagaggcctggagctgagcggcccagcctgctgcccaacgggaaggagaacagcagcggcaccccccgggtgcccccagccagccccagcagccacagcctggcccctccttctggagagaggagccggctggcccggggcagcaccatccgcagcaccttccacggcggccaggtgcgggacagaagagctgggggcggcggcggcggcggcgtgcagaatggacctccagccagccccaccctggcccatgaagctgcccccctgcctgctggccggccccggcccaccaccaacctcttcaccaagctgaccagcaagctgaccaggagagtgaccctggaccccagcaagaggcagaacagcaacagatgtgtgtctggggccagcctgccccagggcagcaagatccgcagccagaccaacctgcgggagagcggggacctgcggagccaggtggccatctacctgggcatcaagaggaagcccccacctggctgcagcgacagccctggggtgtag

SEQ ID NO: 221681 - DNA, 1683 bp, Artificial Sequence
  derived and/or modified sequence
cgcctccctccgccgccgcttgggccggctccgcgccccctccgcggcccccgcccgcccgcctgcccgccgcccccatggcgcccggggtccccgctgcacggggccactaggaccctcggcgtcccttcccctcccccgccctgccccctctcccgccgcgcggacccgggcgttctcggcgcccagcttttgagctcgcgtccccaggccggcggggggggaggggaagagaggggaccctgggacccccgccccccccacccggccgcccctgccccccgggacccggagaagatgtcttcgcggacggtgctggccccgggcaacgatcggaactcggacacgcatggcaccttgggcagtggccgctcctcggacaaaggcccgtcctggtccagccgctcactgggtgcccgttgccggaactccatcgcctcctgtcccgaggagcagccccacgtgggcaactaccgcctgctgaggaccattgggaagggcaactttgccaaagtcaagctggctcggcacatcctcactggtcgggaggttgccatcaagattatcgacaaaacccagctgaatcccagcagcctgcagaagctgttccgagaagtccgcatcatgaagggcctaaaccaccccaacatcgtgaagctctttgaggtgattgagactgagaagacgctgtacctggtgatggagtacgcaagtgctggtgagccgcccaccctctccgccctgcccctgtgccacctccccctgccgctgcacctgaccctgaccccgctcggcctctgccctgcaggagaagtgtttgactacctcgtgtcgcatggccgcatgaaggagaaggaagctcgagccaagttccgacagattgtttcggctgtgcactattgtcaccagaaaaatattgtacacagggacctgaaggctgagaacctcttgctggatgccgaggccaacatcaagattgctgactttggcttcagcaacgagttcacgctgggatcgaagctggacacgttctgcgggagccccccatatgccgccccggagctgtttcagggcaagaagtacgacgggccggaggtggacatctggagcctgggagtcatcctgtacaccctcgtcagcggctccctgcccttcgacgggcacaacctcaaggagctgcgggagcgagtactcagagggaagtaccgggtccctttctacatgtcaacagactgtgagagcatcctgcggagatttttggtgctgaacccagctaaacgctgtactctcgagcaaatcatgaaagacaaatggatcaacatcggctatgagggtgaggagttgaagccatacacagagcccgaggaggacttcggggacaccaagagaattgaggtgatggtgggtatgggctacacacgggaagaaatcaaagagtccttgaccagccagaagtacaacgaagtgaccgccacctacctcctgctgggcaggaagactgagcccgacgagcacgggggaggcggagctgaaggaggagcggctgccaggccggaaggcgagctgcagcaccgcggggagtgggagtcgagggctgcccccctccagccccatggtcagcagcgcccacaaccccaacaaggcagagatcccagagcggcggaaggacagcacgagcacccc

SEQ ID NO: 221682 - DNA, 4917 bp, Artificial Sequence
  derived and/or modified sequence
agaagatgtcttcgcggacggtgctggccccgggcaacgatcggaactcggacacgcatggcaccttgggcagtggccgctcctcggacaaaggcccgtcctggtccagccgctcactgggtgcccgttgccggaactccatcgcctcctgtcccgaggagcagccccacgtgggcaactaccgcctgctgaggaccattgggaagggcaactttgccaaagtcaagctggctcggcacatcctcactggtcgggaggttgccatcaagattatcgacaaaacccagctgaatcccagcagcctgcagaagctgttccgagaagtccgcatcatgaagggcctaaaccaccccaacatcgtgaagctctttgaggtgattgagactgagaagacgctgtacctggtgatggagtacgcaagtgctggagaagtgtttgactacctcgtgtcgcatggccgcatgaaggagaaggaagctcgagccaagttccgacagattgtttcggctgtgcactattgtcaccagaaaaatattgtacacagggacctgaaggctgagaacctcttgctggatgccgaggccaacatcaagattgctgactttggcttcagcaacgagttcacgctgggatcgaagctggacacgttctgcgggagccccccatatgccgccccggagctgtttcagggcaagaagtacgacgggccggaggtggacatctggagcctgggagtcatcctgtacaccctcgtcagcggctccctgcccttcgacgggcacaacctcaaggagctgcgggagcgagtactcagagggaagtaccgggtccctttctacatgtcaacagactgtgagagcatcctgcggagatttttggtgctgaacccagctaaacgctgtactctcgagcaaatcatgaaagacaaatggatcaacatcggctatgagggtgaggagttgaagccatacacagagcccgaggaggacttcggggacaccaagagaattgaggtgatggtgggtatgggctacacacgggaagaaatcaaagagtccttgaccagccagaagtacaacgaagtgaccgccacctacctcctgctgggcaggaagactgaggagggtggggaccggggcgccccagggctggccctggcacgggtgcgggcgcccagcgacaccaccaacggaacaagttccagcaaaggcaccagccacagcaaagggcagcggagttcctcttccacctaccaccgccagcgcaggcatagcgatttctgtggcccatcccctgcacccctgcaccccaaacgcagcccgacgagcacgggggaggcggagctgaaggaggagcggctgccaggccggaaggcgagctgcagcaccgcggggagtgggagtcgagggctgcccccctccagccccatggtcagcagcgcccacaaccccaacaaggcagagatcccagagcggcggaaggacagcacgagcacccccaacaacctccctcctagcatgatgacccgcagaaacacctacgtttgcacagaacgcccgggggctgagcgcccgtcactgttgccaaatgggaaagaaaacagctcaggcaccccacgggtgccccctgcctccccctccagtcacagcctggcacccccatcaggggagcggagccgcctggcacgtggttccaccatccgcagcaccttccatggtggccaggtccgggaccggcgggcagggggtgggggtggtgggggtgtgcagaatgggccccctgcctctcccacactggcccatgaggctgcacccctgcccgccgggcggccccgccccaccaccaacctcttcaccaagctgacctccaaactgacccgaagggttaccctcgatccctctaaacggcagaactctaaccgctgtgtttcgggcgcctctctgccccagggatccaagatcaggtcgcagacgaacctgagagaatcgggggacctgaggtcacaagttgccatctaccttgggatcaaacggaaaccgccccccggctgctccgattcccctggagtgtgaagctgaccagctcgcgccctcctgaggccctgatggcagctctgcgccaggccacagcagccgcccgctgccgctgccgccagccacagccgttcctgctggcctgcctgcacgggggtgcgggcgggcccgagcccctgtcccacttcgaagtggaggtctgccagctgccccggccaggcttgcggggagttctcttccgccgtgtggcgggcaccgccctggccttccgcaccctcgtcacccgcatctccaacgacctcgagctctgagccaccacggtcccagggcccttactcttcctctcccttgtcgccttcacttctacaggaggggaaggggccagggaggggattctccctttatcatcacctcagtttccctgaattatatttgggggcaaagattgtcccctctgctgttctctggggccgctcagcacagaagaaggatgagggggctcagcggggggagctggcaccttcctggagcctccagccagtcctgtcctccctcgccctaccaagagggcacctgaggagactttggggacagggcaggggcagggagggaaactgaggaaatcttccattcctcccaacagctcaaaattaggccttgggcaggggcagggagagctgctgagcctaaagactggagaatctgggggactgggagtgggggtcagagaggcagattccttcccctcccgtcccctcacgctcaaacccccacttcctgccccaggctggcgcggggcactttgtacaaatccttgtaaataccccacaccctcccctctgcaaaggtctcttgaggagctgccgctgtcacctacggtttttaagttattacaccccgaccctcctcctgtcagccccctcacctgcagcctgttgcccaataaatttaagagagtccccccctccccaatgctgaccctaggattttccttccctgccctcacctgcaaatgagttaaagaagaggcgtgggaatccaggcagtggtttttcctttcggagcctcggttttctcatctgcagaatgggagcggtgggggtgggaaggtaaggatggtcgtggaagaaggcaggatggaactcggcctcatccccgaggccccagttcctatatcgggccccccattcatccactcacactcccagccaccatgttacactggactctaagccacttcttactccagtagtaaatttattcaataaacaatcattgacccatgcctactccatgccaggcccagtgctggacacagagacatgaagctctgtctgtgggagacagggattctgacacagacaccggacaaaccattgtcttggggagcccagaagagaaagtgggcagggtggggtcattggggaagatgctctagaggaattaatgctggaatggggtgttgaaggatgagtaggagttagttaggcattgagtttgccctgggcaaaagcccagaagtgggagtatgtggtatatcttcagagaactgggtaatttcagtgtggctgctgtgttgggcatggatggagaatcagcaagagaaatgctgtattaggactaataatccatctacgctgcttaagcaaaaaggtatttgttggtttatgttacttaatagtccaggggcacctggcttcaggtaggtttgatccaggcatcaggccattgcatctattttttcagtgtaagttgaattctagtaatttttatcaagtaagggctcctttcctggtggcacagatgacttcagcagttagaagtttctatccctccagctttctgcagcagaaagaccctcattgtcagtttcccagcaaaagtcccagggcagactctcattggcccaaatgggccatgtgattttctctaaaccaatcactgtgactctagagtggccagactcagagctgcacttagtaggggttcctcaaaggaaggtcaagtgtcatgagcaggagaaaaggcatgggagctggacagattatagtggttgaagtctgtgcagtacagaagggcggagcttattcacacagcacctttggggccaaaatgaataagctggactttctccccatggcactggggaaccatggaagttcagggaacttcagggaagaggcttggtcaattcctgagagcatcctctgtgctggggacacagtggtaatcaagacagccccaacactgccctcatagagctcacagtccaatggaggaggcagatgtgtcctcaggcagcgactgggcagggctggtataggggagtccagaggtgatgcctgcctcagccagggagggcttcctggaggagaaggagccagctagacatggataggagtgcgttttaggcacagcaaatggcacatacaagggccagggagcaagagagaggacaggtcctcaacaaatggcatgtgactttgtaagtgtagaattgctgtgaggtatggggctaggggcgtcagtagggccttgaaggttatggacaggggcctgggctttcttccaagggcactgggggagccatggcaaggttgtaggtagggtagagatgggcgggtttgtgctatgtgcagggtggaagggagggaagttgacaggtcagaagatcaggaaagaggtcggggctggacagatggggagagcgcagatagatttaagagagtcctgtgaggcaaagtgggcaggacctggtaacaggtgtctggactgtggctttggctggctcagaaggtccccactggcgtgtgtggtctatgtagcctctgggtgtggagctgggatcttcaactggggacagtacagtaaagaacatcacagc

SEQ ID NO: 221683 - DNA, 1389 bp, Artificial Sequence
  derived and/or modified sequence
atgagcagccggaccgtgctggcccccggcaacgaccggaacagcgacacacacgggacactgggctccggcaggtcgagcgataagggcccgtcttggtcatcccgcagcctgggcgctcggtgccgcaactctatcgcgtcctgccctgaggaacagccacatgttggaaattaccgacttcttcgtacaataggtaaggggaactttgctaaggtgaaactcgcccggcacattcttactggaagggaggttgctataaagattatcgataaaacacagcttaatccaagcagtttacagaagttattccgagaagtccgaataatgaaggggttgaatcaccccaatattgtgaaattatttgaagtaattgaaaccgaaaaaactttgtatctggtaatggaatacgcgagcgcaggagaaccacccactctgtccgccctgcctctctgtcacctccccctgcccctccatctcacactcaccccactgggtctgtgccccgccggcgaagtgttcgactaccttgtctcacacgggagaatgaaagagaaggaggcacgggcaaaattcagacagattgtgagcgcggtgcattactgtcatcagaagaatatcgtgcacagagacttaaaggcagagaacctccttctcgacgcagaggccaacatcaaaatagcagacttcgggttttccaatgagttcacattgggctcgaagctggatactttctgcggtagtcccccgtatgcagctcccgagctcttccagggtaagaaatacgatggcccagaggttgacatctggagtctgggcgtaatcttatatacgctcgtgagcgggagcctgcctttcgatggccacaacctcaaggagctgcgagagagagtgctgcgcgggaaatacagagtgcccttttatatgtccactgactgcgagtctattctgagaaggtttctggtcttaaaccccgccaagcggtgtaccctggagcagattatgaaggataagtggatcaacatcgggtacgagggagaagagctgaaaccgtacaccgagcccgaggaagacttcggcgacacaaagaggatcgaagtgatggtaggaatgggctataccagagaggaaatcaaagaatccctcacctcacagaagtacaacgaggtgactgctacatatctgctactcggtcgcaaaacagaaccagatgaacacggaggaggcggtgcagagggaggtgcagctgcgcgacccgagggagaactgcagcaccgaggcgagtgggagagccgggcagcaccactgcagccccatggacagcagcggccacagcctcagcagggaagagatcctcgcgccgctgaagggcaacacgagcatccttag

SEQ ID NO: 221684 - DNA, 2067 bp, Artificial Sequence
  derived and/or modified sequence
atgagcagccggaccgtgctggcccccggcaacgaccggaacagcgacacgcatgggactctcggcagtggtcggtctagcgataaaggaccgagctggtcttcccgctctctgggcgcccgttgcagaaactcgatcgcatcatgcccagaagaacagcctcacgtggggaattatcgactgttgcgaacgattggaaagggtaactttgccaaagttaaattggcacggcatattcttacaggtcgcgaagtcgccattaagattatcgataagacacagctcaatccgtcctctctacagaaattgtttcgggaggttagaataatgaaaggtctaaaccatcctaatatagtcaagctctttgaagtgattgagactgaaaaaacgctctatctggtaatggaatacgcctctgcgggagaggtattcgattatttagtttcacacggccgcatgaaagagaaggaggctagagctaaattccgccagatagtttccgccgtgcactattgccatcaaaagaatatagtgcaccgtgatctaaaagctgagaacctcctactggacgctgaggccaacattaagattgcagacttcggcttctctaatgagtttactctcgggagcaagctcgataccttttgcgggagtccgccttacgctgcccccgagcttttccagggcaagaaatacgatggccctgaggtggatatctggtccttaggtgttatattgtacacgctcgtgagcggctctctgcccttcgacggacacaacctgaaagagctgcgcgagcgggtccttagaggaaagtacagggtgcccttctatatgagtaccgactgtgagtctattctgagacgattcctagtcctaaacccagcaaagaggtgcacccttgagcagatcatgaaagataaatggatcaatatcggctacgagggcgaggagctgaaaccttatacagagccagaggaagattttggcgacactaagaggattgaggtgatggtcggaatgggctacactagggaagagatcaaagaatccctgacatcccagaagtacaacgaggttacggccacatacctgctgctggggagaaagacagaggaaggaggcgatagaggagctccaggcctcgccctcgcaagagtccgggccccgagcgacactacgaatggcacttcctcatcaaagggaacctcccactcaaaagggcagcggtccagcagcagcacatatcatagacagaggcgtcacagcgacttctgcggcccatcacccgcacctctgcatccgaagaggagtcctactagcactggtgaagctgaactgaaagaagaacgattgcctggaaggaaggccagctgtagcacagctggcagcggcagccgtggcctccctccatcttccccaatggtgagctccgcccataatccgaataaggctgagattcccgagcgccggaaagattcaacatccacacctaataatctgcctccatcaatgatgacgcgtagaaacacctacgtgtgtactgagaggcccggggccgagcggccatcactcttaccgaatgggaaggagaactcctctgggacaccaagggtccctcctgcctcaccctcctctcactccttggcgccccctagcggggaaagaagccggctggctcgcggctccaccattcggtccaccttccacggaggccaggtgagagataggcgagccggagggggaggcggcggcggggtgcagaatggaccgcccgcctcccctaccctggcacatgaggccgccccactaccggctggcaggccgcggcctacaaccaatctcttcactaagctaacctcgaaactcaccagacgtgtgactctcgacccctctaagcgacaaaattctaatcggtgtgtatctggcgcctctctgcctcagggtagtaaaatccggtcacaaaccaatctgcgcgagagcggtgatctgcgctcacaagtggctatctatcttggtatcaagcgcaaacccccccccgggtgctccgattcacctggggtgtag

SEQ ID NO: 221685 - DNA, 1389 bp, Artificial Sequence
  derived and/or modified sequence
atgagttcaaggacagtcttggccccaggcaatgacagaaattccgatacacacggcacactgggctctgggaggagcagtgataaaggtccgtcctggtcctctagaagtcttggcgctagatgtagaaacagtattgcctcatgccccgaagaacagccacatgtgggaaattataggctactgagaacgatagggaagggaaattttgccaaggtgaaactagctcgccatatcttgaccggcagggaggtagccataaagatcatcgacaaaacccagctcaatccttccagcctccagaaattattccgagaagtaaggattatgaagggactgaaccaccccaatatcgtcaaactgtttgaagttatcgagactgagaaaacattatacctcgttatggaatacgcttcagcaggcgagcctccaacactgtccgctttgccactatgccacctgcctctgcccctgcacctgactttgacacccttgggcttgtgtccagctggggaggtgtttgactacctggtgagccacggacgaatgaaggagaaagaagcccgagcaaagttcaggcaaattgtgagcgccgtgcactattgtcaccagaagaacatcgtgcatagagatctgaaggccgagaacttactgctggatgccgaagcaaatatcaagattgccgacttcgggttcagcaacgaatttaccctcggaagcaagctggacacattctgtgggagtcccccttacgccgctcccgaactgtttcaagggaagaagtatgacgggcctgaggtggatatctggagtctgggtgtaatcctgtatacccttgtgtctggtagtctccctttcgacggccacaaccttaaagaactacgagagagggtcctgagggggaagtaccgcgtgcctttttacatgagtaccgactgtgagagtattttgagaaggttcctcgtattaaatccagccaagagatgtacactggagcagataatgaaggacaagtggataaatattgggtatgagggcgaggaactgaaaccctatactgagcccgaggaggattttggcgataccaagcggatcgaggtgatggtgggcatgggttatacccgagaggaaatcaaggagtcattaacaagccagaaatataatgaagtgactgcaacctacctactgctgggtaggaagacagagcctgacgagcatgggggaggtggcgctgaaggaggagccgctgccagacccgaaggtgagctacaacaccggggagaatgggagtccagggctgcacctctgcagccccacggccagcagcgcccacaaccacaacaaggtagagatccaagagccgctgagggccaacacgagcacccctag

SEQ ID NO: 221686 - DNA, 2067 bp, Artificial Sequence
  derived and/or modified sequence
atgagcagtcgcaccgtgctggctccgggaaatgacagaaacagtgacactcatgggaccctcgggtccggacgtagctccgataaggggccttcatggagcagtaggtccctcggcgctaggtgccgcaattctatcgcctcatgtccagaggaacaaccccacgttggcaactaccggcttctgaggaccatcggcaaggggaacttcgccaaggtgaaactcgcccgtcacatcttgacaggaagggaagtggccattaagattatcgataagacccagctgaatcctagttctttacagaaactctttagagaagtaagaatcatgaagggactgaatcatccgaatatcgtcaagctgttcgaagtcatagagactgaaaagacactatacctggtcatggagtacgcttctgctggcgaggtgtttgattacctggtttcacatggtcggatgaaggaaaaagaagccagggccaagtttcgccagatcgtctctgcggtgcattactgtcatcaaaagaacattgtgcacagagatttgaaggcagagaacctgctgttggacgctgaggctaacattaagatagccgactttggttttagcaatgaattcacactggggtctaagctcgacaccttttgcggttcgcccccttatgcagcgcctgaactcttccagggcaaaaagtatgatggtcccgaggtggacatttggagcctaggagtcatcctgtatacgctggtgtccggatcacttcccttcgatggccacaacctgaaagaactgcgcgaacgagtgcttcggggtaaatacagagtacccttttatatgtctactgattgcgagagcattttgcggaggttcctggtgctgaaccctgcaaagcggtgtaccttggaacagatcatgaaagataagtggattaacattgggtatgagggagaagaattgaaaccctacacagaaccagaggaggatttcggtgacacaaaaaggattgaagttatggttggcatggggtatacacgggaggagataaaagaaagcctcaccagtcagaagtataacgaagttacagcaacctaccttctgctggggagaaagacggaagaggggggagatcggggtgctcccggactcgccctcgccagggtcagagctccaagcgacaccactaacggaaccagtagtagtaagggcacctcacacagtaaaggtcagcggtccagcagctcgacataccacagacagagacgccactctgatttctgcggccctagcccagccccactccatcccaagagatcaccgaccagcacaggagaagccgagttaaaagaagagcggctcccaggccgaaaagcatcatgttccaccgctggaagtggttcgcggggactgccccctagtagcccaatggtctccagcgcccacaatccaaacaaagctgaaatccccgaacgcagaaaagattctacgtcaactcctaataacctgcctccctcgatgatgactcggcgaaacacctatgtatgtactgagcgtcccggtgccgaacgcccttcactgcttcctaatggtaaagaaaattcctcaggcactccaagggttcctcccgcttcaccctcttcccactctcttgccccacctagcggggagcgttccaggctggcgcgaggctctaccattcgctcaacgtttcacggaggacaggtcagagatcgtcgggcaggagggggtggcggtggcggagtccagaatggccctcccgcaagcccgacgctagctcatgaggcagcacccttgcctgccggaaggcctcggcctactaccaacctctttaccaaactaactagtaagctgaccaggcgcgtgacactggacccaagtaagcgtcagaacagtaaccgatgcgtaagtggagcctccttgcctcagggcagcaagatccgctcccagacaaacctgagggagtcgggcgacttaaggtcccaggtagcaatttatctagggattaagcgaaagccccctcctgggtgctcggattctccaggggtttag

SEQ ID NO: 221687 - DNA, 1389 bp, Artificial Sequence
  derived and/or modified sequence
atgagcagcagaaccgtgctggcccccggcaacgacagaaacagcgacacccacggcaccctgggcagcggcagaagcagcgacaagggccccagctggagcagcagaagcctgggcgccagatgcagaaacagcatcgccagctgccccgaggagcagccccacgtgggcaactacagactgctgagaaccatcggcaagggcaacttcgccaaggtgaagctggccagacacatcctgaccggcagagaggtggccatcaagatcatcgacaagacccagctgaaccccagcagcctgcagaagctgttcagagaggtgagaatcatgaagggcctgaaccaccccaacatcgtgaagctgttcgaggtgatcgagaccgagaagaccctgtacctggtgatggagtacgccagcgccggcgagccccccaccctgagcgccctgcccctgtgccacctgcccctgcccctgcacctgaccctgacccccctgggcctgtgccccgccggcgaggtgttcgactacctggtgagccacggcagaatgaaggagaaggaggccagagccaagttcagacagatcgtgagcgccgtgcactactgccaccagaagaacatcgtgcacagagacctgaaggccgagaacctgctgctggacgccgaggccaacatcaagatcgccgacttcggcttcagcaacgagttcaccctgggcagcaagctggacaccttctgcggcagccccccctacgccgcccccgagctgttccagggcaagaagtacgacggccccgaggtggacatctggagcctgggcgtgatcctgtacaccctggtgagcggcagcctgcccttcgacggccacaacctgaaggagctgagagagagagtgctgagaggcaagtacagagtgcccttctacatgagcaccgactgcgagagcatcctgagaagattcctggtgctgaaccccgccaagagatgcaccctggagcagatcatgaaggacaagtggatcaacatcggctacgagggcgaggagctgaagccctacaccgagcccgaggaggacttcggcgacaccaagagaatcgaggtgatggtgggcatgggctacaccagagaggagatcaaggagagcctgaccagccagaagtacaacgaggtgaccgccacctacctgctgctgggcagaaagaccgagcccgacgagcacggcggcggcggcgccgagggcggcgccgccgccagacccgagggcgagctgcagcacagaggcgagtgggagagcagagccgcccccctgcagccccacggccagcagagaccccagccccagcagggcagagaccccagagccgccgagggccagcacgagcacccctag

SEQ ID NO: 221688 - DNA, 2067 bp, Artificial Sequence
  derived and/or modified sequence
atgagcagcagaaccgtgctggcccccggcaacgacagaaacagcgacacccacggcaccctgggcagcggcagaagcagcgacaagggccccagctggagcagcagaagcctgggcgccagatgcagaaacagcatcgccagctgccccgaggagcagccccacgtgggcaactacagactgctgagaaccatcggcaagggcaacttcgccaaggtgaagctggccagacacatcctgaccggcagagaggtggccatcaagatcatcgacaagacccagctgaaccccagcagcctgcagaagctgttcagagaggtgagaatcatgaagggcctgaaccaccccaacatcgtgaagctgttcgaggtgatcgagaccgagaagaccctgtacctggtgatggagtacgccagcgccggcgaggtgttcgactacctggtgagccacggcagaatgaaggagaaggaggccagagccaagttcagacagatcgtgagcgccgtgcactactgccaccagaagaacatcgtgcacagagacctgaaggccgagaacctgctgctggacgccgaggccaacatcaagatcgccgacttcggcttcagcaacgagttcaccctgggcagcaagctggacaccttctgcggcagccccccctacgccgcccccgagctgttccagggcaagaagtacgacggccccgaggtggacatctggagcctgggcgtgatcctgtacaccctggtgagcggcagcctgcccttcgacggccacaacctgaaggagctgagagagagagtgctgagaggcaagtacagagtgcccttctacatgagcaccgactgcgagagcatcctgagaagattcctggtgctgaaccccgccaagagatgcaccctggagcagatcatgaaggacaagtggatcaacatcggctacgagggcgaggagctgaagccctacaccgagcccgaggaggacttcggcgacaccaagagaatcgaggtgatggtgggcatgggctacaccagagaggagatcaaggagagcctgaccagccagaagtacaacgaggtgaccgccacctacctgctgctgggcagaaagaccgaggagggcggcgacagaggcgcccccggcctggccctggccagagtgagagcccccagcgacaccaccaacggcaccagcagcagcaagggcaccagccacagcaagggccagagaagcagcagcagcacctaccacagacagagaagacacagcgacttctgcggccccagccccgcccccctgcaccccaagagaagccccaccagcaccggcgaggccgagctgaaggaggagagactgcccggcagaaaggccagctgcagcaccgccggcagcggcagcagaggcctgccccccagcagccccatggtgagcagcgcccacaaccccaacaaggccgagatccccgagagaagaaaggacagcaccagcacccccaacaacctgccccccagcatgatgaccagaagaaacacctacgtgtgcaccgagagacccggcgccgagagacccagcctgctgcccaacggcaaggagaacagcagcggcacccccagagtgccccccgccagccccagcagccacagcctggccccccccagcggcgagagaagcagactggccagaggcagcaccatcagaagcaccttccacggcggccaggtgagagacagaagagccggcggcggcggcggcggcggcgtgcagaacggcccccccgccagccccaccctggcccacgaggccgcccccctgcccgccggcagacccagacccaccaccaacctgttcaccaagctgaccagcaagctgaccagaagagtgaccctggaccccagcaagagacagaacagcaacagatgcgtgagcggcgccagcctgccccagggcagcaagatcagaagccagaccaacctgagagagagcggcgacctgagaagccaggtggccatctacctgggcatcaagagaaagcccccccccggctgcagcgacagccccggcgtgtag

SEQ ID NO: 221689 - protein, 981 aa, Artificial Sequence
  derived and/or modified sequence
MVHHSGSIQSFKQQKGMNISKSEITKETSLKPSRRSLPCLAQSYAYSKSLSQSTSLFQSTESESQAPTSITLISTDKAEQVNTEENKNDSVLRCSFADLSDFCLALGKDKDYTDESEHATYDRSRLINDFVIKDKSEFKTKLSKNDMNYIASSGPLFKDGKKRIDYILVYRKTNIQYDKRNTFEKNLRAEGLMLEKEPAIASPDIMFIKIHIPWDTLCKYAERLNIRMPFRKKCYYTDGRSKSMGRMQTYFRRIKNWMAQNPMVLDKSAFPDLEESDCYTGPFSRARIHHFIINNKDTFFSNATRSRIVYHMLERTKYENGISKVGIRKLINNGSYIAAFPPHEGAYKSSQPIKTHGPQNNRHLLYERWARWGMWYKHQPLDLIRLYFGEKIGLYFAWLGWYTGMLIPAAIVGLCVFFYGLFTMNNSQVSQEICKATEVFMCPLCDKNCSLQRLNDSCIYAKVTYLFDNGGTVFFAIFMAIWATVFLEFWKRRRSILTYTWDLIEWEEEEETLRPQFEAKYYKMEIVNPITGKPEPHQPSSDKVTRLLVSVSGIFFMISLVITAVFGVVVYRLVVMEQFASFKWNFIKQYWQFATSAAAVCINFIIIMLLNLAYEKIAYLLTNLEYPRTESEWENSFALKMFLFQFVNLNSSIFYIAFFLGRFVGHPGKYNKLFDRWRLEECHPSGCLIDLCLQMGVIMFLKQIWNNFMELGYPLIQNWWSRHKIKRGIHDASIPQWENDWNLQPMNLHGLMDEYLEMVLQFGFTTIFVAAFPLAPLLALLNNIIEIRLDAYKFVTQWRRPLPARATDIGIWLGILEGIGILAVITNAFVIAITSDYIPRFVYEYKYGPCANHVEPSENCLKGYVNNSLSFFDLSELGMGKSGYCRYRDYRGPPWSSKPYEFTLQYWHILAARLAFIIVFEHLVFGIKSFIAYLIPDVPKGLHDRIRREKYLVQEMMYEAELEHLQQQRRKSGQPVHHEWP

SEQ ID NO: 221690 - protein, 835 aa, Artificial Sequence
  derived and/or modified sequence
MNYIASSGPLFKDGKKRIDYILVYRKTNIQYDKRNTFEKNLRAEGLMLEKEPAIASPDIMFIKIHIPWDTLCKYAERLNIRMPFRKKCYYTDGRSKSMGRMQTYFRRIKNWMAQNPMVLDKSAFPDLEESDCYTGPFSRARIHHFIINNKDTFFSNATRSRIVYHMLERTKYENGISKVGIRKLINNGSYIAAFPPHEGAYKSSQPIKTHGPQNNRHLLYERWARWGMWYKHQPLDLIRLYFGEKIGLYFAWLGWYTGMLIPAAIVGLCVFFYGLFTMNNSQVSQEICKATEVFMCPLCDKNCSLQRLNDSCIYAKVTYLFDNGGTVFFAIFMAIWATVFLEFWKRRRSILTYTWDLIEWEEEEETLRPQFEAKYYKMEIVNPITGKPEPHQPSSDKVTRLLVSVSGIFFMISLVITAVFGVVVYRLVVMEQFASFKWNFIKQYWQFATSAAAVCINFIIIMLLNLAYEKIAYLLTNLEYPRTESEWENSFALKMFLFQFVNLNSSIFYIAFFLGRFVGHPGKYNKLFDRWRLEECHPSGCLIDLCLQMGVIMFLKQIWNNFMELGYPLIQNWWSRHKIKRGIHDASIPQWENDWNLQPMNLHGLMDEYLEMVLQFGFTTIFVAAFPLAPLLALLNNIIEIRLDAYKFVTQWRRPLPARATDIGIWLGILEGIGILAVITNAFVIAITSDYIPRFVYEYKYGPCANHVEPSENCLKGYVNNSLSFFDLSELGMGKSGYCRYRDYRGPPWSSKPYEFTLQYWHILAARLAFIIVFEHLVFGIKSFIAYLIPDVPKGLHDRIRREKYLVQEMMYEAELEHLQQQRRKSGQPVHHEWP

SEQ ID NO: 221691 - protein, 883 aa, Artificial Sequence
  derived and/or modified sequence
MRPGPNKPYPSHSNIFAYHSSALGKDKDYTDESEHATYDRSRLINDFVIKDKSEFKTKLSKNDMNYIASSGPLFKDGKKRIDYILVYRKTNIQYDKRNTFEKNLRAEGLMLEKEPAIASPDIMFIKIHIPWDTLCKYAERLNIRMPFRMQTYFRRIKNWMAQNPMVLDKSAFPDLEESDCYTGPFSRARIHHFIINNKDTFFSNATRSRIVYHMLERTKYENGISKVGIRKLINNGSYIAAFPPHEGAYKSSQPIKTHGPQNNRHLLYERWARWGMWYKHQPLDLIRLYFGEKIGLYFAWLGWYTGMLIPAAIVGLCVFFYGLFTMNNSQVSQEICKATEVFMCPLCDKNCSLQRLNDSCIYAKVTYLFDNGGTVFFAIFMAIWATVFLEFWKRRRSILTYTWDLIEWEEEEETLRPQFEAKYYKMEIVNPITGKPEPHQPSSDKVTRLLVSVSGIFFMISLVITAVFGVVVYRLVVMEQFASFKWNFIKQYWQFATSAAAVCINFIIIMLLNLAYEKIAYLLTNLEYPRTESEWENSFALKMFLFQFVNLNSSIFYIAFFLGRFVGHPGKYNKLFDRWRLEECHPSGCLIDLCLQMGVIMFLKQIWNNFMELGYPLIQNWWSRHKIKRGIHDASIPQWENDWNLQPMNLHGLMDEYLEMVLQFGFTTIFVAAFPLAPLLALLNNIIEIRLDAYKFVTQWRRPLPARATDIGIWLGILEGIGILAVITNAFVIAITSDYIPRFVYEYKYGPCANHVEPSENCLKGYVNNSLSFFDLSELGMGKSGYCRYRDYRGPPWSSKPYEFTLQYWHILAARLAFIIVFEHLVFGIKSFIAYLIPDVPKGLHDRIRREKYLVQEMMYEAELEHLQQQRRKSGQPVHHEWP

SEQ ID NO: 221692 - DNA, 2946 bp, Artificial Sequence
  derived and/or modified sequence
atggtgcaccacagcggcagcatccagagcttcaagcagcagaagggcatgaacatcagcaagagcgagatcaccaaggagaccagcctgaagcccagcagaagaagcctgccctgcctggcccagagctacgcctacagcaagagcctgagccagagcaccagcctgttccagagcaccgagagcgagagccaggcccccaccagcatcaccctgatcagcaccgacaaggccgagcaggtgaacaccgaggagaacaagaacgacagcgtgctgagatgcagcttcgccgacctgagcgacttctgcctggccctgggcaaggacaaggactacaccgacgagagcgagcacgccacctacgacagaagcagactgatcaacgacttcgtgatcaaggacaagagcgagttcaagaccaagctgagcaagaacgacatgaactacatcgccagcagcggccccctgttcaaggacggcaagaagagaatcgactacatcctggtgtacagaaagaccaacatccagtacgacaagagaaacaccttcgagaagaacctgagagccgagggcctgatgctggagaaggagcccgccatcgccagccccgacatcatgttcatcaagatccacatcccctgggacaccctgtgcaagtacgccgagagactgaacatcagaatgcccttcagaaagaagtgctactacaccgacggcagaagcaagagcatgggcagaatgcagacctacttcagaagaatcaagaactggatggcccagaaccccatggtgctggacaagagcgccttccccgacctggaggagagcgactgctacaccggccccttcagcagagccagaatccaccacttcatcatcaacaacaaggacaccttcttcagcaacgccaccagaagcagaatcgtgtaccacatgctggagagaaccaagtacgagaacggcatcagcaaggtgggcatcagaaagctgatcaacaacggcagctacatcgccgccttccccccccacgagggcgcctacaagagcagccagcccatcaagacccacggcccccagaacaacagacacctgctgtacgagagatgggccagatggggcatgtggtacaagcaccagcccctggacctgatcagactgtacttcggcgagaagatcggcctgtacttcgcctggctgggctggtacaccggcatgctgatccccgccgccatcgtgggcctgtgcgtgttcttctacggcctgttcaccatgaacaacagccaggtgagccaggagatctgcaaggccaccgaggtgttcatgtgccccctgtgcgacaagaactgcagcctgcagagactgaacgacagctgcatctacgccaaggtgacctacctgttcgacaacggcggcaccgtgttcttcgccatcttcatggccatctgggccaccgtgttcctggagttctggaagagaagaagaagcatcctgacctacacctgggacctgatcgagtgggaggaggaggaggagaccctgagaccccagttcgaggccaagtactacaagatggagatcgtgaaccccatcaccggcaagcccgagccccaccagcccagcagcgacaaggtgaccagactgctggtgagcgtgagcggcatcttcttcatgatcagcctggtgatcaccgccgtgttcggcgtggtggtgtacagactggtggtgatggagcagttcgccagcttcaagtggaacttcatcaagcagtactggcagttcgccaccagcgccgccgccgtgtgcatcaacttcatcatcatcatgctgctgaacctggcctacgagaagatcgcctacctgctgaccaacctggagtaccccagaaccgagagcgagtgggagaacagcttcgccctgaagatgttcctgttccagttcgtgaacctgaacagcagcatcttctacatcgccttcttcctgggcagattcgtgggccaccccggcaagtacaacaagctgttcgacagatggagactggaggagtgccaccccagcggctgcctgatcgacctgtgcctgcagatgggcgtgatcatgttcctgaagcagatctggaacaacttcatggagctgggctaccccctgatccagaactggtggagcagacacaagatcaagagaggcatccacgacgccagcatcccccagtgggagaacgactggaacctgcagcccatgaacctgcacggcctgatggacgagtacctggagatggtgctgcagttcggcttcaccaccatcttcgtggccgccttccccctggcccccctgctggccctgctgaacaacatcatcgagatcagactggacgcctacaagttcgtgacccagtggagaagacccctgcccgccagagccaccgacatcggcatctggctgggcatcctggagggcatcggcatcctggccgtgatcaccaacgccttcgtgatcgccatcaccagcgactacatccccagattcgtgtacgagtacaagtacggcccctgcgccaaccacgtggagcccagcgagaactgcctgaagggctacgtgaacaacagcctgagcttcttcgacctgagcgagctgggcatgggcaagagcggctactgcagatacagagactacagaggccccccctggagcagcaagccctacgagttcaccctgcagtactggcacatcctggccgccagactggccttcatcatcgtgttcgagcacctggtgttcggcatcaagagcttcatcgcctacctgatccccgacgtgcccaagggcctgcacgacagaatcagaagagagaagtacctggtgcaggagatgatgtacgaggccgagctggagcacctgcagcagcagagaagaaagagcggccagcccgtgcaccacgagtggccctag

SEQ ID NO: 221693 - DNA, 2946 bp, Artificial Sequence
  derived and/or modified sequence
atggtgcaccactctggaagcatccaatccttcaaacagcagaaggggatgaatatttccaagtcggaaattaccaaggagacaagtctcaagcccagcaggaggagcctgccatgtctggcccaatcatatgcctactctaagtcattgtcacaatctacctctctctttcagagcaccgagtccgagtcacaagcaccaacatcaattactctaatttctactgacaaagctgagcaggttaatacagaagagaataaaaatgacagtgtcctgcgctgcagctttgctgacctgtccgacttttgcctggccttaggcaaagacaaggattatacagacgagtcagagcatgcgacctatgatcggtctcgccttatcaatgatttcgtaattaaggacaagtctgaattcaagacgaaattgagcaagaacgacatgaactatatagcatcttctggaccgctgtttaaagatggcaaaaagcgcatcgactacatcttggtctacaggaagaccaacattcagtatgacaaacgtaatactttcgaaaagaatctgcgggcggagggcctgatgctggagaaggaacctgcaattgccagcccagacattatgtttattaaaattcatattccctgggacacactgtgcaagtacgcagaacgattgaacattagaatgccattccgcaaaaaatgctattacacagatggacgctcaaaatctatggggagaatgcagacttatttccgcaggatcaaaaattggatggctcagaatccgatggtgctagataaaagcgcttttcctgatcttgaagagtccgattgttatacaggccccttcagtagagcgaggattcaccacttcattatcaataataaggatactttctttagtaatgccacccggtcaaggattgtatatcatatgctcgagaggaccaaatacgaaaacgggatcagtaaagtgggtatacgcaagttgatcaataacgggtcttatatagccgcttttccgcctcatgagggcgcatataagagcagtcagccaatcaaaacccatggaccgcagaataacaggcatttgctgtatgaacgctgggcacggtggggaatgtggtataagcaccagcccctcgatctgataaggctctactttggggaaaagataggcttatactttgcttggctaggctggtatacgggcatgctgattcccgctgccatcgtcggcctttgtgtattcttctacgggctgtttacaatgaataatagccaagtttctcaggaaatttgtaaagccaccgaggtatttatgtgtcctctttgcgataagaactgctctctgcagcggctaaatgacagttgcatctacgcgaaagtcacatacctgttcgataacgggggtactgtcttctttgcgatcttcatggccatctgggcgaccgtttttctggaattctggaaaagaaggagatcaatcctcacctacacttgggacctgatcgagtgggaagaagaggaagaaacactccggccgcaatttgaagctaaatactataagatggagatagtcaatccaatcactgggaagcccgagcctcaccagccctcttctgacaaagtcacgcgtcttcttgtctcagtgagtggtattttttttatgatctcactggtgatcacagccgttttcggcgtcgtcgtatatagactcgtcgtgatggagcaattcgcctccttcaagtggaactttatcaaacagtattggcaattcgccacctcagccgcggcagtgtgcataaacttcatcatcatcatgttactcaacctcgcctacgagaaaattgcttatttgttaacaaacttagaataccctagaaccgaaagcgaatgggagaactcttttgcacttaagatgtttttgttccaatttgtgaaccttaacagcagcatcttttacatcgccttttttctgggtcggttcgtcggacatccaggaaaatataacaagctattcgatagatggcggctcgaggagtgccacccaagtggatgtctgatcgacctgtgtcttcagatgggcgtgattatgtttctcaagcagatctggaataattttatggagcttggctatcctctcatacaaaattggtggagccgacataagattaagcggggaattcacgatgccagcatcccacagtgggaaaatgattggaatctacagcctatgaacctgcacggacttatggatgaatacctggagatggtgttacagtttggatttaccactatctttgtcgccgcctttcccctggccccactattagcattgttgaacaatataatagaaatccggctggatgcatataaatttgttactcagtggagacggcccttgcctgcgcgagcgacagacatcggaatttggcttggaatcctcgaggggattggtatcttggcagtaattactaacgctttcgtgatcgctatcacttctgattacatccctaggttcgtctacgaatacaagtatggaccctgcgctaatcatgtggaaccatctgaaaattgtctaaaaggatatgtgaataactccctgtccttcttcgacctgtccgaactggggatgggaaaatccggctactgcagatacagggattatagaggtccaccttggagctctaagccatatgaatttacgcttcaatattggcacattcttgcggctcggttggcgtttatcattgtgttcgagcacctcgtattcggcataaagtccttcattgcttacctgattccagacgtcccgaaggggctgcatgatcgcataaggcgagaaaaatacctcgtacaggaaatgatgtatgaagctgagctcgaacatctgcaacagcagcggagaaagagcggacagcctgttcatcacgaatggccttag

SEQ ID NO: 221694 - DNA, 2946 bp, Artificial Sequence
  derived and/or modified sequence
atggtgcaccacagcggcagcatccagagcttcaagcagcagaagggcatgaacatcagcaagtctgagatcaccaaggagaccagcctgaagcccagccgccgcagcctgccctgcctggcccagagctatgcctacagcaagagcctgagccagagcaccagcctcttccagagcacagagagcgagagccaggcccccaccagcatcaccctcatcagcacagacaaggccgagcaggtgaacacagaggagaacaagaatgacagcgtgctgcgctgcagctttgctgacctgagtgacttctgcctggccctgggcaaggacaaggactacacagatgagagcgagcacgccacctatgacaggagccgcctcatcaatgactttgtgatcaaggacaagtctgagttcaagaccaagctgagcaagaatgacatgaactacatcgccagcagcggccccctcttcaaggatggcaagaagagaattgactacatcctggtgtacaggaagaccaacatccagtatgacaagaggaacacctttgagaagaacctgcgggcagagggcctgatgctggagaaggagcccgccatcgccagcccagacatcatgttcatcaagatccacatcccctgggacaccctgtgcaagtatgcagagcggctgaacatccgcatgcccttcaggaagaagtgctactacacagatggccgcagcaagtccatgggccgcatgcagacctacttccgccgcatcaagaactggatggcccagaaccccatggtgctggacaagagcgccttcccagacctggaggagagtgactgctacacaggccccttcagccgggcccgcatccaccacttcatcatcaacaacaaggacaccttcttcagcaatgccaccaggagccgcatcgtgtaccacatgctggagaggaccaagtatgaaaatggcatcagcaaggtgggcatcaggaagctgatcaacaacggcagctacatcgccgccttcccccctcatgaaggagcctacaagagcagccagcccatcaagacccacggcccccagaacaacagacacctgctgtatgagcgctgggcccgctggggcatgtggtacaagcaccagcccctggacctgatccggctgtactttggagagaagattggcctgtactttgcctggctgggctggtacacaggcatgctgatcccagctgccatcgtgggcctgtgtgtgttcttctacggcctcttcaccatgaacaacagccaggtgtcccaggagatctgcaaggccacagaggtgttcatgtgccccctgtgtgacaagaactgcagcctgcagaggctgaatgacagctgcatctatgccaaggtgacctacctgtttgacaatggaggcaccgtcttctttgccatcttcatggccatctgggccaccgtcttcctggagttctggaagagaagaagaagcatcctgacctacacctgggacctgattgagtgggaggaggaggaggagaccctgcggccccagtttgaggccaagtactacaagatggagatcgtgaaccccatcaccgggaagccagagccccaccagcccagcagtgacaaggtgacccggctgctggtgtctgtgtctggcatcttcttcatgatcagcctggtgatcacagctgtgtttggagtggtggtgtaccgcctggtggtgatggagcagtttgccagcttcaagtggaacttcatcaagcagtactggcagtttgccaccagcgctgctgctgtgtgcatcaacttcatcatcatcatgctgctgaacctggcctatgagaagatcgcctacctgctgaccaacctggagtaccccaggacagaaagtgagtgggagaacagctttgccctgaagatgttcctgttccagtttgtgaacctgaacagcagcatcttctacatcgccttcttcctgggccgctttgtgggccaccctgggaagtacaacaagctgtttgaccgctggaggctggaggagtgccaccccagcggctgcctgattgacctgtgcctgcagatgggcgtcatcatgttcctgaagcagatctggaacaacttcatggagctgggctaccccctcatccagaactggtggagccgccacaagatcaagaggggcatccatgatgccagcatcccccagtgggagaatgactggaacctgcagcccatgaacctgcacggcctgatggatgagtacctggagatggtgctgcagtttggcttcaccaccatctttgtggccgccttccccctggcccccctgctggccctgctgaacaacatcatcgagatccggctggatgcctacaagtttgtgacccagtggaggcggcccctgcctgcccgggccacagacatcggcatctggctgggcatcctggagggcatcggcatcctggccgtcatcaccaatgcctttgtgattgccatcaccagtgactacatccccaggtttgtgtatgagtacaagtatggcccctgtgccaaccacgtggagcccagcgagaactgcctgaagggctacgtgaacaacagcctgtccttctttgacctgtctgagctgggcatgggcaagagcggctactgccgctacagagactaccggggccccccctggagcagcaagccctatgagttcaccctgcagtactggcacatcctggccgcccggctggccttcatcatcgtgtttgagcacctggtgtttggcatcaagagcttcatcgcctacctgatcccagatgtgcccaagggcctgcatgaccgcatcagaagagagaagtacctggtgcaggagatgatgtatgaggccgagctggagcacctgcagcagcagaggaggaagagcggccagcctgtgcaccacgagtggccctag

SEQ ID NO: 221695 - DNA, 2946 bp, Artificial Sequence
  derived and/or modified sequence
atggtgcaccacagcggcagcatccagagcttcaagcagcagaagggcatgaatatttccaagtcagaaatcactaaagagacatccctgaagcccagccgcagatcactaccatgtctcgcgcaatcctacgcatatagcaagagcctctcccagtccacaagcctgttccaatcaacggagagcgagtcacaggctcctacatcaattacgttgataagcactgataaggctgaacaggtaaacaccgaagaaaataaaaacgatagcgtactcaggtgctccttcgccgatctgagcgatttctgcctggcactgggaaaagataaggattatacagatgagtccgaacatgcaacttacgatcgatcccgcctgataaacgatttcgtgattaaggataaatctgaattcaaaaccaaactgtccaagaacgacatgaactatatagcgagctccggccctctattcaaagatggcaaaaaaagaatagactacatcttggtctaccgcaaaaccaatatccagtacgacaagcggaacacctttgagaaaaatctgagagcggaaggacttatgcttgagaaggaacccgccatcgcttctccggacattatgtttattaagatccatattccctgggacactttatgcaaatacgccgagaggttgaatattcggatgcctttccgaaaaaagtgttactacactgacggacgcagtaaatccatgggccggatgcaaacgtatttccggagaattaagaactggatggcgcagaatccaatggtgctcgacaaatccgcctttccagacttggaggaatccgattgctataccggccccttcagccgtgcccgcattcaccatttcattataaacaataaggacacttttttttccaatgcaacaaggagccgcattgtgtatcacatgctcgaacgtacgaagtacgaaaatggtatctcgaaggtcggtattaggaagctcatcaataacggcagctacattgcagccttccccccccatgagggcgcctacaagtccagccagcccatcaagacacatggacctcaaaacaaccgacacctgctgtacgagaggtgggctcggtggggcatgtggtataaacaccagccactggacttgatacggctgtactttggagaaaagattggtctctatttcgcttggctcggatggtacaccggcatgctgattccagcagctatcgtgggactgtgcgtgtttttttacggcctgttcaccatgaacaacagtcaggtgtcgcaagagatctgcaaagccaccgaggtctttatgtgtccactctgtgacaagaattgctccctccagagactgaacgactcctgtatctatgcaaaagtgacctatcttttcgacaatggaggaactgtgtttttcgccattttcatggcaatttgggctaccgtttttctcgagttctggaagcgacgccgcagcatactcacatatacatgggaccttatcgaatgggaagaggaagaagagactctcagaccacagttcgaagcaaagtactataaaatggaaattgtcaaccctatcacaggcaaaccagagccacaccagcccagttctgataaggtgaccaggcttcttgtcagcgtgtccggcatcttctttatgatttccctcgtcataaccgccgtcttcggagtggtggtctacagactcgtggtgatggaacagttcgcatcgttcaagtggaattttataaagcaatattggcaatttgcaacgtcagccgccgcggtctgtattaactttatcatcatcatgctgttaaacttggcctacgaaaaaattgcctaccttttgactaacttagaatatccgagaactgagtcagagtgggagaatagctttgccctcaagatgtttctttttcagtttgtgaatttgaatagcagtattttttacatcgcttttttcttaggacgttttgtgggtcatccgggaaagtataataagctgtttgaccggtggaggctcgaggaatgccacccttccggctgtctcattgacctctgtctccagatgggcgtgataatgtttttgaaacagatctggaacaacttcatggagctgggataccctctgattcagaactggtggtcccgacacaagatcaagagagggatccatgacgcatccattccccaatgggaaaacgattggaacctgcagcctatgaatctgcacggcttgatggatgagtacttggagatggtactgcagttcgggttcacgacaattttcgttgccgccttcccgctggcccccctactcgctttgctcaataacattatcgagatccgcctggacgcctataagtttgtcacccagtggcgccggccgcttcctgcaagggcaacggacataggcatttggctcggaatactcgaaggcatcggcatcctggcagtgatcactaacgcattcgtgattgccataacatcggactatatccctagattcgtgtacgaatataaatacgggccatgcgcaaatcacgtcgagcccagtgagaattgtctcaagggatatgtgaataacagcttgtctttttttgacctttccgagctgggtatggggaagtctgggtattgtcgttacagagattacaggggtccaccttggagctctaagccgtacgaatttactttacagtactggcacattctagctgcccggcttgcatttataatcgtttttgaacacctggtgttcggaattaagagcttcatcgcctacctgatccctgacgttcccaagggactgcatgatcgcatccggagggaaaagtacctcgtgcaggagatgatgtacgaagcggagctggaacatctccagcagcagcggcggaagtcagggcagcccgtgcaccacgagtggccgtag

SEQ ID NO: 221696 - DNA, 6642 bp, Artificial Sequence
  derived and/or modified sequence
ctttcaaataaggtgttgatttatgtggtcttgagaaatctttgttgctctgatcttaagtttctttttataatattagaatcatagtttacctacattacagggcttttatgaagattaaatcgagcatcgtgggtagtgttttttcagcccctgtgactaagtaggttataaatggtcctcagtcatcatcatcataaatgattcaaggcctgaatggcagaagaagaagaggaaaactcaagtgaaaagtgctagacatagaacacagcttacctaataaaacatgctactggctaactaagctggggtggctttctgccccctctacttaaatttaagaaagaaaaacagaaacgtctctgcatctgccactgcataccctctcagagcacagaccaactttgcccttccttaaaagtcccagggtttacctaccaacttttaggaaataaataaccagcctcaaagcttggcaaagagggcatcagtatcagctctagaggtttgctccgatttatatctcctcctccagtaaagtcttctgctcccactcccagccaaccccgctcaacgcccacccctcactgtggcactggacgcgcgggggatgcggggttgttcccagagtagccgctaaggggagccggacgctagaccgccctcccgcgttcccatgacaacgacaccggcgggcgcgtagcctggagagcgaagtgccggctacagcaggtgtcggattgcagtgcgctcgctgaggctccggaccttggagcgtctagagtctggctactgttcctccgcctccctctcgggcagctccctaagccggctgggacgcgcagagtgaaaatggtccaccattcaggctccattcagtcctttaaacagcaaaaaggtatgaatataagcaagagtgagataacaaaagaaacttcgttaaaaccgtctcggagatccctgccttgcctcgcccagagctacgcttactcaaagagcttgagccagtctacttccctcttccagtcaaccgagagtgaatctcaggctcccacatctataaccttaatctccactgacaaagcagagcaagttaatactgaggagaataaaaacgactctgtgctgagatgttcatttgctgacctcagcgatttttgtttggccctaggaaaagataaggattacacggatgaatcagaacacgctacttatgaccgatctcgtctcattaatgactttgttatcaaagataaatctgaattcaagacaaaattatctaagaatgacatgaattacatagcatccagtggacctctgttcaaagatggcaaaaagagaattgattacatcttggtttatagaaagacaaatatacaatatgataaaagaaacacatttgaaaagaacctcagagcagaaggcttgatgttggagaaggagccagctattgcaagccccgatatcatgtttattaaaattcacattccatgggacacgctgtgcaagtatgcagagaggctgaatatcaggatgcccttcaggaaaaaatgctattacactgacgggaggagcaaatcaatgggcaggatgcaaacttattttagaagaatcaaaaactggatggcccaaaacccaatggttcttgacaagtcagcttttccagacctagaggagtcagactgctatactggccccttcagccgtgcacggattcaccacttcataataaataataaagacaccttcttcagcaatgctactcgaagcagaatagtctatcacatgctggaacgcaccaaatatgaaaatggaatatcaaaagtgggtatccgtaaacttataaacaatggctcatacatagcagcgtttccaccacatgagggagcctacaaaagtagccagcccattaaaacccatggacctcagaataacagacatctattatatgagcgctgggcacgctggggaatgtggtataagcatcagcctctggatttaatcaggctatactttggtgagaagattggactatactttgcttggctgggatggtatactggaatgttgattcctgcagcaattgttggtttgtgcgttttcttctatggattatttacaatgaataatagtcaagtaagccaagaaatttgtaaagccactgaagtctttatgtgccctctctgtgacaagaactgctccctgcagagactcaacgacagctgtatctatgccaaggtgacatatttgttcgataatggagggacagtcttctttgctatttttatggcaatatgggccacagtcttcctggagttttggaaaaggagaaggagtatactgacctatacttgggaccttatcgaatgggaagaagaggaggaaacacttcgtccccagtttgaagccaagtattacaagatggagattgtaaatcccatcacgggaaaacctgaaccacatcagccttcctcagacaaagtcactcgtcttcttgtttctgtctcaggaatattcttcatgatatccttggtgatcactgcagtgtttggagttgtggtgtaccgcctggttgtcatggaacagtttgcatcattcaagtggaatttcatcaaacaatactggcagtttgcaacatctgctgctgctgtctgtatcaatttcataatcattatgttgctgaatcttgcttatgaaaaaattgcttacctcctcaccaatttagaatatcctcgaacagaatcagagtgggaaaacagcttcgccctgaagatgttcctcttccagtttgtcaatttaaacagttccatcttctatatcgctttctttttgggaagattcgtaggccacccaggaaaatacaataaactttttgaccggtggagactggaggaatgtcatcctagtggctgtttgatagacctctgcctccagatgggtgtcatcatgtttttgaagcaaatatggaacaacttcatggaactaggatacccgttgatccagaactggtggtcacgacataaaatcaagcggggaatacatgatgcttccatacctcagtgggaaaatgattggaatctgcagcccatgaaccttcatggactgatggatgagtacttagaaatggttttgcaatttggttttaccaccatctttgttgcggcttttcctctagcccctcttttggctttgttaaacaatatcattgaaatcaggctggatgcatacaaatttgtcactcaatggcggaggcctttgccagcccgagcaactgacataggtatctggcttggaattctcgaaggaatcggtatattggctgtgatcaccaatgcatttgtaattgctattacttctgattacatcccacgttttgtttatgaatacaaatatggcccctgtgcaaatcatgtagaaccaagtgaaaattgcttgaagggatatgtcaacaatagcctatccttctttgacctgagtgagcttggtatgggaaaatctggttattgcaggtacagagactacagaggcccgccctggagttccaaaccctatgagtttactttacaatactggcatatccttgctgctagattggccttcattattgtgtttgagcaccttgtttttgggattaagtcattcatcgcatacctgattccagacgtaccaaagggtctacatgaccgaatacgacgagagaagtacttagttcaagaaatgatgtatgaggctgaactggaacatttgcaacaacaacggagaaaaagtggtcagcctgttcaccatgaatggccttagttgacacctgttacccattaggggtgataacattaatgggaagaaatgatggcaactttgaatgctaggtgaaatctaggaggaaggcatacttggcaaaccacatgtataatatgctacttggaaatgtatcacagccatctctgggatttgaaatatccagacttgtagggaagaaaacaatgacttgacgaccttaaaaagggttagattgacattgcaggaagccaggatgtaattctcagaaccagtctcagggagatatatgcttggagaactctgccttccatcaactgcagtgtaatgggaaagagggtggtgaggttttgaaagacagatttccatgtaaatgtgcacaagccaggcatggcttaaaatatcatgcagtcttcactcacatactaatttgactttggaaagtatggttgagttcagatacttataagaaatgacttaaacaaatccttgccttggctgccagaactctacatcccttcagtttacaggttggtaggaattgcccatgtctcttgctgagattatggatctgtgccacaggggatttatgctgctttacattgactatgcagttgaagagttgcacatcacctttagtagtcaaaccaaaaatctaagattccaaaaagaacagcattcattgaaataatattccattgcattggctacttcaagtctcttttacccctggcagagccagttgcagtgcaattttttgtactaaatgccaataaagccacatacttataaactatgaatggctattcttatatagtttagaacacaactaatccatactttattgtggaaggctgttttatagtttatttaattttttctctatgatttattacaactctcacggaatattaacttgaaatgctgtaaatacgttggttttccttgtccctttgcaccttgacagtacgtagtatacattgtggtttatgcagctctgacaccagtttttgctattgtaatatgtttattcgggaaaactgaggccagatgctctgcaacacttacgctttttcaacaatgtgcactcttactcatgaactaatgaaaataatgcatgaatataaatctatattatttgctaaaaaaagaaaaaacatttgtgttttagtttcttttttcatgactgaagggagttttatgttattatttcttccatagttttgttttggtttatttttaacaacgctctagaaacaaagtcaaattaatcacaaaagacataattttgctttgttgtggaatttctatttcaacgtcaactctgtatctatgagtatgtctgttccacagacagatgaggcaggagtgatggggcactcaagaaagttcagaggaggcataagctatggaggttggaaaggaagaaagagaagagctgaagtaaatgtatggtagaaattaagacgtttctttgcaaaacaaggaaatcacacatatgcacacatacatatttatggttactatgattgttattatttgtccaatcaagcaaagcaccattatttctaacatataaaagaccagatcaaacacaatggaaataaagctactacatatatatgccagtatttctctagtaagattatgtttctcttactagaaaactattttctaaatattaacactgaaaatgttttgttagcttttccttctttctctccagaagaaacatggatagatgatagctgtttcattgtttgtttttgtcaagcatattcactttcctccttgtcctctgattctgagcaaagggcctcagactctgaacttccctcaagtgccgttgttatgtgaaactcttccattcagattccagagaggttctcatgctcccccccctccttatttgtagcaatcgtagcaactaattccactaagtacaagggagttttttacactcctccatttttatagcatctgcatttctttttctttgttaggtacatgtatacacctgcctgagtataaatactctctctacctaataataacatcaaccaacatcttttccaaattagggccacagaacagcaacatttgtctgacagtagtataaagaataatgatagctctatccttaagaagtatttcctttcctttttatatagtcccgttagggtttaaaaccatattgatcaactagaaagaaaaatatgaaaagagaaaaatattttaatttaaaaattgtaatacattgatttataaaatgccttctctgatacttttgaaacagatgtgaaaaacagaaaaagaaaaaattgtctgaaatgtttattttgcaaaacagtgcaatagaatctagttatgccttcatcactgttgacagtaaatactgacagccccttgcagtgtgttagttttagatcactctgttttagttgagagaaatgttttatatcatggtttttatatgaatacaaattatttctcaaagatttatagcacacactattctcaggaattctgtattacatgaatgctgcttatatattttcatattctaacttgtcttttcaagcaaataactaatatatatgtgcatgcagtctgccttgacaagttgttccaagctgaagagctttcactgtacaatgtgtggaaaatcaccatagatcatggctgaaatagtttgtaattgtctgagtctgtgcacgtacttttagataaaatgctgctgagtgactgcatgatgagatacaacttctgaatgctgcacattcttccaaaatgatccttagcacaatctattgtatgatggaatgaatagaaaactttttcactcaataaattattatttgatatggt

SEQ ID NO: 221697 - DNA, 2946 bp, Artificial Sequence
  derived and/or modified sequence
atggtccaccactccggaagtatccagtcatttaagcaacagaaaggcatgaacatatctaagagtgaaattacgaaagagacctctctgaaacctagtcggagaagcctgccttgcttggcccagagctacgcctattccaagagcctgtctcagagtactagcctgttccagagcactgaatcagagagccaggccccaacatctattactctcatttctactgacaaggctgaacaagttaatacagaagaaaataagaacgacagcgtgcttcggtgctcattcgccgacctgagtgacttctgcctggcgctgggcaaagataaggactatacagacgagagtgagcacgctacctacgatcgcagccggctgatcaatgatttcgttataaaagataaatccgagttcaagactaaactgagtaaaaatgacatgaactacattgcttcatccgggccactttttaaggacggtaagaagagaatagactacattctggtgtacaggaagactaacattcagtacgataaaagaaacacctttgaaaagaaccttcgggctgaggggctgatgctcgagaaagaaccagcaatcgcttctcccgatataatgtttatcaaaatacacatcccttgggacacgctttgcaaatatgcagaacgcctgaacatccgaatgccctttaggaagaagtgttactatacagacggtcgaagcaaatctatgggacgaatgcagacgtacttcagaaggattaagaactggatggctcagaacccaatggtgttggacaagtcagcatttcccgatctggaggaaagtgattgttacaccgggccttttagccgcgctaggattcaccatttcattataaacaacaaagatacatttttctctaatgcaacaagaagtaggattgtgtatcacatgctcgaacgaacgaagtatgagaatggcataagcaaggtgggcatccgaaagctcatcaataatgggtcctatatcgccgcattccctcctcatgaaggggcatataaatcatctcagccaattaagacccatgggcctcaaaacaaccgacacctcctatacgagcgatgggcccgatggggcatgtggtacaagcaccagcccctcgatctgattcggctatactttggggagaaaatcggactctactttgcatggcttggctggtacactggtatgttgattcctgctgctatcgtggggctttgcgtctttttttacggtctgttcaccatgaataactcacaggtgagtcaggagatatgcaaagcaactgaagttttcatgtgcccgctttgcgataagaactgttcccttcagcgtctcaatgactcttgtatctacgcaaaggttacttacctgttcgataacggagggactgtctttttcgctatcttcatggccatatgggcgaccgtcttcctggagttctggaagaggaggcgctctatcctgacttacacgtgggatctcatcgagtgggaggaggaagaggaaacgctaaggccccagttcgaagcaaaatattacaagatggaaatcgtgaatccgatcacgggcaagcccgaaccgcatcaacccagttcagacaaagtgacaaggctgctcgtgtcagttagtggaatcttctttatgatctccctcgtgattaccgctgtcttcggggtcgtggtctaccggctcgtggtgatggagcagtttgctagcttcaagtggaattttattaagcaatactggcagttcgctacatccgccgcagccgtgtgcatcaacttcatcattatcatgctgctgaatctggcctacgagaagatcgcgtacctgttgacaaacctggagtaccccaggaccgagagtgagtgggagaatagcttcgcactgaagatgtttctctttcagtttgttaatcttaatagctccatattctatattgcgttctttctcggacgattcgtcgggcatcctgggaagtacaataagctcttcgaccggtggcggctggaggagtgccaccccagcgggtgtctgattgacctctgccttcaaatgggggtgattatgtttctgaagcaaatttggaacaacttcatggagctcggctatcctttgatccagaattggtggagtaggcacaagattaagcgaggtattcatgatgcatcaatcccccagtgggagaacgattggaatctacaaccaatgaacttgcacgggctaatggatgagtacttggaaatggtgttgcagttcggcttcacaactatcttcgtcgcggcattccctctggcacctctgttggcactcctgaataacataatcgaaatccgactcgatgcctataaatttgtgacccagtggcgacgcccactcccagctcgtgccaccgacattgggatctggctcgggatactagagggaattggaatcctggcggtcatcacaaatgccttcgtcattgcaatcacctctgattatataccacggttcgtgtatgagtacaaatatgggccatgcgcaaatcatgttgaaccatcggaaaattgtctaaaaggctacgtgaataactccctttctttctttgacctctcggagctgggaatgggtaagtccgggtactgccggtatagagactaccgcggtcccccatggtcctccaaaccatatgaattcacactgcaatactggcacattctggcagcccgtctggccttcatcattgtgttcgagcacctggtttttggcatcaaatccttcatagcctaccttattcccgatgtgccaaaagggctgcacgaccgtatcaggcgagagaagtatctagtacaggagatgatgtatgaggctgagctggaacatttgcagcagcagcggcgtaaaagcgggcagcccgtccaccatgagtggccctag

SEQ ID NO: 221698 - protein, 718 aa, Artificial Sequence
  derived and/or modified sequence
MIVDKLLDDSRGGEGLRDAAGGCGLMTSPLNLSYFYGASPPAAAPGACDASCSVLGPSAPGSPGSDSSDFSSASSVSSCGAVESRSRGGARAERQPVEPHMGVGRQQRGPFQGVRVKNSVKELLLHIRSHKQKASGQAVDDFKTQGVNIEQFRELKNTVSYSGKRKGPDSLSDGPACKRPALLHSQFLTPPQTPTPGESMEDVHLNEPKQESSADLLQNIINIKNECSPVSLNTVQVSWLNPVVVPQSSPAEQCQDFHGGQVFSPPQKCQPFQVRGSQQMIDQASLYQYSPQNQHVEQQPHYTHKPTLEYSPFPIPPQSPAYEPNLFDGPESQFCPNQSLVSLLGDQRESENIANPMQTSSSVQQQNDAHLHSFSMMPSSACEAMVGHEMASDSSNTSLPFSNMGNPMNTTQLGKSLFQWQVEQEESKLANISQDQFLSKDADGDTFLHIAVAQGRRALSYVLARKMNALHMLDIKEHNGQSAFQVAVAANQHLIVQDLVNIGAQVNTTDCWGRTPLHVCAEKGHSQVLQAIQKGAVGSNQFVDLEATNYDGLTPLHCAVIAHNAVVHELQRNQQPHSPEVQELLLKNKSLVDTIKCLIQMGAAVEAKDRKSGRTALHLAAEEANLELIRLFLELPSCLSFVNAKAYNGNTALHVAASLQYRLTQLDAVRLLMRKGADPSTRNLENEQPVHLVPDGPVGEQIRRILKGKSIQQRAPPY

SEQ ID NO: 221699 - protein, 110 aa, Artificial Sequence
  derived and/or modified sequence
MIVDKLLDDSRGGEGLRDAAGGCGLMTSPLNLSYFYGASPPAAAPGACDASCSVLGPSAPGSPGSDSSDFSSASSVSSCGAVESRSRGGARAERQPVEPHMGVGRQQRGP

SEQ ID NO: 221700 - protein, 601 aa, Artificial Sequence
  derived and/or modified sequence
MGVGRQQRGPFQGVRVKNSVKELLLHIRSHKQKASGQAVDDFKTQGVNIEQFRELKNTVSYSGKRKGPDSLSDGPACKRPALLHSQFLTPPQTPTPGESMEDVHLNEPKQESSADLLQNIINIKNECSPVSLNTVQVSWLNPVVVPQSSPAEQCQDFHGGQVFSPPQKCQPFQVRGSQQMIDQASLYQYSPQNQHVEQQPHYTHKPTLEYSPFPIPPQSPAYEPNLFDGPESQFCPNQSLVSLLGDQRESENIANPMQTSSSVQQQNDAHLHSFSMMPSSACEAMVGHEMASDSSNTSLPFSNMGNPMNTTQLGKSLFQWQVEQEESKLANISQDQFLSKDADGDTFLHIAVAQGRRALSYVLARKMNALHMLDIKEHNGQSAFQVAVAANQHLIVQDLVNIGAQVNTTDCWGRTPLHVCAEKGHSQVLQAIQKGAVGSNQFVDLEATNYDGLTPLHCAVIAHNAVVHELQRNQQPHSPEVQELLLKNKSLVDTIKCLIQMGAAVEAKDRKSGRTALHLAAEEANLELIRLFLELPSCLSFVNAKAYNGNTALHVAASLQYRLTQLDAVRLLMRKGADPSTRNLENEQPVHLVPDGPVGEQ

SEQ ID NO: 221701 - DNA, 174 bp, Artificial Sequence
  derived and/or modified sequence
atgggcacagctgtgggcccccaccacagccctgcccctcatgacagcgccctgcctgcccggctgctgaccagtgacttcccctacggccgcagctgccagatcgagcaggtgaagtacagcgtgcctgacaccggcctcttccagcactgggagggcagcatccccacctag

SEQ ID NO: 221702 - DNA, 2157 bp, Artificial Sequence
  derived and/or modified sequence
atgatcgtggataaattactcgatgacagtcgcgggggagaagggctgcgtgatgccgccgggggatgcgggctgatgacttctccccttaacctgtcttacttctatggcgcctccccccctgccgcagccccaggagcttgtgacgcgtcctgctccgtcctcggaccctcagctcccggctcccctggctctgatagctctgacttttcctccgcatcctctgtcagtagttgcggtgcagtggagagcagatccagggggggggccagagccgaacgccaacctgtggagccccatatgggggtgggcaggcagcagcgaggcccatttcagggagtgcgagtcaaaaatagcgttaaggaactgcttctacacatacgcagtcataagcaaaaagccagtggacaagctgttgacgacttcaaaacacagggcgtaaacattgagcagttcagagaactgaagaatacagtgagttatagcggcaaaaggaagggacctgactctctctctgatggccctgcttgcaagagaccagccttgttacacagtcaattcctgacccccccacagacacctacccccggcgagagtatggaggatgttcacttaaatgagcccaaacaagagagctccgctgatctgttgcaaaacatcatcaatatcaagaatgaatgtagtccagtgagcctgaacaccgtgcaggtgagctggctgaatcctgtggtggttccacagtctagccctgcggaacagtgtcaggacttccacggaggacaagtgttttctcctccacagaagtgccagcctttccaggtgaggggatcacaacaaatgatcgatcaagcctcattatatcagtattcacctcagaaccagcatgtggagcagcagccccactatacccataagccgaccttggagtattcaccgttccccatccctcctcagagccctgcctacgaaccaaatttgtttgacggccccgagagccagttctgtccaaatcagtccctggtttctctactgggagatcagcgcgagtcagagaatattgcaaacccaatgcaaacgtcttcttctgtccagcaacagaatgatgctcacctccattccttcagtatgatgcccagtagcgcatgtgaagccatggtgggccacgagatggcaagcgattccagcaacacctccctaccgtttagcaatatggggaatccaatgaacacgacgcagctggggaaatctctgttccaatggcaggtagagcaggaggagtctaagctcgccaatatctctcaggaccaatttctgtccaaggacgccgatggagatactttcctccacattgccgtggcccaaggaagaagagccttaagctatgtgttggccagaaaaatgaacgccttacatatgctggacataaaagagcacaatgggcagtctgcatttcaggtggccgttgctgccaaccaacacttgattgtgcaggatctcgtgaatattggcgcacaggtgaataccactgactgctggggaagaactcccctacacgtttgcgccgagaaaggacacagccaagttctgcaagctatccagaagggagcggtaggatctaaccaatttgtggatcttgaggctacaaattacgacggacttacccctttacattgcgccgtgattgctcacaatgccgtagtgcacgagctgcagcgcaatcaacagccccattcacctgaggtacaggaactgcttttaaaaaataagagcctcgttgacaccataaagtgcctcatccagatgggggccgccgtagaagccaaggacagaaagagcggaaggaccgctttgcaccttgctgccgaggaggcaaatttagagctcatcaggctttttctcgaacttccttcctgtctgagtttcgtcaatgccaaggcttataatggcaataccgccttgcacgtcgctgcatcactccagtatcgcctgacacaacttgacgcagtcaggctcctcatgcggaagggcgctgaccctagcacgcgaaaccttgaaaatgagcagcccgttcaccttgtgcccgatgggccagttggagagcagatcaggaggattctgaagggaaaatctatccagcagagagcgcctccatattag

SEQ ID NO: 221703 - DNA, 333 bp, Artificial Sequence
  derived and/or modified sequence
atgatcgtcgataagctgctcgatgatagcagaggcggagaaggtctcagggacgcagccggagggtgcggtctgatgacctctccactgaatctgagctacttctacggggcaagcccgcccgcagccgcccccggtgcctgtgatgctagctgttccgtcttaggaccaagcgctccaggatcaccaggaagtgatagttctgattttagttctgctagcagtgtctcttcatgcggggctgtcgaatcccggagccgtggcggggcccgggccgagcgacagcccgttgaaccacacatgggcgttggacgtcagcagcggggcccttag

SEQ ID NO: 221704 - DNA, 2157 bp, Artificial Sequence
  derived and/or modified sequence
atgattgtggacaagctgctggatgacagccggggcggggagggcctgagagatgctgctgggggctgcggcctgatgaccagccccctgaacctgagctacttctacggggccagccccccagctgctgcccctggggcctgtgatgccagctgcagcgtgctgggccccagcgcccctggcagccctggcagtgacagcagtgacttcagcagcgccagctctgtgagcagctgtggggctgtggagagccgcagccggggcggggcccgggcagagcggcagcctgtggagccccacatgggcgtgggccggcagcagaggggccccttccagggcgtgcgggtgaagaacagcgtgaaggagctgctgctgcacatccgcagccacaagcagaaggccagcggccaggccgtggatgacttcaagacccagggcgtgaacatcgagcagttccgggagctgaagaacacagtgtcctacagcggcaagaggaagggccctgacagcctgagtgatggccctgcctgcaagaggcctgccctgctgcacagccagttcctgaccccaccccagacccccaccccaggagagagcatggaggatgtgcacctgaatgagcccaagcaggagagcagcgctgacctgctgcagaacatcatcaacatcaagaatgaatgttctcctgtgtccctgaacacagtgcaggtgtcctggctgaaccctgtggtggtgccccagagcagccctgctgagcagtgccaggacttccacggcggccaggtgttcagccccccccagaagtgccagcccttccaggtgcggggcagccagcagatgattgaccaggccagcctgtaccagtacagcccccagaaccagcacgtggagcagcagccccactacacccacaagcccaccctggagtacagccccttccccatccccccccagagccctgcctatgagcccaacctgtttgatggccctgagagccagttctgccccaaccagagcctggtgtccctgctgggggaccagcgggagagtgaaaatattgccaaccccatgcagaccagcagctctgtgcagcagcagaatgatgcccacctgcacagcttctccatgatgcccagcagcgcctgtgaggccatggtgggccacgagatggccagtgacagcagcaacaccagcctgcccttcagcaacatgggcaaccccatgaacaccacccagctgggcaagagcctcttccagtggcaggtggagcaggaggagagcaagctggccaacatcagccaggaccagttcctgagcaaggatgctgatggagacaccttcctgcacatcgctgtggcccagggccggcgggccctgtcctatgtgctggccaggaagatgaatgccctgcacatgctggacatcaaggagcacaacggccagagcgccttccaggtggccgtggccgccaaccagcacctgattgtgcaggacctggtgaacatcggggcccaggtgaacaccacagactgctggggccgcacccccctgcacgtgtgtgccgagaagggccacagccaggtgctgcaggccatccagaagggagctgtgggcagcaaccagtttgtggacctggaggccaccaactatgatggcctgacccccctgcactgtgctgtgattgcccacaatgctgtggtgcatgagctgcagaggaaccagcagccccacagccctgaggtgcaggagctgctgctgaagaacaagagcctggtggacaccatcaagtgcctgatccagatgggcgctgctgtggaggccaaggacaggaagagcggccgcacagccctgcacctggccgctgaggaggccaacctggagctgatccgcctcttcctggagctgcccagctgcctgagctttgtgaatgccaaggcctacaacggcaacacagccctgcacgtggccgccagcctgcagtaccgcctgacccagctggatgctgtgcggctgctgatgaggaaaggagctgaccccagcaccaggaacctggagaatgagcagcctgtgcacctggtgcctgatggccctgtgggggagcagatccgccgcatcctgaagggcaagagcatccagcagagggccccaccctactag

SEQ ID NO: 221705 - DNA, 333 bp, Artificial Sequence
  derived and/or modified sequence
atgattgtggacaagctgctggatgacagccggggcggggagggcctgagagatgctgctgggggctgcggcctgatgaccagccccctgaacctgagctacttctacggggccagccccccagctgctgcccctggggcctgtgatgccagctgcagcgtgctgggccccagcgcccctggcagccctggcagtgacagcagtgacttcagcagcgccagctctgtgagcagctgtggggctgtggagagccgcagccggggcggggcccgggcagagcggcagcctgtggagccccacatgggcgtgggccggcagcagaggggcccctag

SEQ ID NO: 221706 - DNA, 2157 bp, Artificial Sequence
  derived and/or modified sequence
atgatcgtggacaagctgctggacgacagccggggcggcgagggcctgcgagacgcagctggcgggtgtggactcatgacttccccattgaatctgagttatttctacggagcttcaccgcccgcagcggctcccggtgcatgcgacgccagttgcagcgtgctgggtccatcagcccccgggtcacctgggtccgatagtagcgacttctcgagtgcatcttccgtctccagttgcggagccgtggaatcaaggagcagggggggagcccgagcggagcgccaacctgtggagccacatatgggcgtcggcaggcagcaacgtggaccatttcagggtgtacgggtgaaaaatagcgtcaaagagctccttttacatattcgttctcataagcagaaggcaagtgggcaggcggtggatgactttaagactcagggcgtgaatatcgagcagtttcgggaactaaagaatactgtgtcatactctgggaagagaaaggggccggatagcttgtctgacggcccggcgtgtaagagaccggccctccttcattctcaattcctaacgccgccacagacaccaaccccaggagaatcgatggaggatgtgcacttgaatgaacccaagcaagaatcatccgcagacctccttcaaaacataatcaacatcaaaaacgagtgcagccccgtctccttgaacactgtacaggtctcttggctcaatcccgtcgtggtgccccagtcttccccggctgaacagtgccaggacttccacggaggccaggtgttcagccccccacagaagtgccagccctttcaggtgcgcggttcgcagcagatgatagaccaggcttctctgtatcagtactccccacaaaaccaacacgtcgaacaacagccacactatacacataaacccaccttagagtacagtccttttccaattccacctcagtcacccgcctatgaacccaacctatttgacgggcctgagtcccagttttgtccaaaccagtcacttgtaagtctcctcggggatcagagggagtctgaaaatattgcaaacccaatgcaaaccagttcgtcggtccaacagcaaaacgacgcccacctccactccttctccatgatgccctcttctgcgtgtgaggccatggtggggcacgaaatggccagcgacagctcgaatacttcgctcccatttagcaatatggggaaccctatgaataccacgcagctagggaaaagcctctttcagtggcaagtggagcaggaggagtcaaaattggcaaatatatctcaggatcagtttctctccaaggacgcagatggcgatactttcctgcacatcgcagttgcgcaggggcgaagagccttatcttatgtacttgcacgaaagatgaacgcgctccatatgttggacataaaagaacacaatggccagagtgctttccaggttgcagttgctgctaaccaacatctcattgttcaggatctggtgaacatcggggcccaggtgaacacaacggattgctggggacgaacacctttacatgtatgtgccgagaagggacactcccaggtactccaggctattcagaagggagccgttggatccaaccagtttgtggacctcgaggctaccaactatgatggactaacaccactacattgtgctgtcatcgcacataatgcagtcgttcacgagttgcagagaaaccagcagccacactctcctgaagtgcaggagcttttgctcaaaaataaatcccttgttgacacaattaaatgtctgattcagatgggggctgccgtggaagccaaggacaggaagtcagggcgcactgcacttcatctggccgccgaggaagcaaatttggaactcatccgactttttcttgagctcccatcatgtctatctttcgtgaatgccaaagcctacaatggcaacacagcactacatgtcgcagccagtctccagtaccgtttgactcagctggacgctgtacggctcctgatgcggaaaggagccgacccctcgacgcgtaacctcgaaaacgaacagccagtgcacctggttcccgacggccccgtgggagaacagatccgtcgcatcctgaagggtaaatctattcagcaaagggcaccgccatattag

SEQ ID NO: 221707 - DNA, 333 bp, Artificial Sequence
  derived and/or modified sequence
atgatcgtggacaagctgctggacgacagccggggcggcgagggcctgcgggacgcggctggtgggtgcgggctgatgacctctccattgaacctctcttacttttatggcgccagcccccccgcggcagctcctggcgcctgcgacgcctcgtgcagtgtgctaggccctagcgcgcctggctccccggggtccgactccagcgatttctcttctgcttccagcgtttcttcttgtggcgcagtggagtctaggtccagaggcggagctagagctgaaagacagccggtcgagccccatatgggtgttgggagacagcagcggggaccatag

SEQ ID NO: 221708 - DNA, 3923 bp, Artificial Sequence
  derived and/or modified sequence
gtactggcccgcgccgtccgcccgccgacagctccctgagccagcccgggaggcagccgcgcgcagcgagccggtggcgcaggtgtcggggtcctcgagcgcccagcctgggagcatgattgtggacaagctgctggacgacagccgcggcggagaggggctgcgggacgcggcgggcggctgcggcctcatgaccagcccgctcaacctgagctacttctacggcgcgtcgccgcccgccgccgccccgggcgcctgcgacgccagctgctcggtcttgggcccctcggcgcccggctcgcccggctccgactcctccgacttctcctctgcctcgtcggtgtcctcctgcggcgccgtggagtcccggtcgagaggcggcgcccgcgccgagcgccagccagttgagccccatatgggggttggcaggcagcagagaggcccctttcaaggtgttcgggtaaagaactcagtgaaggaactcctgttgcacatccgaagtcataaacagaaggcttctggccaagctgtggatgattttaagacacaaggtgtgaacatagaacagttcagagaattgaagaacacagtatcatacagtgggaaaaggaaagggcccgattcgttgtctgatggacctgcttgcaaaaggccagctctgttgcattcccaatttttgacaccacctcaaacaccaacgcccggggagagcatggaagatgttcatctcaatgaacccaaacaggagagcagtgctgatctgcttcagaacattatcaacattaagaatgaatgcagccccgtttccctgaacacagttcaagttagctggctgaaccccgtggtggtccctcagagctcccccgcagagcagtgtcaggacttccatggagggcaggtcttttctccacctcagaaatgccaaccattccaagtcaggggctcccaacaaatgatagaccaggcttccctgtaccagtattctccacagaaccagcatgtagagcagcagccacactacacccacaaaccaactctggaatacagtccttttcccatacctccccagtcccccgcttatgaaccaaacctctttgatggtccagaatcacagttttgcccaaaccaaagcttagtttcccttcttggtgatcaaagggaatctgagaatattgctaatcccatgcagacttcctccagtgttcagcagcaaaatgatgctcacttgcacagcttcagcatgatgcccagcagcgcctgtgaggccatggtggggcacgagatggcctctgactcttcaaacacttcactgccattctcaaacatgggaaatccaatgaacaccacacagttagggaaatcactttttcagtggcaggtggagcaggaagaaagcaaattggcaaatatttcccaagaccagtttctttcaaaggatgcagatggtgacacgttccttcatattgctgttgcccaagggagaagggcactttcctatgttcttgcaagaaagatgaatgcacttcacatgctggatattaaagagcacaatggacagagtgcctttcaggtggcagtggctgccaatcagcatctcattgtgcaggatctggtgaacatcggggcacaggtgaacaccacagactgctggggaagaacacctctgcatgtgtgtgctgagaagggccactcccaggtgcttcaggcgattcagaagggagcagtgggaagtaatcagtttgtggatcttgaggcaactaactatgatggcctgactccccttcactgtgcagtcatagcccacaatgctgtggtccatgaactccagagaaatcaacagcctcattcacctgaagttcaggagcttttactgaagaataagagtctggttgataccattaagtgcctaattcaaatgggagcagcggtggaagcgaaggatcgcaaaagtggccgcacagccctgcatttggcagctgaagaagcaaatctggaactcattcgcctctttttggagctgcccagttgcctgtcttttgtgaatgcaaaggcttacaatggcaacactgccctccatgttgctgccagcttgcagtatcggttgacacaattagatgctgtccgcctgttgatgaggaagggagcagacccaagtactcggaacttggagaacgaacagccagtgcatttggttcccgatggccctgtgggagaacagatccgacgtatcctgaagggaaagtccattcagcagagagctccaccgtattagctccattagcttggagcctggctagcaacactcactgtcagttaggcagtcctgatgtatctgtacatagaccatttgccttatattggcaaatgtaagttgtttctatgaaacaaacatatttagttcactattatatagtgggttatattaaaagaaaagaagaaaaatatctaatttctcttggcagatttgcatatttcatacccaggtatctgggatctagacatctgaatttgatctcaatggtaacattgccttcaattaacagtagcttttgagtaggaaaggactttgatttgtggcacaaaacattattaatatagctattgacagtttcaaagcaggtaaattgtaaatgtttctttaagaaaaagcatgtgaaaggaaaaaggtaaatacagcattgaggcttcatttggccttagtccctgggagttactggcgttggacaggcttcagtcattggactagatgaaaggtgtccatggttagaatttgatctttgcaaactgtatataattgttatttttgtccttaaaaatattgtacatacttggttgttaacatggtcatatttgaaatgtataagtccataaaatagaaaagaacaagtgaattgttgctatttaaaaaaattttacaattcttactaaggagtttttattgtgtaatcactaagtctttgtagataaagcagatggggagttacggagttgttcctttactggctgaaagatatattcgaattgtaaagatgctttttctcatgcattgaaattatacattatttgtagggaattgcatgcttttttttttttttctcccgagacagggtcttgctctggcgcccaggctggagtacagtggcatgatcttggctcacttcagccttgacttgggctcaagtgatcctcctacctgagccttctgagtaactggaactacaggtgtgcactcctcgcctggctaattttttattttttgtacaggcaggatcttgccaccttgcccaggctggtcttgaactcctgagctcatgccatctgcctgccttagtctcccaaaatgctgggattacaggagtgagccaccatgcccggctggcagttgcatggaagagaacacctctttatggcttaccctctagaatttctaatttatgtgttctgttgaaatttttgtttttttacctttattgaaacaacaaaaagtcagtattgaaacatatcttcctgttttctgttgtcaaatgatgataatgtgccatgatgttttatatatatcattcagaaaaagttttattttttaataacattctattaacattattttgcttgccgctggcatgcctgaggaatgtatttggctttgattacacactaagtttttgtaataaatttgactcattaaaaaccttttttttttaaaaaaaaaaaaaaagaaaatctcattagtgaacttatctttgcagctgagtacttaaattctttttaaaaagataccctttggattgatcacattgtttgacccagtatgtcttgtagacacgttagttataatcaccttgtatctctaaatatggtgtgatatgaaccagtccattcacattggaaaaactgatggttttaaataaactaattcactaata

SEQ ID NO: 221709 - DNA, 3787 bp, Artificial Sequence
  derived and/or modified sequence
ctcttgccacgaggtcagacggcgagttcttagagaaaaaggctgcttagctgctgcttatcatgtaacctcaaaaggaaactgatcgtctttctcatgctgtcacgtacttgggttattatcgctgattacagctggaaacaattgatttgctcttacgtatttgtgtgacttgactcttcaaacacaaaggttaacaggaagatctcgagggccctggctgaacttcaccttttggctttcttggcctgatgctgaactctcgaggttgagccccatatgggggttggcaggcagcagagaggcccctttcaaggtgttcgggtaaagaactcagtgaaggaactcctgttgcacatccgaagtcataaacagaaggcttctggccaagctgtggatgattttaagacacaaggtgtgaacatagaacagttcagagaattgaagaacacagtatcatacagtgggaaaaggaaagggcccgattcgttgtctgatggacctgcttgcaaaaggccagctctgttgcattcccaatttttgacaccacctcaaacaccaacgcccggggagagcatggaagatgttcatctcaatgaacccaaacaggagagcagtgctgatctgcttcagaacattatcaacattaagaatgaatgcagccccgtttccctgaacacagttcaagttagctggctgaaccccgtggtggtccctcagagctcccccgcagagcagtgtcaggacttccatggagggcaggtcttttctccacctcagaaatgccaaccattccaagtcaggggctcccaacaaatgatagaccaggcttccctgtaccagtattctccacagaaccagcatgtagagcagcagccacactacacccacaaaccaactctggaatacagtccttttcccatacctccccagtcccccgcttatgaaccaaacctctttgatggtccagaatcacagttttgcccaaaccaaagcttagtttcccttcttggtgatcaaagggaatctgagaatattgctaatcccatgcagacttcctccagtgttcagcagcaaaatgatgctcacttgcacagcttcagcatgatgcccagcagcgcctgtgaggccatggtggggcacgagatggcctctgactcttcaaacacttcactgccattctcaaacatgggaaatccaatgaacaccacacagttagggaaatcactttttcagtggcaggtggagcaggaagaaagcaaattggcaaatatttcccaagaccagtttctttcaaaggatgcagatggtgacacgttccttcatattgctgttgcccaagggagaagggcactttcctatgttcttgcaagaaagatgaatgcacttcacatgctggatattaaagagcacaatggacagagtgcctttcaggtggcagtggctgccaatcagcatctcattgtgcaggatctggtgaacatcggggcacaggtgaacaccacagactgctggggaagaacacctctgcatgtgtgtgctgagaagggccactcccaggtgcttcaggcgattcagaagggagcagtgggaagtaatcagtttgtggatcttgaggcaactaactatgatggcctgactccccttcactgtgcagtcatagcccacaatgctgtggtccatgaactccagagaaatcaacagcctcattcacctgaagttcaggagcttttactgaagaataagagtctggttgataccattaagtgcctaattcaaatgggagcagcggtggaagcgaaggatcgcaaaagtggccgcacagccctgcatttggcagctgaagaagcaaatctggaactcattcgcctctttttggagctgcccagttgcctgtcttttgtgaatgcaaaggcttacaatggcaacactgccctccatgttgctgccagcttgcagtatcggttgacacaattagatgctgtccgcctgttgatgaggaagggagcagacccaagtactcggaacttggagaacgaacagccagtgcatttggttcccgatggccctgtgggagaacagatccgacgtatcctgaagggaaagtccattcagcagagagctccaccgtattagctccattagcttggagcctggctagcaacactcactgtcagttaggcagtcctgatgtatctgtacatagaccatttgccttatattggcaaatgtaagttgtttctatgaaacaaacatatttagttcactattatatagtgggttatattaaaagaaaagaagaaaaatatctaatttctcttggcagatttgcatatttcatacccaggtatctgggatctagacatctgaatttgatctcaatggtaacattgccttcaattaacagtagcttttgagtaggaaaggactttgatttgtggcacaaaacattattaatatagctattgacagtttcaaagcaggtaaattgtaaatgtttctttaagaaaaagcatgtgaaaggaaaaaggtaaatacagcattgaggcttcatttggccttagtccctgggagttactggcgttggacaggcttcagtcattggactagatgaaaggtgtccatggttagaatttgatctttgcaaactgtatataattgttatttttgtccttaaaaatattgtacatacttggttgttaacatggtcatatttgaaatgtataagtccataaaatagaaaagaacaagtgaattgttgctatttaaaaaaattttacaattcttactaaggagtttttattgtgtaatcactaagtctttgtagataaagcagatggggagttacggagttgttcctttactggctgaaagatatattcgaattgtaaagatgctttttctcatgcattgaaattatacattatttgtagggaattgcatgcttttttttttttttctcccgagacagggtcttgctctggcgcccaggctggagtacagtggcatgatcttggctcacttcagccttgacttgggctcaagtgatcctcctacctgagccttctgagtaactggaactacaggtgtgcactcctcgcctggctaattttttattttttgtacaggcaggatcttgccaccttgcccaggctggtcttgaactcctgagctcatgccatctgcctgccttagtctcccaaaatgctgggattacaggagtgagccaccatgcccggctggcagttgcatggaagagaacacctctttatggcttaccctctagaatttctaatttatgtgttctgttgaaatttttgtttttttacctttattgaaacaacaaaaagtcagtattgaaacatatcttcctgttttctgttgtcaaatgatgataatgtgccatgatgttttatatatatcattcagaaaaagttttattttttaataacattctattaacattattttgcttgccgctggcatgcctgaggaatgtatttggctttgattacacactaagtttttgtaataaatttgactcattaaaaaccttttttttttaaaaaaaaaaaaaaagaaaatctcattagtgaacttatctttgcagctgagtacttaaattctttttaaaaagataccctttggattgatcacattgtttgacccagtatgtcttgtagacacgttagttataatcaccttgtatctctaaatatggtgtgatatgaaccagtccattcacattggaaaaactgatggttttaaataaactaattcactaata

SEQ ID NO: 221710 - DNA, 1338 bp, Artificial Sequence
  derived and/or modified sequence
tcctcttgccacgaggtcagacggcgagttcttagagaaaaaggctgcttagctgctgcttatcatgtaacctcaaaaggaaactgatcgtctttctcatgctgtcacgtacttgggttattatcgctgattacagctggaaacaattgatttgctcttacgtatttgtgtgacttgactcttcaaacacaaaggttaacaggaagatctcgagggccctggctgaacttcaccttttggctttcttggcctgatgctgaactctcgaggttcgggatgttgcctaaaaccgtcgacaaacgctatgtttgagaagggaggctacgctggggcgccggaggagacaggcccttaagaaccttccagagatgccttaactgggctaacagctcgccgcgccggggcaggcagaggggtgcggggcgcgctccttccaggacttgccagtccccaagaaccaggccaaccggttccctccactgactcccgcctccctctgcaggcccagccctgcgccgcgcgccctctccccgggcgcccaggcccggcgggggcctagagggcagggatggcccgggcgagggacggggtcccggaggcgggaggcgggaggcgggaggcgggaagcgggaggctggaagccgcgcgctgtcggggtttcccggtgaagggcaggcaaacaaccggtcggtctgggcggagccgggcgggcggggcgagggcggagggcggagggcgcattgcctcatcctgtacattttactggaaatcggacgcatccggaggaggggctgggaggcggcccgggcaccgccaatggccgggccgggcgccggggaggtcggcgagcgctgcggcccgttaaataccctggcagtcccgcgccgcgcccgtactggcccgcgccgtccgcccgccgacagctccctgagccagcccgggaggcagccgcgcgcagcgagccggtggcgcaggtgtcggggtcctcgagcgcccagcctgggagcatgattgtggacaagctgctggacgacagccgcggcggagaggggctgcgggacgcggcgggcggctgcggcctcatgaccagcccgctcaacctgagctacttctacggcgcgtcgccgcccgccgccgccccgggcgcctgcgacgccagctgctcggtcttgggcccctcggcgcccggctcgcccggctccgactcctccgacttctcctctgcctcgtcggtgtcctcctgcggcgccgtggagtcccggtcgagaggcggcgcccgcgccgagcgccagccagttgagccccatatgggggttggcaggcagcagagaggcccct

SEQ ID NO: 221711 - DNA, 2006 bp, Artificial Sequence
  derived and/or modified sequence
ctcttgccacgaggtcagacggcgagttcttagagaaaaaggctgcttagctgctgcttatcatgtaacctcaaaaggaaactgatcgtctttctcatgctgtcacgtacttgggttattatcgctgattacagctggaaacaattgatttgctcttacgtatttgtgtgacttgactcttcaaacacaaagttgagccccatatgggggttggcaggcagcagagaggcccctttcaaggtgttcgggtaaagaactcagtgaaggaactcctgttgcacatccgaagtcataaacagaaggcttctggccaagctgtggatgattttaagacacaaggtgtgaacatagaacagttcagagaattgaagaacacagtatcatacagtgggaaaaggaaagggcccgattcgttgtctgatggacctgcttgcaaaaggccagctctgttgcattcccaatttttgacaccacctcaaacaccaacgcccggggagagcatggaagatgttcatctcaatgaacccaaacaggagagcagtgctgatctgcttcagaacattatcaacattaagaatgaatgcagccccgtttccctgaacacagttcaagttagctggctgaaccccgtggtggtccctcagagctcccccgcagagcagtgtcaggacttccatggagggcaggtcttttctccacctcagaaatgccaaccattccaagtcaggggctcccaacaaatgatagaccaggcttccctgtaccagtattctccacagaaccagcatgtagagcagcagccacactacacccacaaaccaactctggaatacagtccttttcccatacctccccagtcccccgcttatgaaccaaacctctttgatggtccagaatcacagttttgcccaaaccaaagcttagtttcccttcttggtgatcaaagggaatctgagaatattgctaatcccatgcagacttcctccagtgttcagcagcaaaatgatgctcacttgcacagcttcagcatgatgcccagcagcgcctgtgaggccatggtggggcacgagatggcctctgactcttcaaacacttcactgccattctcaaacatgggaaatccaatgaacaccacacagttagggaaatcactttttcagtggcaggtggagcaggaagaaagcaaattggcaaatatttcccaagaccagtttctttcaaaggatgcagatggtgacacgttccttcatattgctgttgcccaagggagaagggcactttcctatgttcttgcaagaaagatgaatgcacttcacatgctggatattaaagagcacaatggacagagtgcctttcaggtggcagtggctgccaatcagcatctcattgtgcaggatctggtgaacatcggggcacaggtgaacaccacagactgctggggaagaacacctctgcatgtgtgtgctgagaagggccactcccaggtgcttcaggcgattcagaagggagcagtgggaagtaatcagtttgtggatcttgaggcaactaactatgatggcctgactccccttcactgtgcagtcatagcccacaatgctgtggtccatgaactccagagaaatcaacagcctcattcacctgaagttcaggagcttttactgaagaataagagtctggttgataccattaagtgcctaattcaaatgggagcagcggtggaagcgaaggatcgcaaaagtggccgcacagccctgcatttggcagctgaagaagcaaatctggaactcattcgcctctttttggagctgcccagttgcctgtcttttgtgaatgcaaaggcttacaatggcaacactgccctccatgttgctgccagcttgcagtatcggttgacacaattagatgctgtccgcctgttgatgaggaagggagcagacccaagtactcggaacttggagaacgaacagccagtgcatttggttcccgatggccctgtgggagaacag

SEQ ID NO: 221712 - DNA, 564 bp, Artificial Sequence
  derived and/or modified sequence
gatgtaggtgtaattttcttcttgtgaatattttagtggaaagctgtagcagaggataagggtttgggaatagcgttaaaggtcatgacttatttctcagtttttatggaatttttcagtaaaaagacttgaccgtcaaagaaaaggaaactgctgttatcaagttgagccccatatgggggttggcaggcagcagagaggcccctttcaaggtgttcgggtaaagaactcagtgaaggaactcctgttgcacatccgaagtcataaacagaaggcttctggccaagctgtggatgattttaagacacaaggtgtgaacatagaacagttcagagaattgaagaacacagtatcatacagtgggaaaaggaaagggcccgattcgttgtctgatggacctgcttgcaaaaggccagctctgttgcattcccaatttttgacaccacctcaaacaccaacgcccggggagagcatggaagatgttcatctcaatgaacccaaacaggagagcagtgctgatctgcttcagaacattatcaacattaagaatgaatgcagccccgt

SEQ ID NO: 221713 - DNA, 2157 bp, Artificial Sequence
  derived and/or modified sequence
atgattgtcgataagttgctggatgattcaagaggcggtgaaggcctccgggacgcagcaggtggctgtggcctaatgacatctccgctgaacctttcctacttctacggggctagcccccctgccgcagcccctggagcatgtgacgcatcttgcagcgtccttgggccaagcgcccctggctctccaggatctgactcttctgactttagctccgcgagctccgtgtcaagttgcggcgcagtcgagtcgcggagccgagggggagccagggccgaacgccagccagtggagccgcacatgggcgttggccgacagcaaagagggcctttccaaggcgtgcgtgtgaagaactccgtgaaagaactgctgcttcacatccgctcccacaagcagaaggcaagcggccaggctgtcgatgactttaagacgcagggagtgaacatcgagcagttcagagagctcaaaaacacagtgagttactccggaaagcgcaaggggccagattcactctcggacggcccagcctgtaaacggcctgcactccttcattctcagtttctgacccccccacagacccctacccccggtgaatcgatggaggatgttcatctgaatgaacctaagcaggagtctagcgcagacctcctacagaacatcatcaatataaaaaatgaatgctccccggtgtctctgaacactgtccaggtcagctggcttaatccggtggtagtcccccagtcttcgcctgctgagcagtgccaggattttcatgggggtcaggtttttagtccaccccaaaaatgccagcctttccaggttaggggctctcagcagatgatcgaccaggcttcactgtaccagtatagccctcagaatcagcacgttgagcagcagcctcattacacacacaaacccacactcgaatacagcccttttccgatccccccacagtcccccgcttacgagcccaacctgttcgatggccctgagtcccaattctgtcccaaccagtccctggttagtcttctgggcgatcagcgagagtctgagaatattgcaaatcctatgcagacatcatcatctgttcagcagcaaaacgacgcgcatctccatagctttagcatgatgccgtcatcagcctgcgaagctatggtgggtcatgagatggcttctgacagcagcaacacttcccttcccttctccaacatgggaaaccctatgaatacaactcaactgggcaagagcctgttccaatggcaagtggaacaggaggaaagcaaactggccaacataagtcaggatcagttcctgagcaaagatgctgatggcgatactttcttacatatagcagttgcccaaggcaggagagccctctcttacgtgctggcgaggaagatgaatgctctgcatatgctggacatcaaggagcataatggccaaagtgccttccaggtggccgtggccgctaaccaacatctgatcgttcaagaccttgttaacattggcgcacaggtcaacacaaccgactgctggggacgcacccctttgcatgtctgtgcagaaaagggccacagtcaagtgctgcaagccatccaaaaaggggcagttggtagtaatcaatttgtggacctggaagcaaccaactacgatggattaacgcctctccactgtgcagtaattgcccacaatgccgtagtgcacgaattgcagcgaaatcagcagccacattcgcctgaagtgcaggaacttttactgaaaaacaagtcactggtcgacactattaagtgcctcatacagatgggggctgctgtcgaagctaaggatcgcaagagcgggaggactgcactgcatttggccgctgaagaagctaacctggagttgattcggttgttcctggagctcccctcctgcctctcattcgtaaatgccaaagcctacaacggcaacaccgcacttcatgtcgcagcttccctgcagtacaggttgacgcagctcgacgcagtgcggttgctaatgcgcaagggagcggacccctctacgaggaacctggagaacgagcagcctgtacacttggtccctgacggacctgtgggggagcaaatccgccgaatcctgaaaggcaagtctattcagcagagagccccaccctattag

SEQ ID NO: 221714 - DNA, 333 bp, Artificial Sequence
  derived and/or modified sequence
atgattgtggataaactgttagacgactctcggggaggggagggcctccgggacgcggcagggggatgcgggctcatgacctcgcccctcaatctgagttacttctacggagcgagtcccccagccgcagcaccaggggcttgcgacgcttcatgttccgtgctcggtccaagcgcaccgggatcacccggttccgatagttcggattttagttcagctagtagtgtgagcagttgcggagcagtggagtctcgatcccggggaggagctcgggcagagcgccagcccgtggaacctcacatgggagtcggacgacagcaaagggggccttag

SEQ ID NO: 221715 - DNA, 2157 bp, Artificial Sequence
  derived and/or modified sequence
atgatcgtggacaagctgctggacgacagcagaggcggcgagggcctgagagacgccgccggcggctgcggcctgatgaccagccccctgaacctgagctacttctacggcgccagcccccccgccgccgcccccggcgcctgcgacgccagctgcagcgtgctgggccccagcgcccccggcagccccggcagcgacagcagcgacttcagcagcgccagcagcgtgagcagctgcggcgccgtggagagcagaagcagaggcggcgccagagccgagagacagcccgtggagccccacatgggcgtgggcagacagcagagaggccccttccagggcgtgagagtgaagaacagcgtgaaggagctgctgctgcacatcagaagccacaagcagaaggccagcggccaggccgtggacgacttcaagacccagggcgtgaacatcgagcagttcagagagctgaagaacaccgtgagctacagcggcaagagaaagggccccgacagcctgagcgacggccccgcctgcaagagacccgccctgctgcacagccagttcctgacccccccccagacccccacccccggcgagagcatggaggacgtgcacctgaacgagcccaagcaggagagcagcgccgacctgctgcagaacatcatcaacatcaagaacgagtgcagccccgtgagcctgaacaccgtgcaggtgagctggctgaaccccgtggtggtgccccagagcagccccgccgagcagtgccaggacttccacggcggccaggtgttcagccccccccagaagtgccagcccttccaggtgagaggcagccagcagatgatcgaccaggccagcctgtaccagtacagcccccagaaccagcacgtggagcagcagccccactacacccacaagcccaccctggagtacagccccttccccatccccccccagagccccgcctacgagcccaacctgttcgacggccccgagagccagttctgccccaaccagagcctggtgagcctgctgggcgaccagagagagagcgagaacatcgccaaccccatgcagaccagcagcagcgtgcagcagcagaacgacgcccacctgcacagcttcagcatgatgcccagcagcgcctgcgaggccatggtgggccacgagatggccagcgacagcagcaacaccagcctgcccttcagcaacatgggcaaccccatgaacaccacccagctgggcaagagcctgttccagtggcaggtggagcaggaggagagcaagctggccaacatcagccaggaccagttcctgagcaaggacgccgacggcgacaccttcctgcacatcgccgtggcccagggcagaagagccctgagctacgtgctggccagaaagatgaacgccctgcacatgctggacatcaaggagcacaacggccagagcgccttccaggtggccgtggccgccaaccagcacctgatcgtgcaggacctggtgaacatcggcgcccaggtgaacaccaccgactgctggggcagaacccccctgcacgtgtgcgccgagaagggccacagccaggtgctgcaggccatccagaagggcgccgtgggcagcaaccagttcgtggacctggaggccaccaactacgacggcctgacccccctgcactgcgccgtgatcgcccacaacgccgtggtgcacgagctgcagagaaaccagcagccccacagccccgaggtgcaggagctgctgctgaagaacaagagcctggtggacaccatcaagtgcctgatccagatgggcgccgccgtggaggccaaggacagaaagagcggcagaaccgccctgcacctggccgccgaggaggccaacctggagctgatcagactgttcctggagctgcccagctgcctgagcttcgtgaacgccaaggcctacaacggcaacaccgccctgcacgtggccgccagcctgcagtacagactgacccagctggacgccgtgagactgctgatgagaaagggcgccgaccccagcaccagaaacctggagaacgagcagcccgtgcacctggtgcccgacggccccgtgggcgagcagatcagaagaatcctgaagggcaagagcatccagcagagagcccccccctactag

SEQ ID NO: 221716 - DNA, 333 bp, Artificial Sequence
  derived and/or modified sequence
atgatcgtggacaagctgctggacgacagcagaggcggcgagggcctgagagacgccgccggcggctgcggcctgatgaccagccccctgaacctgagctacttctacggcgccagcccccccgccgccgcccccggcgcctgcgacgccagctgcagcgtgctgggccccagcgcccccggcagccccggcagcgacagcagcgacttcagcagcgccagcagcgtgagcagctgcggcgccgtggagagcagaagcagaggcggcgccagagccgagagacagcccgtggagccccacatgggcgtgggcagacagcagagaggcccctag

SEQ ID NO: 221717 - protein, 267 aa, Artificial Sequence [sequence omitted]

SEQ ID NO: 221718 - DNA, 804 bp, Artificial Sequence
  derived and/or modified sequence
atggccgccccggtggtgacggcccccggaagggccttactgagagcaggcgccggcagactgctaagaggcggagttcaggagcttcttcgccctcgacatgagggaaatgcaccagatctggcttgcaatttttctctgtcgcagaacagagggaccgtgatagtggaacggtggtggaaggttcccttggcaggtgaagggcgcaaacctcggctgcaccggaggcacagggtgtacaagctcgtggaagatactaaacacaggcccaaagagaacctcgagctgatactaacacagtctgtggagaatgttggtgtgcgtggggatcttgtgtcagtgaagaagtccttgggaagaaatcgtcttctgccacaggggttagccgtgtatgcctctcctgagaacaaaaaactgttcgaggaagagaagctacttaggcaagagggaaagctggagaagatccaaaccaaggccggcgaagcaaccgtcaaatttctcaagagctgtcgccttgaggttgggatgaaaaacaatgtcaagtgggagctcaatccagagattgtggccaggcacttcttcaaaaacctcggcgtagtggtagcccctcacactctgaaactgccagaagagcccattacccggtggggcgagtattggtgcgaagtgactgttaacggactggacacagtgcgtgttcctatgtctgtcgtgaactttgagaaaccaaaaactaaaagatataagtattggctggcgcaacaggccgctaaagccatggcccctacatctccacagatttag

SEQ ID NO: 221719 - DNA, 804 bp, Artificial Sequence
  derived and/or modified sequence
atggccgcccctgtggtgacagcccctggccgggccctgctgcgggccggggccggccgcctgctgcggggcggcgtgcaggagctgctgcggcccaggcatgagggcaatgccccagacctggcctgcaacttcagcctgagccagaacagaggaacagtgattgtggagcgctggtggaaggtgcccctggccggggagggcaggaagccccggctgcacagaagacaccgggtgtacaagctggtggaggacaccaagcaccggcccaaggagaacctggagctgatcctgacccagagcgtggagaatgtgggcgtgcggggggacctggtgtctgtgaagaagagcctgggcaggaaccggctgctgccccagggcctggccgtgtatgccagccctgagaacaagaagctgtttgaggaggagaagctgctgcggcaggagggcaagctggagaagatccagaccaaggccggggaggccaccgtgaagttcctgaagagctgccgcctggaggtgggcatgaagaacaacgtgaagtgggagctgaaccctgagatcgtggcccggcacttcttcaagaacctgggcgtggtggtggccccccacaccctgaagctgcctgaggagcccatcacccgctggggcgagtactggtgtgaggtgacagtgaatggcctggacacagtgcgggtgcccatgtctgtggtgaactttgagaagcccaagaccaagcgctacaagtactggctggcccagcaggccgccaaggccatggcccccaccagcccccagatctag

SEQ ID NO: 221720 - DNA, 1296 bp, Artificial Sequence
  derived and/or modified sequence
ggcgcgccgcaggcagcactggcgggggcctttcctgccgccgacgccggggtcctccctcaggtctcattctgtgcctgtgaacatggcggcgcccgttgtcacggccccgggcagagctctgctgcgggcgggcgctggacggctgcttcggggaggcgtccaggagctactgcggccgcgacatgaagggaacgcccctgacctggcctgcaacttcagcctttctcaaaatcggggcacggtcatcgtggagcgctggtggaaggtaccgctggccggggagggccggaagccgcgcctgcaccggcgacatcgcgtctataagctggtggaggacacgaagcatcggcccaaagaaaacctggagctcatcctgacgcagtcggtggagaatgttggagtccggggtgacctggtctcagtgaagaaatctttaggccggaatcgactccttcctcagggactggctgtatatgcatcccctgaaaacaagaagctgtttgaagaggagaaattgctgagacaagaaggaaaattagagaagatccagaccaaggcaggtgaggcgacagtgaaatttctaaaaagctgtcgcctggaggtagggatgaagaacaatgtcaaatgggagctgaaccctgaaatagttgcccgccacttctttaagaatcttggtgttgtggttgccccacatacattaaagttaccagaagagcctatcacacggtggggcgagtattggtgtgaggtgacggtaaatgggcttgatactgtgagagtgcctatgtctgtcgtgaactttgagaagcccaagaccaaaagatataagtactggttagcccagcaagctgccaaggctatggcccccaccagcccccagatctaaatctactctccctccaaggcagcaaagcagaatcgggagcagtggagcagaaatgtgcaagcaccctgatctcactcccagctctgaccaaatacagaattttagagaacatctgaagacatcagactgcactgcgtatacatgttgaattcttcatttttgccatctttaactgtcatcactggggcagggaagtcctgttccagaagtaccaggctgtagatttgataagctagatgcagtagaccgaaaccatccaaaacctgtttagcttcttcctccattggagtttattgggacaaacaggagagccagccattgtctccagtacttgcctcattctcatcatccaaactgaacatttgtatcccaagcagaaataaagagaatatgttctttttaagtaa

SEQ ID NO: 221721 - DNA, 804 bp, Artificial Sequence
  derived and/or modified sequence
atggccgcccccgtggtgaccgcccccggccgggccctgctgcgggctggggctggcaggctacttaggggaggcgtgcaggagctgctgcggcccagacacgagggtaatgcccctgacttggcgtgtaactttagcctgtctcaaaataggggcaccgttattgtggaaagatggtggaaggtgccgcttgctggagaaggtaggaagccccggttacataggaggcaccgcgtatataaacttgtggaggacactaagcaccgacctaaggaaaaccttgaactgattttgacacagtcagtggaaaacgttggggtgcgaggagacctcgtttctgtgaaaaagagcctggggaggaacagactgttgccgcaggggctcgctgtatacgcatccccagagaataaaaaactgttcgaagaagaaaaactactgaggcaagagggcaaactggagaaaatccagacgaaggcgggagaagccaccgtgaagtttctgaagtcttgccgtctcgaggttgggatgaagaacaacgtaaagtgggagctcaaccccgaaatagtcgctcgacacttttttaagaatttgggagttgtggtcgctccacacacgttaaaattgccggaagaaccaatcacccgatggggggagtattggtgcgaggtgaccgtgaacggactggacaccgttcgggtgcccatgtctgtggtgaactttgaaaagcctaagaccaagcgatacaagtactggctagctcagcaggctgcaaaagcaatggcccccaccagtcctcaaatctag

SEQ ID NO: 221722 - DNA, 804 bp, Artificial Sequence
  derived and/or modified sequence
atggcagcccctgtggtcacagcacctggaagggccctactgcgtgctggggcaggcagacttctccggggaggagtccaggagttactcagaccacgccatgagggaaatgcccctgacctggcgtgtaatttctccttgagccaaaatcgaggcaccgtgattgtcgaacggtggtggaaggtgccgctggccggagagggcagaaaaccccgactacaccgaaggcaccgtgtgtacaagctggtcgaggatacaaagcatagaccaaaggaaaacctcgaactgatcctgacacagtctgtggagaacgttggtgtgagaggtgacctggtctcggttaaaaagagcctgggtcgcaaccgcctgttgccacagggcctagctgtttacgcatccccagagaacaaaaagttgttcgaagaggagaaactgcttagacaagaaggcaaactggagaagatacagaccaaggcaggagaagccacagtcaaatttttgaaatcttgcagattagaggtgggaatgaaaaataacgtcaagtgggagctcaatccagagatcgttgccaggcacttctttaagaacttgggtgtcgtggtagcgcctcacacattgaagttgccggaagagcctatcacacggtggggagaatactggtgtgaggtcacagtcaatgggctggataccgtccgggtacctatgtccgtcgtaaatttcgagaaaccaaagacaaagaggtacaagtactggttggcccagcaggcggcaaaggcgatggccccaacatcaccccagatatag

SEQ ID NO: 221723 - DNA, 804 bp, Artificial Sequence
  derived and/or modified sequence
atggccgcccccgtggtgaccgcccccggcagagccctgctgagagccggcgccggcagactgctgagaggcggcgtgcaggagctgctgagacccagacacgagggcaacgcccccgacctggcctgcaacttcagcctgagccagaacagaggcaccgtgatcgtggagagatggtggaaggtgcccctggccggcgagggcagaaagcccagactgcacagaagacacagagtgtacaagctggtggaggacaccaagcacagacccaaggagaacctggagctgatcctgacccagagcgtggagaacgtgggcgtgagaggcgacctggtgagcgtgaagaagagcctgggcagaaacagactgctgccccagggcctggccgtgtacgccagccccgagaacaagaagctgttcgaggaggagaagctgctgagacaggagggcaagctggagaagatccagaccaaggccggcgaggccaccgtgaagttcctgaagagctgcagactggaggtgggcatgaagaacaacgtgaagtgggagctgaaccccgagatcgtggccagacacttcttcaagaacctgggcgtggtggtggccccccacaccctgaagctgcccgaggagcccatcaccagatggggcgagtactggtgcgaggtgaccgtgaacggcctggacaccgtgagagtgcccatgagcgtggtgaacttcgagaagcccaagaccaagagatacaagtactggctggcccagcaggccgccaaggccatggcccccaccagcccccagatctag

SEQ ID NO: 221724 - protein, 443 aa, Artificial Sequence
  derived and/or modified sequence
MQPSEMVMNPKQVFLSVLIFGVAGLLLFMYLQVWIEEQHTGRVEKRREQKVTSGWGPVKYLRPVPRIMSTEKIQEHITNQNPKFHMPEDVREKKENLLLNSERSTRLLTKTSHSQGGDQALSKSTGSPTEKLIEKRQGAKTVFNKFSNMNWPVDIHPLNKSLVKDNKWKKTEETQEKRRSFLQEFCKKYGGVSHHQSHLFHTVSRIYVEDKHKILYCEVPKAGCSNWKRILMVLNGLASSAYNISHNAVHYGKHLKKLDSFDLKGIYTRLNTYTKAVFVRDPMERLVSAFRDKFEHPNSYYHPVFGKAIIKKYRPNACEEALINGSGVKFKEFIHYLLDSHRPVGMDIHWEKVSKLCYPCLINYDFVGKFETLEEDANYFLQMIGAPKELKFPNFKDRHSSDERTNAQVVRQYLKDLTRTERQLIYDFYYLDYLMFNYTTPFL

SEQ ID NO: 221725 - DNA, 1332 bp, Artificial Sequence
  derived and/or modified sequence
atgcagcccagcgagatggtgatgaatcccaagcaagtgtttctgtctgtactcattttcggtgtagccggattgctgctctttatgtacctgcaggtttggatcgaagaacagcacacagggagagttgagaagagaagggaacagaaggtcaccagcggctggggacctgtcaagtacttgcgacctgtgccccgaatcatgtcaactgagaagatccaagagcacattaccaaccaaaaccccaagttccatatgccagaggatgtgagagaaaaaaaagaaaatctgctgttgaattccgagcgctctacgcggttactaaccaaaacatcccatagtcagggaggggatcaggcgctgtctaagtctaccggcagtcccaccgaaaagctgattgaaaaaagacaaggagccaagactgtatttaacaaattttctaacatgaactggccagtggacatccatcccctgaataagtctctggtcaaagacaacaagtggaaaaagaccgaggaaacacaagaaaagcgacggtccttcctgcaagagttctgtaagaaatatggcggagtaagtcatcaccagtcacacctgtttcacaccgtatccaggatttacgttgaggacaagcacaagattctgtactgtgaggtgcccaaggcaggttgctcaaattggaagaggatcttgatggtgctgaacggtctggcaagctccgcgtataacatcagtcacaacgcagtccactatggtaagcacctgaagaagctggatagctttgatctgaaagggatatacaccagacttaacacatatactaaagcagtttttgttagggacccgatggagcgactcgtgtccgccttccgggacaaattcgagcatccgaactcatattaccacccagtctttggtaaagccattatcaagaagtaccgccctaacgcctgtgaagaggctctgattaacggcagcggagtgaaattcaaggaattcatccattacctgctggatagccaccggccagtcggcatggatatccactgggaaaaggttagtaagctttgttatccctgccttataaattacgactttgtcggcaagtttgagaccttggaggaagatgcaaactatttccttcagatgattggcgctcccaaggaattgaagttccccaactttaaggacaggcacagctctgacgaaagaaccaatgctcaagttgtccgccagtacctgaaggacctgacaaggacggagcgtcagctgatttacgatttttactatttggactacctgatgttcaattacactactccctttctgtag

SEQ ID NO: 221726 - DNA, 1332 bp, Artificial Sequence
  derived and/or modified sequence
atgcagcccagcgagatggtgatgaatccgaagcaagtcttcctgtccgtccttatttttggagtggctgggctcttgctgttcatgtacctacaagtatggatcgaagaacagcacactggtcgggtcgaaaagcgaagggaacagaaggtgacctctggttggggaccagttaaatatctgcggcctgtgcctcgcatcatgagcactgaaaagatacaggaacatataacaaaccagaaccctaagttccatatgcctgaggacgtgagagaaaaaaaagagaacctcttgctcaactctgaacgatccactcgtcttctgaccaaaaccagtcactcccagggcggggatcaagctttgagtaagtcgactggatcccctaccgaaaagctgatcgagaaacgacagggggccaagacagtgtttaataagttttccaatatgaactggccagtcgacatccatcctctgaataagagtctggtgaaagataacaaatggaagaagactgaggagacccaagaaaagagaaggtccttcctacaggaattttgcaagaaatacggaggcgtttctcatcatcaatcacatctgttccacactgtgtcacgtatctatgtcgaggataaacacaagattttgtattgtgaggtcccaaaggccggctgtagcaactggaaacgtatcctcatggtcctgaatggactggcatcctccgcgtataatatatctcataatgctgttcactacggcaaacaccttaagaaactggactcgtttgacttaaaaggcatctataccagactcaacacctatacgaaagctgtgttcgtcagggatcccatggaacgcctagtgagtgccttccgtgataaatttgaacaccccaactcatactatcatcccgtgttcggcaaggctataattaagaagtacagacccaacgcttgcgaagaagccctcatcaacggctctggagtgaagttcaaggaattcatacactacctattagattctcatcgtccggtcggcatggatatccactgggagaaggtaagtaaactgtgttacccctgtttgatcaattatgacttcgtcggcaaattcgagaccctggaggaagacgctaactattttttacagatgataggagcccccaaggagctgaaatttcctaactttaaagatcgacattcctcagacgagcgcaccaatgctcaggtagtgcgacaataccttaaggacctgacacgaactgaacgccagctgatttacgatttctattacctcgattacctcatgttcaattacacaacgccttttttgtag

SEQ ID NO: 221727 - DNA, 1332 bp, Artificial Sequence
  derived and/or modified sequence
atgcagccatctgaaatggttatgaacccaaagcaggtctttctcagcgttcttatcttcggggtcgccggcctactgcttttcatgtacttacaggtctggatcgaagagcaacacacaggacgcgtggagaagagacgcgaacagaaagttacctctggatggggtccggttaagtacttgcgtcccgtccctagaataatgagtacagaaaagatccaggaacacatcactaaccagaatcctaaattccatatgcctgaagacgtccgggaaaaaaaagaaaatctgctgttgaattcagagagatccaccaggctactcacaaaaacttctcactcacagggtggcgaccaggcattgagcaaaagcacaggatcacctaccgagaaactgatcgaaaaaagacagggcgccaagactgtgtttaataagttttcaaatatgaattggccagttgacatacatcctctcaataagtccttagtcaaagacaataaatggaaaaaaaccgaggagacccaggaaaaacgaagatcatttcttcaggaattttgtaagaagtatgggggagtaagccatcatcagagtcatttgttccacaccgtttcacgcatatatgttgaagacaagcacaaaattttatactgtgaggtccctaaggcaggctgcagtaattggaagagaattcttatggtactcaatggtctggcatcttccgcgtacaacattagccataacgccgttcattacggaaaacacctgaagaaactcgatagctttgacttaaaaggcatttatacccgcttaaatacgtacacaaaagccgtcttcgtacgcgatcccatggaaagattagtttcagcattcagagacaagttcgaacatcctaattcatactatcatcccgtgttcggcaaggctataattaagaagtacagacccaacgcttgcgaagaagccctcatcaacggctctggagtgaagttcaaggaattcatacactacctattagattctcatcgtccggtcggcatggatatccactgggagaaggtaagtaaactgtgttacccctgtttgatcaattatgacttcgtcggcaaattcgagaccctggaggaagacgctaactattttttacagatgataggagcccccaaggagctgaaatttcctaactttaaagatcgacattcctctgatgagcgtaccaatgcccaagttgtacgacaatacctcaaggatctgacccgcaccgaacggcagctgatatatgacttttactacctcgactatttaatgtttaattatacaaccccattcctatag

SEQ ID NO: 221728 - DNA, 2244 bp, Artificial Sequence
  derived and/or modified sequence
gcgggagggtcagggccagggtgagcgcccgactccgagctgtccccgctcccggcgcggcgctccgctctcagccacctcacggctgccaggagtgcgcgggagtttgccccggagcgcggggaagtttcctccgaagctgcgctcctggaacagcagcacctgcaagcgcccggcagcggcccgcgaggttactttatggaattgggctcttagagaacaagaaaagactgaagttttacgggaaaacaaatcatgtggtcttcagattctgaaataaggagaaatgcagccatctgaaatggtcatgaaccccaaacaagtcttcctctctgtgctgatatttggagtagctgggctactcctcttcatgtatttgcaagtctggattgaagaacaacatacagggagagtggagaagagaagagaacaaaaagtaacttcaggatggggaccagtgaagtacttgcggcctgtacccagaatcatgagtacagaaaaaatccaggaacatatcaccaaccagaaccccaagtttcacatgcctgaggatgtacgagaaaaaaaggaaaatcttctactcaattctgagagatctactaggctcttaacaaagaccagtcattcacaaggaggggatcaagctttaagtaagtccacagggtcaccaacagagaagttgattgaaaaacgtcaaggagctaagactgtttttaacaagttcagcaacatgaattggccagtggacattcaccctttaaacaaaagtttagtcaaagataataaatggaagaaaactgaggagacccaagagaaacgaaggtctttccttcaggagttttgcaagaaatacggtggggtgagtcatcatcagtcacatctttttcatacagtatccagaatctatgtagaagataaacacaaaatcttatattgtgaggtacctaaggctggctgttccaattggaaaagaattctgatggtactaaatggattggcttcctctgcatacaacatctcccacaatgctgtccactacgggaagcatttgaagaagctagatagctttgacctaaaagggatatatacccgcttaaatacttacaccaaagctgtgtttgttcgtgatcccatggaaagattagtatcagcctttagggacaaatttgaacaccccaatagttattaccatccagtattcggaaaggcaattatcaagaaatatcgaccaaatgcctgtgaagaagcattaattaatggatctggagtcaagttcaaagagtttatccactacttgctggattcccaccgtccagtaggaatggacattcactgggaaaaggtcagcaaactctgctatccgtgtttgatcaactatgattttgtagggaaatttgagactttggaagaagatgccaattactttttacagatgatcggtgctccaaaggagctgaaatttcccaactttaaggataggcactcttccgatgaaagaaccaatgctcaagtcgtgagacagtatttaaaggatctgactagaactgagagacaattaatctatgacttttattacttggactatttaatgtttaattatacaactccatttttgtagtttgcattcattttctaaaaccctgtatatacttaatgatgataagttcaaatcagctgtaatttttctataattctctgtatgacagaaatttaaccaagtgcagttgtcttgatttaatgtagatttttaccaaatagtatgacaccaattggcacaaagttataggaaaatcacctacaggagatgtaaacaacttgagttgctctaaaatgtttggaaaagagctgcttttgcattatgaattatattgttgaagcaataacctagccagctgttgcattagctaaagcagcctcttgcaatggtaggaaaaaaggatctcaaatagcatgagtgtatgtctatatcctgaaatttattgtctaaaatgcatgaatatatttttagcagtctgtggcatattaatcaaactgttgaattgttttcttacaccctggaaatctttctatcaactataatgataaatccattttgaagtgatattttggacttaggcattttactttagattggaaggcattatgtgatttacaatatgagaatatagcagaaaaaccagatgaggctgtggctttttatattcaacagccaataaaaaatgcacaacatgctaagatcaaagc

SEQ ID NO: 221729 - DNA, 1332 bp, Artificial Sequence
  derived and/or modified sequence
atgcagcccagcgagatggtgatgaaccccaagcaggtgttcctgagcgtgctgatcttcggcgtggccggcctgctgctgttcatgtacctgcaggtgtggatcgaggagcagcacaccggcagagtggagaagagaagagagcagaaggtgaccagcggctggggccccgtgaagtacctgagacccgtgcccagaatcatgagcaccgagaagatccaggagcacatcaccaaccagaaccccaagttccacatgcccgaggacgtgagagagaagaaggagaacctgctgctgaacagcgagagaagcaccagactgctgaccaagaccagccacagccagggcggcgaccaggccctgagcaagagcaccggcagccccaccgagaagctgatcgagaagagacagggcgccaagaccgtgttcaacaagttcagcaacatgaactggcccgtggacatccaccccctgaacaagagcctggtgaaggacaacaagtggaagaagaccgaggagacccaggagaagagaagaagcttcctgcaggagttctgcaagaagtacggcggcgtgagccaccaccagagccacctgttccacaccgtgagcagaatctacgtggaggacaagcacaagatcctgtactgcgaggtgcccaaggccggctgcagcaactggaagagaatcctgatggtgctgaacggcctggccagcagcgcctacaacatcagccacaacgccgtgcactacggcaagcacctgaagaagctggacagcttcgacctgaagggcatctacaccagactgaacacctacaccaaggccgtgttcgtgagagaccccatggagagactggtgagcgccttcagagacaagttcgagcaccccaacagctactaccaccccgtgttcggcaaggccatcatcaagaagtacagacccaacgcctgcgaggaggccctgatcaacggcagcggcgtgaagttcaaggagttcatccactacctgctggacagccacagacccgtgggcatggacatccactgggagaaggtgagcaagctgtgctacccctgcctgatcaactacgacttcgtgggcaagttcgagaccctggaggaggacgccaactacttcctgcagatgatcggcgcccccaaggagctgaagttccccaacttcaaggacagacacagcagcgacgagagaaccaacgcccaggtggtgagacagtacctgaaggacctgaccagaaccgagagacagctgatctacgacttctactacctggactacctgatgttcaactacaccacccccttcctgtag

SEQ ID NO: 221730 - DNA, 1332 bp, Artificial Sequence
  derived and/or modified sequence
atgcaaccttcagaaatggtgatgaatccaaaacaggtctttctctcagtgctcatttttggcgtcgctgggctgcttctttttatgtatctccaggtttggattgaggaacagcataccggacgagttgaaaaaaggagggaacaaaaagtgacgagcggctggggacctgttaagtatctgcggcctgtgcccaggattatgtcaactgaaaaaattcaggaacatatcactaaccagaacccaaagtttcacatgccagaagacgttcgtgagaagaaagaaaatttgttactgaacagcgaaaggagtacccggctgctgacgaagacctcacacagtcaaggtggagaccaagctctgagtaaatcgacgggtagcccgaccgagaaactgatcgagaaacgccagggcgccaagacagtattcaacaagttcagtaatatgaactggcctgtggacatccacccactcaacaagagcctagttaaggacaataagtggaaaaaaaccgaggagacgcaggagaagaggaggagcttcttgcaggagttctgcaagaagtacggtggggtttcccaccaccaatcacacctattccacacagtatcaaggatttacgtagaagacaagcacaagatactctactgtgaggtacccaaggccggatgttcaaattggaaaaggatcttgatggttctcaatggattggccagcagcgcatataatatcagccataacgccgtgcactacgggaagcacctgaaaaagctggattcatttgatctgaaaggcatatacactagacttaatacctacacaaaagcagtattcgttagggaccctatggagcgccttgtcagcgcatttagggataagtttgagcacccaaattcctattaccaccccgtgtttgggaaggcgatcatcaagaagtacaggccaaacgcgtgcgaggaggccctgataaatggctcaggtgtcaagtttaaagaatttatccactacctcctagattctcaccggccggtaggaatggatattcattgggaaaaggtatcaaagctgtgctacccgtgcctgattaattatgacttcgtgggaaagttcgagacgttggaggaggatgcaaattactttttacagatgataggcgctccaaaggagcttaagtttcctaactttaaagacagacacagttcagacgagcgaaccaacgctcaagtggtacggcaatatctcaaagacctaacccgcacggagcgccagctgatctacgatttctactatctggactacctgatgtttaattacacaacccccttcttatag

SEQ ID NO: 221731 - DNA, 1332 bp, Artificial Sequence
  derived and/or modified sequence
atgcagcccagcgagatggtgatgaaccccaagcaggtgttcctgtctgtgctgatcttcggcgtggccggcctgctgctcttcatgtacctgcaggtgtggattgaggagcagcacacaggccgggtggagaagaggcgggagcagaaggtgaccagcggctggggccctgtgaagtacctgcggcctgtgccccgcatcatgagcacagagaagatccaggagcacatcaccaaccagaaccccaagttccacatgccagaagatgtgcgggagaagaaggagaacctgctgctgaacagcgagaggagcacccggctgctgaccaagaccagccacagccagggcggggaccaggccctgagcaagagcacaggcagccccacagagaagctgattgagaagaggcagggcgccaagacagtgttcaacaagttcagcaacatgaactggcctgtggacatccaccccctgaacaagagcctggtgaaggacaacaagtggaagaagacagaggagacccaggagaagaggaggagcttcctgcaggagttctgcaagaagtatggaggagtgagccaccaccagagccacctgttccacacagtgagccgcatctacgtggaggacaagcacaagatcctgtactgtgaggtgcccaaggccggctgcagcaactggaagaggatcctgatggtgctgaatggcctggccagcagcgcctacaacatcagccacaatgctgtgcactacggcaagcacctgaagaagctggacagctttgacctgaagggcatctacacccggctgaacacctacaccaaggctgtgtttgtgcgggaccccatggagcggctggtgtctgccttccgggacaagtttgagcaccccaacagctactaccaccctgtgtttgggaaggccatcatcaagaagtaccggcccaatgcctgtgaggaggccctgatcaatggcagcggcgtgaagttcaaggagttcatccactacctgctggacagccacaggcctgtgggcatggacatccactgggagaaggtgtccaagctgtgctacccctgcctgatcaactatgactttgtgggcaagtttgagaccctggaggaggatgccaactacttcctgcagatgattggagcccccaaggagctgaagttccccaacttcaaggacagacacagcagtgatgagaggaccaatgcccaggtggtgcggcagtacctgaaggacctgaccaggacagagcggcagctgatctatgacttctactacctggactacctgatgttcaactacaccacccccttcctgtag

SEQ ID NO: 221732 - DNA, 1332 bp, Artificial Sequence
  derived and/or modified sequence
atgcagcccagcgagatggtgatgaaccccaagcaggtgttcctgagcgtgctaatatttggggttgcaggtctcctactgttcatgtacctccaggtgtggatagaagaacagcacactggtagagtggaaaaacgccgggagcaaaaggtcacctcaggctggggcccagttaaatacctgagacccgtacctcgcattatgagcacagagaagatacaggagcacattactaaccagaacccaaagttccacatgcctgaggatgtgcgggagaagaaagaaaatctcttgctcaacagcgagcgctcgactcgcctgttgacgaagacatctcactcccagggcggggaccaggcacttagcaaatccacagggagcccaaccgagaagttgatagagaagcggcaaggggccaaaacagtgttcaacaaattctccaacatgaattggccagtcgatatccacccgctcaataagagccttgttaaggacaataagtggaagaagaccgaagaaacccaggagaagcggcgctcgttcttgcaggagttctgtaagaaatacggtggagtgtcacatcatcagtctcatttgtttcacactgtctcaaggatttatgttgaggataaacacaaaatcctatattgtgaagtgcccaaggcaggctgcagtaattggaagaggatcttgatggtgttaaacggattggcaagctctgcgtacaacatctcacacaacgcggtgcattacggcaagcacctgaaaaagctcgatagcttcgatctaaaaggcatttacaccaggctaaacacctataccaaggctgtgttcgtgagggacccaatggagcgactggtctcagcattccgtgacaaatttgagcaccccaattcatattaccaccccgtgttcgggaaggcaataattaaaaaataccgccccaacgcatgcgaagaggctctgattaacggctccggggttaagtttaaggagttcatccattatctgttagattctcaccggcctgtgggcatggacatccactgggaaaaagtgtctaaactctgttatccatgcctcattaactacgactttgtcggtaaatttgagaccctggaagaggatgccaattactttctgcagatgatcggggcccctaaagaactgaagttccccaattttaaagatcgccacagctcggacgaaaggaccaacgcgcaggtggtgcggcaatatctgaaggatctgactcgcactgaacgccagctcatctatgatttctattatctagattatcttatgttcaactatacaaccccatttctgtag

SEQ ID NO: 221733 - RNA, 1332 nt, Artificial Sequence
  derived and/or modified sequence
augcagcccagcgagauggugaugaauccgaagcaagucuuccuguccguccuuauuuuuggaguggcugggcucuugcuguucauguaccuacaaguauggaucgaagaacagcacacuggucgggucgaaaagcgaagggaacagaaggugaccucugguuggggaccaguuaaauaucugcggccugugccucgcaucaugagcacugaaaagauacaggaacauauaacaaaccagaacccuaaguuccauaugccugaggacgugagagaaaaaaaagagaaccucuugcucaacucugaacgauccacucgucuucugaccaaaaccagucacucccagggcggggaucaagcuuugaguaagucgacuggauccccuaccgaaaagcugaucgagaaacgacagggggccaagacaguguuuaauaaguuuuccaauaugaacuggccagucgacauccauccucugaauaagagucuggugaaagauaacaaauggaagaagacugaggagacccaagaaaagagaagguccuuccuacaggaauuuugcaagaaauacggaggcguuucucaucaucaaucacaucuguuccacacugugucacguaucuaugucgaggauaaacacaagauuuuguauugugaggucccaaaggccggcuguagcaacuggaaacguauccucaugguccugaauggacuggcauccuccgcguauaauauaucucauaaugcuguucacuacggcaaacaccuuaagaaacuggacucguuugacuuaaaaggcaucuauaccagacucaacaccuauacgaaagcuguguucgucagggaucccauggaacgccuagugagugccuuccgugauaaauuugaacaccccaacucauacuaucaucccguguucggcaaggcuauaauuaagaaguacagacccaacgcuugcgaagaagcccucaucaacggcucuggagugaaguucaaggaauucauacacuaccuauuagauucucaucguccggucggcauggauauccacugggagaagguaaguaaacuguguuaccccuguuugaucaauuaugacuucgucggcaaauucgagacccuggaggaagacgcuaacuauuuuuuacagaugauaggagcccccaaggagcugaaauuuccuaacuuuaaagaucgacauuccucagacgagcgcaccaaugcucagguagugcgacaauaccuuaaggaccugacacgaacugaacgccagcugauuuacgauuucuauuaccucgauuaccucauguucaauuacacaacgccuuuuuuguag

SEQ ID NO: 221734 - RNA, 1332 nt, Artificial Sequence
  derived and/or modified sequence
augcagccaucugaaaugguuaugaacccaaagcaggucuuucucagcguucuuaucuucggggucgccggccuacugcuuuucauguacuuacaggucuggaucgaagagcaacacacaggacgcguggagaagagacgcgaacagaaaguuaccucuggaugggguccgguuaaguacuugcgucccgucccuagaauaaugaguacagaaaagauccaggaacacaucacuaaccagaauccuaaauuccauaugccugaagacguccgggaaaaaaaagaaaaucugcuguugaauucagagagauccaccaggcuacucacaaaaacuucucacucacaggguggcgaccaggcauugagcaaaagcacaggaucaccuaccgagaaacugaucgaaaaaagacagggcgccaagacuguguuuaauaaguuuucaaauaugaauuggccaguugacauacauccucucaauaaguccuuagucaaagacaauaaauggaaaaaaaccgaggagacccaggaaaaacgaagaucauuucuucaggaauuuuguaagaaguaugggggaguaagccaucaucagagucauuuguuccacaccguuucacgcauauauguugaagacaagcacaaaauuuuauacugugaggucccuaaggcaggcugcaguaauuggaagagaauucuuaugguacucaauggucuggcaucuuccgcguacaacauuagccauaacgccguucauuacggaaaacaccugaagaaacucgauagcuuugacuuaaaaggcauuuauacccgcuuaaauacguacacaaaagccgucuucguacgcgaucccauggaaagauuaguuucagcauucagagacaaguucgaacauccuaauucauacuaucaucccguguucggcaaggcuauaauuaagaaguacagacccaacgcuugcgaagaagcccucaucaacggcucuggagugaaguucaaggaauucauacacuaccuauuagauucucaucguccggucggcauggauauccacugggagaagguaaguaaacuguguuaccccuguuugaucaauuaugacuucgucggcaaauucgagacccuggaggaagacgcuaacuauuuuuuacagaugauaggagcccccaaggagcugaaauuuccuaacuuuaaagaucgacauuccucugaugagcguaccaaugcccaaguuguacgacaauaccucaaggaucugacccgcaccgaacggcagcugauauaugacuuuuacuaccucgacuauuuaauguuuaauuauacaaccccauuccuauag

SEQ ID NO: 221735 - protein, 77 aa, Artificial Sequence
  derived and/or modified sequence
MKKLKILYMSNNLVKDWAEFVKLAELPCLEDLVFVGNPLEEKHSAENNWIEEATKRVPKLKKLDGTPVIKGDEEEDN

SEQ ID NO: 221736 - protein, 151 aa, Artificial Sequence
  derived and/or modified sequence
MDASLSMLANCEKLSLSTNCIEKIANLNGLKNLRILSLGRNNIKNLNGLEAVGDTLEELWISYNFIEKLKGIHIMKKLKILYMSNNLVKDWAEFVKLAELPCLEDLVFVGNPLEEKHSAENNWIEEATKRVPKLKKLDGTPVIKGDEEEDN

SEQ ID NO: 221737 - protein, 190 aa, Artificial Sequence
  derived and/or modified sequence
MAKATTIKEALARWEEKTGQRPSEAKEIKLYAQIPPIEKMDASLSMLANCEKLSLSTNCIEKIANLNGLKNLRILSLGRNNIKNLNGLEAVGDTLEELWISYNFIEKLKGIHIMKKLKILYMSNNLVKDWAEFVKLAELPCLEDLVFVGNPLEEKHSAENNWIEEATKRVPKLKKLDGTPVIKGDEEEDN

SEQ ID NO: 221738 - protein, 57 aa, Artificial Sequence
  derived and/or modified sequence
MKKLKILYMSNNLVKDWAEFVKLAELPCLEDLVFVGNPLEEKHSAENNWIEEATKRV

SEQ ID NO: 221739 - protein, 64 aa, Artificial Sequence
  derived and/or modified sequence
MKKLKILYMSNNLVKDWAEFVKLAELPCLEDLVFVGNPLEEKHSAENNWIEEATKRVPKLKKLD

SEQ ID NO: 221740 - protein, 52 aa, Artificial Sequence
  derived and/or modified sequence
MDASLSMLANCEKLSLSTNCIEKIANLNGLKNLRILSLGRNNIKNLNGLEAV

SEQ ID NO: 221741 - protein, 65 aa, Artificial Sequence
  derived and/or modified sequence
MKKLKILYMSNNLVKDWAEFVKLAELPCLEDLVFVGNPLEEKHSAENNWIEEATKRVPKLKKLDG

SEQ ID NO: 221742 - DNA, 573 bp, Artificial Sequence
  derived and/or modified sequence
atggccaaggccaccaccatcaaggaagccctggcccgatgggaagaaaaaactgggcagcggccaagtgaggctaaggaaatcaagctgtacgcacagatacccccaatagagaaaatggatgcttcgttgtccatgctggctaactgtgaaaaactgtcgctctccaccaactgcatcgaaaaaattgccaacctgaacgggctgaaaaacttgagaattctatccttgggtcgcaacaatatcaaaaacctgaatggtttggaagcagtgggcgatacattggaggagctctggattagttataattttatcgagaagctgaaagggattcatatcatgaagaaactgaaaattttgtacatgtctaacaacctggtgaaagactgggccgaattcgtaaagcttgccgagcttccctgcctcgaagatctagtgttcgtggggaatccactcgaagaaaagcatagcgccgaaaacaactggatagaggaggccacaaaaagggtccccaagctgaaaaagcttgacggcacccctgtgataaaaggcgacgaagaggaggacaattag

SEQ ID NO: 221743 - DNA, 573 bp, Artificial Sequence
  derived and/or modified sequence
atggccaaggccaccaccatcaaggaggccctggcccgctgggaggagaagacaggccagaggccttctgaggccaaggagatcaagctgtatgcccagatcccccccatcgagaagatggatgccagcctgtccatgctggccaactgtgagaagctgagcctgagcaccaactgcatcgagaagatcgccaacctgaatggcctgaagaacctgcgcatcctgagcctgggcaggaacaacatcaagaacctgaatggcctggaggccgtgggggacaccctggaggagctgtggatctcctacaacttcatcgagaagctgaagggcatccacatcatgaagaagctgaagatcctgtacatgagcaacaacctggtgaaggactgggccgagtttgtgaagctggccgagctgccctgcctggaggacctggtgtttgtgggcaaccccctggaggagaagcacagcgctgagaacaactggattgaggaggccaccaagagggtgcccaagctgaagaagctggatggcacccctgtgatcaagggagatgaggaggaggacaactag

SEQ ID NO: 221744 - DNA, 573 bp, Artificial Sequence
  derived and/or modified sequence
atggccaaggccaccaccatcaaggaggccctggcccggtgggaggagaagacagggcagaggccctctgaggccaaggagatcaaactatacgcacagattcctcccatagaaaagatggatgcttcactttcaatgctcgctaattgcgagaagttgagcctgtccaccaactgtattgagaagatagcaaacctgaatggccttaagaacctgagaatcctctccctcggtcgcaataacattaagaacctgaacggactggaggctgttggtgacaccctcgaggagttatggataagttataattttatagaaaagctgaaggggattcacattatgaagaagctcaaaatactctatatgtctaataatttggtgaaggattgggctgagttcgttaaactcgctgagctgccctgcctggaggaccttgtgtttgttggcaatcccttggaagaaaaacattccgccgagaataattggatcgaagaagccactaagagggtgcctaaactcaagaagttggacgggactccagtgatcaaaggggatgaagaggaggacaattag

SEQ ID NO: 221745 - DNA, 573 bp, Artificial Sequence
  derived and/or modified sequence
atggccaaggctactacgatcaaggaggcacttgcacgctgggaggaaaaaacaggccagcggccttcagaggccaaggaaattaagctatacgcacagatacctcctattgaaaaaatggatgcgagcctctccatgttagccaactgcgagaaactcagcctaagcactaattgcattgagaagatcgcaaacctcaacgggcttaaaaacctgcgcatcctcagcctgggaaggaataacataaaaaacctcaacgggctggaagccgtaggggacacattggaagaactttggatttcgtacaatttcatagaaaagctgaaggggatccacattatgaaaaaattgaagattctgtatatgtcaaataatctggtgaaagattgggcggagttcgtcaaactggccgaattgccttgtctggaagatctggttttcgttggaaaccccctagaagaaaagcactccgcagagaacaactggattgaagaagcaactaagagagtccctaagctgaaaaagctggatggcactcctgtgattaaaggggatgaagaggaggacaactag

SEQ ID NO: 221746 - DNA, 573 bp, Artificial Sequence
  derived and/or modified sequence
atggccaaggccaccaccatcaaggaggccctggccagatgggaggagaagaccggccagagacccagcgaggccaaggagatcaagctgtacgcccagatcccccccatcgagaagatggacgccagcctgagcatgctggccaactgcgagaagctgagcctgagcaccaactgcatcgagaagatcgccaacctgaacggcctgaagaacctgagaatcctgagcctgggcagaaacaacatcaagaacctgaacggcctggaggccgtgggcgacaccctggaggagctgtggatcagctacaacttcatcgagaagctgaagggcatccacatcatgaagaagctgaagatcctgtacatgagcaacaacctggtgaaggactgggccgagttcgtgaagctggccgagctgccctgcctggaggacctggtgttcgtgggcaaccccctggaggagaagcacagcgccgagaacaactggatcgaggaggccaccaagagagtgcccaagctgaagaagctggacggcacccccgtgatcaagggcgacgaggaggaggacaactag

SEQ ID NO: 221747 - DNA, 617 bp, Artificial Sequence
  derived and/or modified sequence
gctgggccttgattggttgagtcaagtgagctgattggttgattcaggcgaaagcaacaacaatcaaagaagccttagcgagatgggaagagaaaactggccagaggccatctgaagccaaagagataaaactttatgcccagattccccctatagagaagatggatgcatccttgtccatgcttgctaattgcgagaagctttcactgtctacaaactgcattgaaaaaattgccaacctgaatggcttaaaaaacttgaggatattatctttaggaagaaacaacataaagaacttaaatggactggaggcagtaggggacacattagaagaactgtggatctcctacaattttattgagaagttgaaagggatccacataatgaagaaattgaagattctctacatgtctaataacctggtaaaagactgggctgagtttgtgaagctggcagaactgccatgcctcgaagacctggtgtttgtaggcaatcccttggaagagaaacattctgctgagaataactggattgaagaagcaaccaagagagtgcccaaactgaaaaagctggatggtactccagtaattaaaggggatgaggaagaagacaactaa

SEQ ID NO: 221748 - DNA, 1166 bp, Artificial Sequence
  derived and/or modified sequence
gggccctagcaaccagagcagtgacagtagcaaccgccggaatggcgaaagcaacaacaatcaaagaagccttagcgagatgggaagagaaaactggccagaggccatctgaagccaaagagataaaactttatgcccagattccccctatagagaagatggatgcatccttgtccatgcttgctaattgcgagaagctttcactgtctacaaactgcattgaaaaaattgccaacctgaatggcttaaaaaacttgaggatattatctttaggaagaaacaacataaagaacttaaatggactggaggcagtaggggacacattagaagaactgtggatctcctacaattttattgagaagttgaaagggatccacataatgaagaaattgaagattctctacatgtctaataacctggtaaaagactgggctgagtttgtgaagctggcagaactgccatgcctcgaagacctggtgtttgtaggcaatcccttggaagagaaacattctgctgagaataactggattgaagaagcaaccaagagagtgcccaaactgaaaaagctggatggtactccagtaattaaaggggatgaggaagaagacaactaatgccacgctttccactgtgtgttaacttatttaaatgtcataagaacaatagataaattttatataattgtctattttaaagattctgtatgggacaaaagtttcttaagataaaacagatcactcattctcatctttttttttcctttaacttattcagtgtttctccccaaaactggtaatgccaaccttatatatcctatttctctttttagaaaccacaaattttcgatttttgtcttcagtctcagttacgtactgtgtagccccatctactaaaacaaaacctttgtagaccagtcatttttaataacaaaggaacaaatgtttttttcagtttgttcattttttttaggttagacattttaaaagatgtacatttgaaaattcagaacatttttcctgaaggtctgtctctgtacaattcagaagcacatgcctttagctcagaaggcagcatggtgatgggaagagttcctcttagaaatacagcaggtccggaaccaagactccaaagttccattggaaaagatatggtgaaaaaaggaaaaa

SEQ ID NO: 221749 - DNA, 632 bp, Artificial Sequence
  derived and/or modified sequence
agcaaccgccggaatgctgggccttgattggttgagtcaagtgagctgattggttgattcaggcgaaagcaacaacaatcaaagaagccttagcgagatgggaagagaaaactggccagaggccatctgaagccaaagagataaaactttatgcccagattccccctatagagaagatggatgcatccttgtccatgcttgctaattgcgagaagctttcactgtctacaaactgcattgaaaaaattgccaacctgaatggcttaaaaaacttgaggatattatctttaggaagaaacaacataaagaacttaaatggactggaggcagtaggggacacattagaagaactgtggatctcctacaattttattgagaagttgaaagggatccacataatgaagaaattgaagattctctacatgtctaataacctggtaaaagactgggctgagtttgtgaagctggcagaactgccatgcctcgaagacctggtgtttgtaggcaatcccttggaagagaaacattctgctgagaataactggattgaagaagcaaccaagagagtgcccaaactgaaaaagctggatggtactccagtaattaaaggggatgaggaagaagacaactaa

SEQ ID NO: 221750 - DNA, 623 bp, Artificial Sequence
  derived and/or modified sequence
gaccccgcgggccctagcaaccagagcagtgacagtagcaaccgccggaatgctgggccttgattggttgagtcaagtgagctgattggttgattcaggcgaaagcaacaacaatcaaagaagccttagcgagatgggaagagaaaactggccagaggccatctgaagccaaagagataaaactttatgcccagattccccctatagagaagatggatgcatccttgtccatgcttgctaattgcgactttcactgtctacaaactgcattgaaaaaattgccaacctgaatggcttaaaaaacttgaggatattatctttaggaagaaacaacataaagaacttaaatggactggaggcagtaggggacacattagaagaactgtggatctcctacaattttattgagaagttgaaagggatccacataatgaagaaattgaagattctctacatgtctaataacctggtaaaagactgggctgagtttgtgaagctggcagaactgccatgcctcgaagacctggtgtttgtaggcaatcccttggaagagaaacattctgctgagaataactggattgaagaagcaaccaagagagtgcccaaactgaaaaagctggatg

SEQ ID NO: 221751 - DNA, 502 bp, Artificial Sequence
  derived and/or modified sequence
cagtgacagtagcaaccgccggaatgatggggtcttgctgtgttgtccaggctggtctcaaactcctggcctcaagtgatcctccagccttggcttcccatagtgctgggattgcaggcatgagccaccatgtccagcttgaagatataatattgtatctaggattttcaaatccatgttgaaaactgggccttgattggttgagtcaagtgagctgattggttgattcaggcgaaagcaacaacaatcaaagaagccttagcgagatgggaagagaaaactggccagaggccatctgaagccaaagagataaaactttatgcccagattccccctatagagaagatggatgcatccttgtccatgcttgctaattgcgagaagctttcactgtctacaaactgcattgaaaaaattgccaacctgaatggcttaaaaaacttgaggatattatctttaggaagaaacaacataaagaacttaaatggactggaggcagtag

SEQ ID NO: 221752 - DNA, 639 bp, Artificial Sequence
  derived and/or modified sequence
gaagagaaaactggccagaggccatctgaagccaaagagataaaactttatgcccagattccccctatagagaagatggatgcatccttgtccatgcttgctaattgcgagaagctttcactgtctacaaactgcattgaaaaaattgccaacctgaatggcttaaaaaacttgaggatattatctttaggaagaaacaacataaagaacttaaatggactgagatggggtttcaccgtagtagccaggatggtctcgatctcctgacctcatgatccgcctgcctcggcctcccaaagtgctgggattacaggcgtgagccaccacacctgggcaaaatttgatatttgtgatgttctaaataaattggaggcagtaggggacacattagaagaactgtggatctcctacaattttattgagaagttgaaagggatccacataatgaagaaattgaagattctctacatgtctaataacctggtaaaagactgggctgagtttgtgaagctggcagaactgccatgcctcgaagacctggtgtttgtaggcaatcccttggaagagaaacattctgctgagaataactggattgaagaagcaaccaagagagtgcccaaactgaaaaagctggatggt

SEQ ID NO: 221753 - protein, 401 aa, Artificial Sequence
  derived and/or modified sequence
MEPRRAAPGVPGWGSREAAGSASAAELVYHLAGALGTELQDLARRFGPEAAAGLVPLVVRALELLEQAAVGPAPDSLQVSAQPAEQELRRLREENERLRRELRAGPQEERALLRQLKEVTDRQRDELRAHNRDLRQRGQETEALQEQLQRLLLVNAELRHKLAAMQTQLRAAQDRERERQQPGEAATPQAKERARGQAGRPGHQHGQEPEWATAGAGAPGNPEDPAEAAQQLGRPSEAGQCRFSREEFEQILQERNELKAKVFLLKEELAYFQRELLTDHRVPGLLLEAMKVAVRKQRKKIKAKMLGTPEEAESSEDEAGPWILLSDDKGDHPPPPESKIQSFFGLWYRGKAESSEDETSSPAPSKLGGEEEAQPQSPAPDPPCSALHEHLCLGASAAPEA

SEQ ID NO: 221754 - DNA, 1206 bp, Artificial Sequence
  derived and/or modified sequence
atggagcccaggcgggctgcgcctggtgttccaggttgggggtctcgggaagccgcaggatctgcctcggctgctgagctggtttaccacctggccggagctctcggcaccgagttgcaggatctggctcgccgattcggccccgaggcagcagccggcctggtcccacttgtggtccgcgcactcgagctgctcgagcaggccgcagtggggcccgcccctgacagtctgcaggtgagcgcccagcctgccgaacaagagctacgacgcttgagagaggaaaacgaaagactgaggagggaactgcgggccggccctcaagaagagcgggcactcctcagacagctcaaggaggtgactgatcgtcaacgcgacgagctgcgcgcccacaatcgagacttaagacagagaggccaggagaccgaagcactgcaggaacagctgcagcgactgctcctggtgaacgcagagttgcgccacaagctcgctgctatgcaaacccagttgagggccgcacaggacagagagcgcgaaagacagcagcccggagaagctgccacaccacaggccaaggaacgcgcccgaggccaagccgggaggcccggtcatcagcatggccaggagcctgaatgggccacagccggcgcaggggctccgggtaatccggaagacccagccgaggctgcccaacaattgggcagaccgtctgaagccgggcagtgccggtttagcagggaggaattcgagcagatactccaagaaaggaatgaactgaaggccaaggtgtttctgctgaaagaggaactggcctattttcaacgcgagctgctgactgaccaccgcgtgccaggtctcctgctggaggctatgaaagtagccgtcagaaagcagagaaagaaaatcaaagctaaaatgttaggaacacccgaggaagccgagagctccgaggacgaagccggtccctggatcctgctttccgatgataagggagatcatcctcctcccccagaatccaaaatccagagcttctttggtctctggtataggggcaaagctgagagctcagaagacgaaacaagcagccccgcccctagtaaactgggtggggaagaagaggcccaaccccaatcccctgcccccgacccaccttgttcagccctgcacgagcacctatgcctgggtgcttccgcagcacccgaagcttag

SEQ ID NO: 221755 - DNA, 1206 bp, Artificial Sequence
  derived and/or modified sequence
atggagccccggcgggccgcccctggggtgcccggctggggcagccgggaggccgccggcagcgccagcgctgctgagctggtgtaccacctggccggggccctgggcacagagctgcaggacctggcccggcgcttcggccctgaggccgccgccggcctggtgcccctggtggtgcgggccctggagctgctggagcaggccgctgtgggccctgccccagacagcctgcaggtgtctgcccagcctgctgagcaggagctgcggcggctgcgggaggagaatgaaaggctgcggcgggagctgcgggccggcccccaggaggagcgggccctgctgcggcagctgaaggaggtgacagaccggcagagagatgagctgcgggcccacaacagagacctgcggcagaggggccaggagacagaggccctgcaggagcagctgcagaggctgctgctggtgaatgctgagctgcggcacaagctggccgccatgcagacccagctgcgggccgcccaggaccgggagcgggagcggcagcagcccggggaggccgccaccccccaggccaaggagcgggcccggggccaggccggccggcccggccaccagcacggccaggagcctgagtgggccacagctggggccggggcccctggcaacccagaagatcctgctgaggccgcccagcagctgggccggcccagcgaggccggccagtgccgcttcagccgggaggagtttgagcagatcctgcaggagagaaatgagctgaaggccaaggtgttcctgctgaaggaggagctggcctacttccagcgggagctgctgacagaccaccgggtgcccggcctgctgctggaggccatgaaggtggccgtgaggaagcagaggaagaagatcaaggccaagatgctgggcaccccagaggaggccgagagcagtgaagatgaagctggcccctggatcctgctgagtgatgacaagggggaccaccccccacctcctgagagcaagatccagagcttcttcggcctgtggtaccggggcaaggccgagagcagtgaagatgagaccagcagccctgcccccagcaagctgggcggggaggaggaggcccagccccagagccctgccccagaccccccctgcagcgccctgcacgagcacctgtgcctgggcgccagcgctgcccctgaggcctag

SEQ ID NO: 221756 - DNA, 1206 bp, Artificial Sequence
  derived and/or modified sequence
atggagccccggcgggccgcccccggcgtgcccggctggggcagccgcgaggctgccggctctgcttcagcagctgagctggtgtatcacttggcaggggccctgggtaccgaactgcaggacctggctaggaggtttggtccagaagcggccgccggattagtgcctcttgtcgtgcgggctctggaacttctggagcaggccgccgtcggcccagcgcccgactctctgcaggtaagcgctcagcccgccgagcaagagctacggaggctaagggaggagaacgagaggctgcgccgcgagctcagggcaggaccacaagaggagcgagccctactgagacagctaaaggaagtcactgacaggcagagggatgaactccgcgcccataaccgggacctcagacaaagaggccaggaaactgaggccctgcaggaacagttgcaaagactgctattagtgaacgcggagctgcggcacaagttggctgcaatgcaaacccagttacgcgctgcccaggacagagagagggagaggcagcaaccaggtgaagcggccacccctcaggcaaaagaaagggctcgtgggcaggccggccggcctgggcaccagcacggccaagagcctgagtgggccaccgctggtgccggcgcaccaggcaatcctgaggaccccgccgaagccgcccagcagctgggaaggccttctgaggccggccagtgcagattttcgcgcgaggagttcgagcagatccttcaagagcgaaatgagctgaaggcgaaggtcttcctacttaaggaagagttggcatactttcagagagagctgctcaccgatcatagagtgcccggactgctgctggaagccatgaaggttgccgtgaggaaacagagaaagaagatcaaagccaaaatgctgggtacacccgaagaggccgagagttcagaagacgaggctggtccttggattctgctgagcgacgacaagggtgatcatcccccaccccccgaatccaagattcagagctttttcggactgtggtatcgggggaaagcggagtctagtgaagacgagacaagttccccggcgccaagcaaacttggcggggaggaggaagcacagccccagtcccccgctcccgacccaccatgtagcgcacttcacgagcacctgtgccttggagctagcgccgcccccgaggcctag

SEQ ID NO: 221757 - DNA, 1206 bp, Artificial Sequence
  derived and/or modified sequence
atggaaccgcgacgtgccgctccgggagtccccggttggggatcccgtgaggctgcgggtagtgccagcgccgctgagttagtgtaccatctcgctggagcactggggacggagctccaggacctggcccgaagattcggtcctgaagctgccgctggtctggtcccgctggtggtgagggcgctggagctgttggaacaagctgctgtgggtccagctcctgactccctgcaggtgagtgcccagcctgcagagcaggagctgcgtcggctgagagaagagaacgaacggctccgacgagaactgcgcgcagggccacaagaggagcgcgctttgttgaggcagctgaaagaagtaaccgaccggcagagagatgagctgagggcacacaacagggacctgaggcaacgcggtcaagaaacagaggcgcttcaggaacaactgcagcgtctgctgctggttaatgccgaacttcgccataaactggccgctatgcagactcagcttagggccgctcaggaccgagaacgcgagcgccaacagcccggagaagctgcaacccctcaggccaaggaacgggcacgaggacaagcgggaaggccgggacaccagcacgggcaggagccggagtgggccaccgccggtgccggagcgccaggaaatcccgaggatcccgctgaggccgcacagcagctgggaagaccttccgaagcaggccaatgccgattctcacgggaggagttcgagcagatactacaggaaaggaacgagctaaaggcaaaagtatttctattgaaggaggagctcgcctattttcagagagagctcctgacagatcatcgggtacccggactcttgctcgaggcgatgaaagtggcagtgaggaagcagcgaaagaagatcaaagctaaaatgctgggaacacctgaagaggccgaatcttccgaagatgaggctggaccatggattctcctgagtgacgacaagggcgaccacccgccacctcctgagagcaagattcagtctttctttggtctgtggtataggggcaaggcagaaagctctgaggatgagactagttcccccgctccctctaagttaggcggagaggaagaggcccaacctcagtccccagctcccgatccaccctgttccgccctgcatgagcacctgtgtctgggagcgtctgcagcacccgaggcttag

SEQ ID NO: 221758 - DNA, 1752 bp, Artificial Sequence
  derived and/or modified sequence
agctcttggacgcctggctggaagttggctgtcttgtttcctgtgaccttgggggtggaaaggacagagcccaggcgacctagggcactatctccctaccccacgccttctcccttcctcgttcctccctacccttatcgcttctaccccgcccacaccgccctaaacggcttcctggggcggaactgtttcgcttttccccgtcccagtggagggtggggtgggggggtcgcagccctaagcctctgggagacatggagcccaggagggcggcgcccggggtgcctggctgggggtctcgggaggccgcggggtcggcatcggccgcggagcttgtgtaccatctagccggggccctgggcactgagctgcaggatctggcgcgccgtttcgggccggaggcggcggccgggctggtgccgctagtggtgcgggcgctggagctcttggaacaggctgccgtggggcccgccccggactcgctgcaggtgtcggcgcagccggcggagcaggagctgcggcggctgcgggaggagaacgagcgcctccgcagggagctgcgcgcggggccacaggaggagcgcgcgctgctgcggcagctcaaggaggtcacggaccgacagcgggacgaactccgggcgcacaaccgcgacctgcggcagcgcggccaggagaccgaggcgttgcaggagcagctgcagcgcctcctgctggtgaacgctgagctgcggcacaagctggcggccatgcagacccagctgcgcgccgcgcaggaccgcgagagggagcgccagcagcctggcgaagccgcgactccgcaggctaaagagcgagcgcgggggcaggccgggcggcccgggcaccagcacggacaggagcccgaatgggcgaccgccggcgcaggcgccccagggaaccctgaggacccggcggaggccgcgcagcagctcgggcgcccctcggaggcagggcagtgccgcttcagtcgggaggagtttgagcagatccttcaggagcggaatgaactcaaagccaaagtgttcctgctcaaggaggaactggcctacttccagcgggagctgctcacagaccaccgggtccccggccttctgctcgaggccatgaaggtggctgtccggaagcagcggaagaagatcaaggccaagatgttagggacaccagaggaagcagagagcagtgaggatgaggctggcccatggatcctgctctccgatgacaagggagaccatcccccacccccggagtccaaaatacagagtttctttggcctatggtatcggggtaaagctgaatcctctgaggatgagaccagcagccctgcacccagcaagctagggggagaagaggaggcccaaccacagtctccagctcctgatccgccctgttctgccctccacgaacacctttgtctgggggcctcagccgccccagaggcctgacttaggggtctggctgtggaaggatgtgtggcctcaaatgaggacagggctcccgccttcacagccctcgccaggggtctgccccaatcctggcctgcatcagggcaggacggggtctcagcccgcctccctctctacgtctctgtaccgagcctctggggccagatataagagtgcctctctgagtctcagtttccccatccatgaaatgagagctgactgcctagctcccagggctttgtgcagacggcctgagctcatgtaataaagaactgcccgtaatacacagaaa

SEQ ID NO: 221759 - DNA, 1206 bp, Artificial Sequence
  derived and/or modified sequence
atggagcccagaagagccgcccccggcgtgcccggctggggcagcagagaggccgccggcagcgccagcgccgccgagctggtgtaccacctggccggcgccctgggcaccgagctgcaggacctggccagaagattcggccccgaggccgccgccggcctggtgcccctggtggtgagagccctggagctgctggagcaggccgccgtgggccccgcccccgacagcctgcaggtgagcgcccagcccgccgagcaggagctgagaagactgagagaggagaacgagagactgagaagagagctgagagccggcccccaggaggagagagccctgctgagacagctgaaggaggtgaccgacagacagagagacgagctgagagcccacaacagagacctgagacagagaggccaggagaccgaggccctgcaggagcagctgcagagactgctgctggtgaacgccgagctgagacacaagctggccgccatgcagacccagctgagagccgcccaggacagagagagagagagacagcagcccggcgaggccgccaccccccaggccaaggagagagccagaggccaggccggcagacccggccaccagcacggccaggagcccgagtgggccaccgccggcgccggcgcccccggcaaccccgaggaccccgccgaggccgcccagcagctgggcagacccagcgaggccggccagtgcagattcagcagagaggagttcgagcagatcctgcaggagagaaacgagctgaaggccaaggtgttcctgctgaaggaggagctggcctacttccagagagagctgctgaccgaccacagagtgcccggcctgctgctggaggccatgaaggtggccgtgagaaagcagagaaagaagatcaaggccaagatgctgggcacccccgaggaggccgagagcagcgaggacgaggccggcccctggatcctgctgagcgacgacaagggcgaccacccccccccccccgagagcaagatccagagcttcttcggcctgtggtacagaggcaaggccgagagcagcgaggacgagaccagcagccccgcccccagcaagctgggcggcgaggaggaggcccagccccagagccccgcccccgaccccccctgcagcgccctgcacgagcacctgtgcctgggcgccagcgccgcccccgaggcctag

SEQ ID NO: 221760 - protein, 828 aa, Artificial Sequence
  derived and/or modified sequence
MAEAALLLLPEAAAERDAREKLALWDRRPDTTAPLTDRQTDSVLELKAAAENLPVPAELPIEDLCSLTSQSLPIELTSVVPESTEDILLKGFTSLGMEEERIETAQQFFSWFAKLQTQMDQDEGTKYRQMRDYLSGFQEQCDAILNDVNSALQHLESLQKQYLFVSNKTGTLHEACEQLLKEQSELVDLAENIQQKLSYFNELETINTKLNSPTLSVNSDGFIPMLAKLDDCITYISSHPNFKDYPIYLLKFKQCLSKALHLMKTYTVNTLQTLTSQLLKRDPSSVPNADNAFTLFYVKFRAAAPKVRTLIEQIELRSEKIPEYQQLLNDIHQCYLDQRELLLGPSIACTVAELTSQNNRDHCALVRSGCAFMVHVCQDEHQLYNEFFTKPTSKLDELLEKLCVSLYDVFRPLIIHVIHLETLSELCGILKNEVLEDHVQNNAEQLGAFAAGVKQMLEDVQERLVYRTHIYIQTDITGYKPAPGDLAYPDKLVMMEQIAQSLKDEQKKVPSEASFSDVHLEEGESNSLTKSGSTESLNPRPQTTISPADLHGMWYPTVRRTLVCLSKLYRCIDRAVFQGLSQEALSACIQSLLGASESISKNKTQIDGQLFLIKHLLILREQIAPFHTEFTIKEISLDLKKTRDAAFKILNPMTVPRFFRLNSNNALIEFLLEGTPEIREHYLDSKKDVDRHLKSACEQFIQQQTKLFVEQLEEFMTKVSALKTMASQGGPKYTLSQQPWAQPAKVNDLAATAYKTIKTKLPVTLRSMSLYLSNKDTEFILFKPVRNNIQQVFQKFHALLKEEFSPEDIQIIACPSMEQLSLLLLVSK

SEQ ID NO: 221761 - DNA, 2487 bp, Artificial Sequence
  derived and/or modified sequence
atggccgaagctgccctgctcttattgccagaggctgccgctgagcgtgatgcccgggagaagcttgctctatgggaccggcgccctgatactactgcacctttgactgatcgccaaacagacagcgtactagagctaaaagccgccgcggagaatctacctgtcccagcagagctccctattgaggatttgtgctccctgacttcccagtccttgccgatagagctaacttccgtggtgcccgagtccactgaggatattctgctcaagggtttcacatctctcggtatggaggaagagcgcatcgaaacagctcagcagttcttcagttggtttgcaaagctgcagacgcagatggatcaggacgagggaaccaagtatcgtcagatgcgtgactacctctccggtttccaggaacagtgcgatgccatcctcaatgatgtgaattcagccttacaacatctagagtccctccagaaacaatatctgttcgtgtcgaataaaacaggaactctgcatgaggcatgcgaacagctgttgaaggaacagagtgagctggtagatcttgccgaaaatattcagcagaagctgtcttactttaacgagcttgagaccattaatactaagttaaattctccaaccctctccgtgaacagtgatggattcatccctatgcttgccaagcttgatgactgtattacctacattagttctcatcccaacttcaaggactaccctatttacctgctgaagttcaagcagtgcctgtccaaggctctgcatttgatgaagacttatactgtgaatactctgcagacccttacctcccaattgcttaaacgcgaccccagcagtgtgccgaacgcagataacgcctttacactgttctacgtaaagttcagggcggcggccccgaaagtgcggaccctgatagaacaaatcgagctgcgcagcgaaaaaattcctgaataccagcagctgctgaacgacatacaccagtgttatctggaccagagggagctcctgctgggaccttccatagcctgtacggtggccgaattaaccagtcagaataacagagaccattgcgcgctggtgcgaagcgggtgcgccttcatggtgcacgtgtgtcaggatgagcatcagctctataatgagttttttacaaaacccaccagcaaattggacgaacttctagagaagttgtgtgtgagcttgtacgacgtcttccggccccttatcattcacgtgatacaccttgaaacccttagcgagctttgtggcatcctcaagaatgaggtgctggaggatcacgtccaaaacaatgccgaacagctcggcgctttcgcagcaggtgtgaagcaaatgcttgaagacgttcaagaacgattggtctatcgaacccatatctacatccaaacagatattacgggctacaaaccagctcccggggatctggcataccctgacaagctcgtcatgatggaacagatcgcccaatccctcaaagacgagcaaaaaaaggttccttctgaggcaagcttctccgacgtccatctcgaggagggagaatcaaactcgcttaccaaatctggatcgacagagtcactgaacccaagaccacaaactacaataagtcccgctgatctacatgggatgtggtacccgacagtgcggcggactctcgtttgcctgagtaaactatataggtgtattgatcgcgccgtgtttcaggggcttagtcaggaggccctgagtgcctgcattcagagcctgttgggagcaagcgagtcaatctcaaagaataaaacccaaattgatggacagctgttcttaattaaacatctccttatcctccgggaacagatcgctccctttcacacggagtttactatcaaggagatctccctggatctcaaaaaaactcgggacgcggccttcaagattctcaaccctatgacagttccgcgcttttttcggctgaacagcaataatgcacttatagaatttctattggagggaaccccagagatcagagagcactacttggacagcaaaaaggacgtcgataggcatctgaagtccgcttgcgaacagttcatccagcagcaaacaaaactgtttgtcgagcagttggaggagtttatgaccaaggtttccgccttaaaaacaatggcgagtcagggaggcccaaaatatactctgtcacagcagccatgggcccagccagctaaggtgaacgatcttgccgcaaccgcctataagaccattaagacaaagctccctgttaccttgcgctccatgtctctctatctgagcaacaaggatacagagttcatcctgtttaagcctgttcgaaataacatccagcaggtgtttcagaaattccacgcgctacttaaggaggagtttagtcccgaggatatccagattattgcctgcccttcgatggagcagctgagccttctgctcctggtgtcaaagtag

SEQ ID NO: 221762 - DNA, 2487 bp, Artificial Sequence
  derived and/or modified sequence
atggccgaggccgccctgctgctgctgcctgaggccgctgctgagagagatgcccgggagaagctggccctgtgggacagaagaccagacaccacagcccccctgacagaccggcagacagacagcgtgctggagctgaaggctgctgctgagaacctgcctgtgcctgctgagctgcccatcgaggacctgtgcagcctgaccagccagagcctgcccatcgagctgacctctgtggtgcctgagagcacagaggacatcctgctgaagggcttcaccagcctgggcatggaggaggagcgcatcgagacagcccagcagttcttctcctggtttgccaagctgcagacccagatggaccaggatgagggcaccaagtaccggcagatgagggactacctgagcggcttccaggagcagtgtgatgccatcctgaatgatgtgaacagcgccctgcagcacctggagagcctgcagaagcagtacctgtttgtgagcaacaagacaggcaccctgcacgaggcctgtgagcagctgctgaaggagcagagcgagctggtggacctggccgagaacatccagcagaagctgagctacttcaatgagctggagaccatcaacaccaagctgaacagccccaccctgtctgtgaacagtgatggcttcatccccatgctggccaagctggatgactgcatcacctacatcagcagccaccccaacttcaaggactaccccatctacctgctgaagttcaagcagtgcctgagcaaggccctgcacctgatgaagacctacacagtgaacaccctgcagaccctgaccagccagctgctgaagagggaccccagctctgtgcccaatgctgacaatgccttcaccctcttctacgtgaagttccgggctgctgcccccaaggtgaggaccctgattgagcagatcgagctgcggtctgagaagatccctgagtaccagcagctgctgaatgacatccaccagtgctacctggaccagcgggagctgctgctgggccccagcatcgcctgcaccgtggccgagctgaccagccagaacaacagagaccactgtgccctggtgcgcagcggctgtgccttcatggtgcacgtgtgccaggatgagcaccagctgtacaatgagttcttcaccaagcccaccagcaagctggatgagctgctggagaagctgtgtgtgtccctgtatgatgtgttccggcccctcatcatccacgtgatccacctggagaccctgtctgagctgtgtggcatcctgaagaatgaggtgctggaggaccacgtgcagaacaatgctgagcagctgggcgcctttgctgctggggtgaagcagatgctggaggatgtgcaggagcggctggtgtaccgcacccacatctacatccagacagacatcaccggctacaagccagcccctggggacctggcctacccagacaagctggtgatgatggagcagatcgcccagagcctgaaggatgagcagaagaaggtgcccagcgaggccagcttcagtgatgtgcacctggaggagggggagagcaacagcctgaccaagagcggcagcacagagagcctgaacccccggccccagaccaccatcagccctgctgacctgcacggcatgtggtaccccaccgtgcggaggaccctggtgtgcctgagcaagctgtaccgctgcatcgacagagctgtgttccagggcctgagccaggaggccctgagcgcctgcatccagagcctgctgggcgccagcgagagcatcagcaagaacaagacccagattgatggccagctgttcctgatcaagcacctgctgatcctgcgggagcagatcgcccccttccacacagagttcaccatcaaggagatcagcctggacctgaagaagaccagagatgctgccttcaagatcctgaaccccatgacagtgccccgcttcttccggctgaacagcaacaatgccctgattgagttcctgctggagggcaccccagagatccgggagcactacctggacagcaagaaggatgtggacagacacctgaagagcgcctgtgagcagttcatccagcagcagaccaagctgtttgtggagcagctggaggagttcatgaccaaggtgtctgccctgaagaccatggccagccagggcggccccaagtacaccctgagccagcagccctgggcccagcctgccaaggtgaatgacctggccgccacagcctacaagaccatcaagaccaagctgcctgtgaccctgcgctccatgagcctgtacctgagcaacaaggacacagagttcatcctcttcaagcctgtgaggaacaacatccagcaggtgttccagaagttccacgccctgctgaaggaggagttctccccagaggacatccagatcatcgcctgccccagcatggagcagctgagcctgctgctgctggtgtccaagtag

SEQ ID NO: 221763 - DNA, 2487 bp, Artificial Sequence
  derived and/or modified sequence
atggccgaggccgccctgctgctgctgcccgaggccgccgccgagagggacgctcgggaaaaactggccttgtgggacagaaggccagacacaactgccccgttaacggaccgccagaccgatagcgtgctggagcttaaggcagccgcagagaatcttcctgtccccgcagaactcccaatagaagatctgtgtagccttacttcacaatctctgcctattgaattaacttctgtggtgccagagtcaacagaggatatccttcttaaaggcttcaccagcctggggatggaggaagaacgcattgagacagctcagcagtttttttcatggttcgctaaactgcagacacagatggaccaggacgaaggcacgaaatatcgacaaatgcgcgactacctttcgggattccaggagcagtgcgacgctatcctgaacgatgtgaattctgctctgcagcacctggaaagcctgcagaagcagtacttattcgtttccaataaaaccggcactctgcacgaagcatgcgagcaacttttaaaggagcagagcgagcttgtcgatctagcagagaatatccagcagaagctctcgtattttaatgaattggaaaccattaacacaaaactgaactctccaaccctctccgtaaatagcgatggatttataccgatgttggccaagttagacgattgcatcacgtatattagcagccacccgaatttcaaagactaccccatctacctgcttaaattcaagcagtgtttgagcaaggcactgcatctaatgaaaacatatacagtgaatactctccagacactaactagccagttgctgaagcgtgacccctcatcagtccctaacgcggacaatgcattcacactgttctacgtaaagttccgggctgctgcgcctaaagtgcgtaccctgatagagcagattgagctgcggtccgagaagatcccagagtaccaacaactcctcaacgacattcatcaatgctatctcgaccagagggagctgctgctgggacccagcatcgcatgtactgttgcagaacttactagtcagaacaaccgtgaccactgcgccctggtgcgttcaggctgcgcgtttatggttcacgtctgtcaggatgaacaccagctatataatgagttctttacgaagccaactagtaagctggacgagctgctcgagaagttgtgtgtatctctctacgacgtcttccgacctctgattatccacgtgattcatctggaaacactttccgagctctgtgggatactgaaaaacgaggttcttgaggatcatgtccagaacaacgcggaacagctgggtgcattcgccgccggcgttaagcagatgctcgaggacgtacaagaacgactggtgtaccgcacgcacatctacatccagacggacatcacgggctacaagccggcgcctggcgacctggcttaccctgacaagctggttatgatggagcagattgctcaatcactgaaagacgaacagaaaaaagtgccctccgaggcttcatttagcgacgtgcacctggaggaaggggagtccaattctctgacaaaatccggctcaactgaaagcctgaaccctcgccctcaaaccacgatctcgcccgccgacttacatggcatgtggtacccaactgtgaggcgaactctggtgtgtttgtccaagctgtatcgttgcattgaccgcgcagtctttcagggtctgtcccaagaggctctgtctgcatgcatacagtcattactgggggcctcagagagcatctcgaaaaataaaactcagatagatggacagctcttcctgattaagcacctcctgattctcagggagcagatcgccccatttcataccgagtttaccatcaaggagatctccctagacttaaagaagactcgagacgcagctttcaagatcctgaaccctatgactgttcctcgtttcttcagattgaactccaataacgctctgatcgaattcttgctggaaggtactccagaaattcgagagcactacctggattcgaagaaagacgtagaccgccacttaaaatctgcctgtgagcagtttatccagcaacaaacaaaactgttcgtagagcagctcgaggaattcatgaccaaggtcagcgccctgaagaccatggcgagccagggtgggcccaagtataccctttctcagcagccgtgggcccaacctgctaaagtcaacgacctagccgctacagcttacaagaccattaaaactaagctacccgtcactctcagatcaatgtcattgtacttatctaataaggatacagaatttattttattcaagcccgtgagaaataacattcaacaggtttttcaaaagttccatgcgctcctgaaggaggagttttctcccgaagacattcagatcatagcttgtccctctatggagcagctgagtctactcctccttgtgtccaagtag

SEQ ID NO: 221764 - DNA, 2487 bp, Artificial Sequence
  derived and/or modified sequence
atggccgaggcagctttacttctcttaccagaggcagcagcggaacgcgacgcgagagaaaaattggccctgtgggacagaagaccggataccaccgcacctctcaccgatcgccagacggattccgtcctggaactgaaagcggctgctgaaaacttaccggtacctgcagagctgccgattgaggatctgtgcagcctgactagtcagtctttaccaattgaactaacttccgtcgtgcccgaaagcactgaggacatcctcctgaaaggttttactagtctgggcatggaggaagagagaattgagactgcccagcagtttttctcttggttcgcaaagctccagacgcagatggatcaagatgaggggaccaagtatcgccagatgagagactatctgagcggttttcaggaacagtgtgacgcaattttaaacgacgtaaactcagcactgcaacacctcgagagtctccagaaacaatacctgttcgttagcaacaagacggggacactacatgaagcctgtgaacagcttctgaaggaacagagcgagctggtggaccttgccgagaacatccagcagaaacttagctattttaacgagctcgaaacgataaacacaaaattaaactcccctacgctgtctgttaactccgatgggtttattccaatgctggcgaaactcgacgactgtataacttatatatcaagccatcctaactttaaggactatcccatttacctgctcaagtttaaacaatgtctgtcaaaggcactccacctgatgaagacttataccgtcaacactctccagacattgacaagccagcttctgaagcgtgatccctcctccgtgcctaacgccgataacgcattcacgctcttctacgttaagtttcgggcagcggctcctaaggttcgaaccctgatcgagcaaatcgaattaagaagcgagaagatccccgagtatcagcagctcttgaacgacatccaccagtgttaccttgaccaaagagagcttttattgggaccaagcatcgcttgtactgtggccgagttaactagccagaataaccgcgatcactgtgcccttgtgcgatccgggtgcgcgttcatggtccatgtgtgtcaggacgagcatcaactgtacaacgagtttttcaccaaacccacctccaaattagatgaattactcgagaaactgtgcgtgagcctctatgacgttttccgacctctgataattcatgtaatccacttagaaacactcagtgagctgtgtggcattctcaaaaacgaggtgctggaggatcacgtgcagaacaacgccgagcaacttggcgcttttgccgcaggcgtcaagcaaatgctggaagatgtgcaggaacgccttgtctaccgcactcacatctatattcagaccgacataaccgggtacaagcctgccccaggggatcttgcttatcccgataagctggttatgatggaacaaatcgcccaaagtctgaaagacgagcagaaaaaggtacctagcgaggccagtttctcagacgtgcacctggaagaaggagagagcaacagcctgaccaaaagcgggtccaccgagagtctcaatccgagaccacagaccacaatatctcccgctgacctgcatgggatgtggtacccgacggttcgcagaacccttgtgtgtctgtctaaattgtacaggtgcatcgaccgcgcagtctttcaaggactgtcacaggaagccctgtccgcatgtattcagtctctgctgggtgccagcgagagtatcagcaagaataaaacccaaatcgacgggcagttgttcctaatcaaacacctgctgattctgcgtgagcagatcgcacccttccacaccgaatttactattaaggagatctctttggacctcaagaagacccgggatgccgcattcaagattctgaatcctatgaccgtgcccaggtttttccggctgaattcaaataacgcactcatcgagtttctgctcgagggaacaccggagattagagaacattatcttgactcgaaaaaggacgttgacaggcatctgaagtcagcctgtgaacagttcatccagcaacaaacgaagctgttcgtggaacaacttgaggaatttatgactaaggtttctgcactcaagacaatggcctctcaaggcggacctaaatacactctgagtcagcagccctgggctcagccagcgaaggtgaatgacctagctgccaccgcctataagacaattaagactaaactacctgtgacgctccgtagcatgagcttatacctgagcaataaggatactgaatttattctgttcaaacctgttcgcaataatattcagcaggtgttccagaagttccatgctctgttaaaagaggaattttcccctgaggacatacagatcatcgcctgcccatccatggagcagctcagtctgctgttgttagtaagtaaatag

SEQ ID NO: 221765 - DNA, 4498 bp, Artificial Sequence
  derived and/or modified sequence
gccccgccgccggtgcagtgttggaagctccggttctcccggaagtggcccaggtctctctgtcggggtcccctccatctcgctgctgctgaaggccgcgagggcggcggcgatggcggaggcggcgctgttgctgctgcctgaggcggcggcggagcgggacgctagggaaaagctggctctctgggatcggagaccggacacgacggcgccgctgaccgacaggcagacggactcggtattggagctgaaggcggcggcagagaacttgccggtgccagctgagcttccaattgaagacttgtgcagtttaacatcccagtcactgcccattgaactgacttcagtagtgcctgaatctacagaagacattctcttgaagggcttcacttccttaggaatggaagaagaaagaattgaaaccgcacagcagtttttctcatggtttgcaaagctgcaaactcagatggatcaagatgaaggaactaaatatagacagatgagggattacttgtctgggtttcaggagcagtgtgatgctatattgaatgatgtaaacagtgctcttcagcatctggagtctttgcagaaacagtatctttttgtgtccaataagacaggaaccctacatgaagcctgtgaacagctcctaaaagaacagtcggaacttgttgatctggctgaaaacattcaacaaaagctttcctattttaacgaattggaaactattaacacaaaattgaattcccctacattgtcggtgaatagtgacggatttatacctatgctggccaagttagatgattgtataacatatatctcatctcatcctaattttaaagattatcccatatatttgctgaagtttaaacagtgtctttctaaagctttgcacctcatgaagacatatactgtgaacacactacagaccctcacaagtcagttactgaaaagggatccttcatctgtacctaatgcagacaatgccttcacattattttatgtgaaatttcgagctgctgcccccaaagtcagaactcttattgaacaaatagaactgcggtctgaaaaaatacctgaataccaacaactgctaaatgatatccaccagtgttaccttgatcagcgggagctccttttgggccctagtattgcttgcactgttgcagagttaaccagccaaaataatagagatcactgtgccttggttcgtagtggctgtgccttcatggttcatgtctgccaggatgaacaccaactttacaatgaatttttcacaaaaccaacatcaaaattagatgagcttttggagaaactgtgtgtgtcattgtatgatgtcttcaggccattgatcattcatgttattcacttagagactctgtcggaactttgtgggattcttaaaaatgaggtgcttgaagatcatgtgcagaacaatgctgagcaactgggggcatttgcagctggagtcaagcagatgttagaagatgtacaggagcggctcgtctaccgaacccacatctatattcagacggacatcacgggctataaaccagctcctggagatctggcatatcccgataagttagtcatgatggagcagattgcacagagtttgaaagatgaacagaagaaggtaccttcagaagcttcattttcagatgttcacttagaagaaggagagtctaacagtctgacaaaatctggttcaacagaatccctcaatcctagaccacagaccacaatttctccagcagatcttcatggaatgtggtatcctacggttcgaagaactcttgtctgtctctccaaattatacagatgcatagatagggcagtgttccaaggattatcacaggaagcattgtctgcctgcattcagtccttacttggagcgtcagagtctatcagcaaaaacaagactcagattgatggacaacttttcttaattaagcaccttttgatacttcgtgaacaaattgctccatttcacactgaattcaccattaaggaaatttccctggacctcaagaaaactagagatgcagcatttaaaatcctgaaccctatgactgtcccaagattttttaggctgaatagcaacaatgccttgatagagttcttgttggagggtactcctgagataagagaacattatcttgactctaaaaaagacgtagaccgtcatctgaaatcggcctgtgagcagtttattcagcagcagaccaagctgtttgtagaacagctggaggagttcatgacaaaggtttcagcgttaaaaacaatggccagtcagggaggccccaagtatactctctcacagcagccttgggcacaaccagcaaaggtcaatgaccttgcggcaactgcatataagacaataaaaacaaagctgcctgtgacattgagaagtatgtccttgtacctatccaataaagataccgagttcatcttgtttaaacctgtgaggaataatattcagcaagtcttccagaagttccacgctctgttaaaggaagagttcagccctgaagacatccagatcattgcctgtccatctatggaacagctgagccttctgctgttggtttctaaataagcaggccagccgggctgtgcacctaaatgtctgtctgggaggagcaggctgagaagtcttgcagtctgcaggacaccgaggaatcgtatgtgggaacgtccccgagaaccacacgagcgtgctgctcagtgctgactgcagaatgaaatagaagcaaagtgttacaggatcagtgttttcttttctaaaacatcaaaatgccaaagattaatctgtgattggtgataactgcctcgtttaaatggtcacaagaaatgtgaagagagagctagggcagacatgcagtgaaatggttctttgttaaaaatgtgcaataaaaatagattacaataagtagtgcaaagaactttacagaaatcaagcgaattagaaggcctgtaagagtaaggtttgctaaaacgtgaaacactgtaacacttttaaccactgagcattccacagtgaaatgttatttctatgctcttatttaatgtaatgtttctcctgtcatttttgaagttgagtttggagtagattggttgcttctgagaacacattctgccttcctgggaagtcggggtgtcatcctttcctctgtttgatgtgaggtagtttaaagatacaaggactttgtgtgaagctccagcatctgtgccccttgaattgcttaggtgcagacagttctaaagcaaggagctgcagcattctcatcatagatacgtgcagtatctttaatgagtatcttcatggtatgatagtgtgtgtttgtgagtgcgaagtaccaattaaggtgtcttaaatttggcgcatagaggagagaaggaaacctgaggagtagtgttcctcctgaatgaaggttcaggtcaccagccttctgtacactgcctttggttttagcagttctttgaaaagcaaacactttcatgtcctgtctattcattcagctggctgtgctgtgctgtggaccagctgtgtggatctctagcccagctacagcagaatacattttaccagcaaacctaaggatgacaaacactatccacatctgaaaactaccacaccatatcagggatcataaattatgcatatctatgaattttccaacaaattcctacttcctgattggattggttttgccgctgatgttaaggcagccagcttcttagttcaaaaagaattctgagtttttcaaacactagtctagaggtggacattgtcaggggttctggaatgggaccaggggaccttttggtgcagtgggtgcctgtaactcattagacgtactgaggcagcacttctgcagggtgcataccctgattgttgtcatttgtaacaggtcacttccttttcactcagtttaaattggtgatggacgttgcttgattgagcttattactctctattttgagaaggtagaaggtaagagggcccatattcattctttgccatgaaatgaatgaattaggaagattgtatttacttaactgttttttaaatacatgtttaatgaaataaactgtaaaatatccagttttgtgtattatatgtacatttgatttttaatagcctttccaaagaaatgagggcatgattattgtacagtaagtacgtgactgatttaatttgatttacagagcggagtgtgttcttataaaaatatttaatgacattggttcttgtcttttgatcttttatttctgaaacactcaaacaccttacaaagtgctgagtaggtaatagtgacccaacttgtttgctaaatgattatttgtttaaatctgtacagttttaagtgttcacttatacaaagagtgtatatactttcaaataatttaaaatgctttatattatttggctagaaattgctgtttttaataaatgtgaattttttaaaaataaagatttttgcttcctaccttg

SEQ ID NO: 221766 - DNA, 2487 bp, Artificial Sequence
  derived and/or modified sequence
atggccgaggccgccctgctgctgctgcccgaggccgccgccgagagagacgccagagagaagctggccctgtgggacagaagacccgacaccaccgcccccctgaccgacagacagaccgacagcgtgctggagctgaaggccgccgccgagaacctgcccgtgcccgccgagctgcccatcgaggacctgtgcagcctgaccagccagagcctgcccatcgagctgaccagcgtggtgcccgagagcaccgaggacatcctgctgaagggcttcaccagcctgggcatggaggaggagagaatcgagaccgcccagcagttcttcagctggttcgccaagctgcagacccagatggaccaggacgagggcaccaagtacagacagatgagagactacctgagcggcttccaggagcagtgcgacgccatcctgaacgacgtgaacagcgccctgcagcacctggagagcctgcagaagcagtacctgttcgtgagcaacaagaccggcaccctgcacgaggcctgcgagcagctgctgaaggagcagagcgagctggtggacctggccgagaacatccagcagaagctgagctacttcaacgagctggagaccatcaacaccaagctgaacagccccaccctgagcgtgaacagcgacggcttcatccccatgctggccaagctggacgactgcatcacctacatcagcagccaccccaacttcaaggactaccccatctacctgctgaagttcaagcagtgcctgagcaaggccctgcacctgatgaagacctacaccgtgaacaccctgcagaccctgaccagccagctgctgaagagagaccccagcagcgtgcccaacgccgacaacgccttcaccctgttctacgtgaagttcagagccgccgcccccaaggtgagaaccctgatcgagcagatcgagctgagaagcgagaagatccccgagtaccagcagctgctgaacgacatccaccagtgctacctggaccagagagagctgctgctgggccccagcatcgcctgcaccgtggccgagctgaccagccagaacaacagagaccactgcgccctggtgagaagcggctgcgccttcatggtgcacgtgtgccaggacgagcaccagctgtacaacgagttcttcaccaagcccaccagcaagctggacgagctgctggagaagctgtgcgtgagcctgtacgacgtgttcagacccctgatcatccacgtgatccacctggagaccctgagcgagctgtgcggcatcctgaagaacgaggtgctggaggaccacgtgcagaacaacgccgagcagctgggcgccttcgccgccggcgtgaagcagatgctggaggacgtgcaggagagactggtgtacagaacccacatctacatccagaccgacatcaccggctacaagcccgcccccggcgacctggcctaccccgacaagctggtgatgatggagcagatcgcccagagcctgaaggacgagcagaagaaggtgcccagcgaggccagcttcagcgacgtgcacctggaggagggcgagagcaacagcctgaccaagagcggcagcaccgagagcctgaaccccagaccccagaccaccatcagccccgccgacctgcacggcatgtggtaccccaccgtgagaagaaccctggtgtgcctgagcaagctgtacagatgcatcgacagagccgtgttccagggcctgagccaggaggccctgagcgcctgcatccagagcctgctgggcgccagcgagagcatcagcaagaacaagacccagatcgacggccagctgttcctgatcaagcacctgctgatcctgagagagcagatcgcccccttccacaccgagttcaccatcaaggagatcagcctggacctgaagaagaccagagacgccgccttcaagatcctgaaccccatgaccgtgcccagattcttcagactgaacagcaacaacgccctgatcgagttcctgctggagggcacccccgagatcagagagcactacctggacagcaagaaggacgtggacagacacctgaagagcgcctgcgagcagttcatccagcagcagaccaagctgttcgtggagcagctggaggagttcatgaccaaggtgagcgccctgaagaccatggccagccagggcggccccaagtacaccctgagccagcagccctgggcccagcccgccaaggtgaacgacctggccgccaccgcctacaagaccatcaagaccaagctgcccgtgaccctgagaagcatgagcctgtacctgagcaacaaggacaccgagttcatcctgttcaagcccgtgagaaacaacatccagcaggtgttccagaagttccacgccctgctgaaggaggagttcagccccgaggacatccagatcatcgcctgccccagcatggagcagctgagcctgctgctgctggtgagcaagtag

SEQ ID NO: 221767 - protein, 277 aa, Artificial Sequence
  derived and/or modified sequence
MASAGGEDCESPAPEADRPHQRPFLIGVSGGTASGKSTVCEKIMELLGQNEVEQRQRKVVILSQDRFYKVLTAEQKAKALKGQYNFDHPDAFDNDLMHRTLKNIVEGKTVEVPTYDFVTHSRLPETTVVYPADVVLFEGILVFYSQEIRDMFHLRLFVDTDSDVRLSRRVLRDVRRGRDLEQILTQYTTFVKPAFEEFCLPTKKYADVIIPRGVDNMVAINLIVQHIQDILNGDICKWHRGGSNGRSYKRTFSEPGDHPGMLTSGKRSHLESSSRPH

SEQ ID NO: 221768 - DNA, 834 bp, Artificial Sequence
  derived and/or modified sequence
atggccagcgccggcggcgaggactgcgagagccccgcccccgaggccgacagaccccaccagagacccttcctgatcggcgtgagcggcggcaccgccagcggcaagagcaccgtgtgcgagaagatcatggagctgctgggccagaacgaggtggagcagagacagagaaaggtggtgatcctgagccaggacagattctacaaggtgctgaccgccgagcagaaggccaaggccctgaagggccagtacaacttcgaccaccccgacgccttcgacaacgacctgatgcacagaaccctgaagaacatcgtggagggcaagaccgtggaggtgcccacctacgacttcgtgacccacagcagactgcccgagaccaccgtggtgtaccccgccgacgtggtgctgttcgagggcatcctggtgttctacagccaggagatcagagacatgttccacctgagactgttcgtggacaccgacagcgacgtgagactgagcagaagagtgctgagagacgtgagaagaggcagagacctggagcagatcctgacccagtacaccaccttcgtgaagcccgccttcgaggagttctgcctgcccaccaagaagtacgccgacgtgatcatccccagaggcgtggacaacatggtggccatcaacctgatcgtgcagcacatccaggacatcctgaacggcgacatctgcaagtggcacagaggcggcagcaacggcagaagctacaagagaaccttcagcgagcccggcgaccaccccggcatgctgaccagcggcaagagaagccacctggagagcagcagcagaccccactag

SEQ ID NO: 221769 - DNA, 834 bp, Artificial Sequence
  derived and/or modified sequence
atggcaagcgccggcggtgaggattgtgaatcacctgccccagaggcagatcgcccacatcagcggccttttttgattggtgtgagcggaggaactgcatccggcaagagcacggtgtgcgaaaagataatggagctgttggggcagaatgaagtggagcagcggcagagaaaagtcgttatcttgagccaggacaggttctacaaagtcttaactgcggagcagaaggccaaagcacttaaaggccaatacaatttcgaccaccccgatgctttcgacaatgacctgatgcatagaaccctgaaaaacatagtcgaggggaaaacagtggaggtccctacctatgatttcgtaacacactctaggctgccagagactacagttgtttatccagccgatgtggtgctgttcgagggaatcctggtgttctatagtcaggagatccgagatatgtttcatctgcgtctcttcgtggataccgacagcgatgtgaggctctctaggcgcgtcctcagggatgttcggcgaggtagagacctcgaacagatcctaacgcagtacactacttttgtcaagccggcttttgaagagttctgcctcccaactaagaagtatgccgatgtcattatcccccgcggcgttgacaacatggtggccattaatctgatagtgcagcatatacaggacattttaaatggcgacatttgcaagtggcacagagggggcagtaacggcaggtcttacaaaaggacattcagtgaaccaggcgaccaccccggtatgctgactagcgggaaacgttcgcacctggagtcctcatccaggcctcattag

SEQ ID NO: 221770 - DNA, 834 bp, Artificial Sequence
  derived and/or modified sequence
atggccagcgctggaggagaggactgtgagagccctgcccctgaggccgaccggccccaccagaggcccttcctgattggagtgtctgggggcacagccagcggcaagagcacagtgtgtgagaagatcatggagctgctgggccagaatgaggtggagcagaggcagaggaaggtggtgatcctgagccaggaccgcttctacaaggtgctgacagctgagcagaaggccaaggccctgaagggccagtacaactttgaccacccagatgcctttgacaatgacctgatgcacaggaccctgaagaacatcgtggagggcaagacagtggaggtgcccacctatgactttgtgacccacagccggctgcctgagaccaccgtggtgtacccagcagatgtggtgctgtttgagggcatcctggtgttctacagccaggagatccgggacatgttccacctgcggctgtttgtggacacagacagtgatgtgcggctgagccggcgggtgctgagagatgtgagaagaggccgggacctggagcagatcctgacccagtacaccacctttgtgaagccagcctttgaggagttctgcctgcccaccaagaagtatgcagatgtgatcatcccccggggcgtggacaacatggtggccatcaacctgattgtgcagcacatccaggacatcctgaatggagacatctgcaagtggcacagaggaggcagcaatggccgcagctacaagaggaccttcagcgagcccggggaccaccctggcatgctgaccagcggcaagaggagccacctggagagcagcagccggccccactag

SEQ ID NO: 221771 - DNA, 834 bp, Artificial Sequence
  derived and/or modified sequence
atggccagcgccggcggcgaggactgcgagagccccgcccccgaggcagaccggccacatcagcggccgttcctcatcggcgtatccggaggcactgcctctggcaagagtactgtctgtgaaaaaattatggagttactcgggcagaacgaggtcgagcagcggcagaggaaggtggttatcctcagccaagatcgtttttataaagtgctgacagctgagcagaaagctaaggcgttgaagggtcagtacaatttcgaccatcccgacgcattcgataacgatttgatgcacaggaccctaaagaatatcgttgagggaaagacagtcgaggtccccacatatgactttgtgacccacagcagattgccagaaaccactgtcgtatatccagccgatgtggtcctgttcgagggcattctggtcttttacagccaggaaattcgcgatatgttccacctgcgtctttttgtggatacggatagcgacgtgcgactcagccgcagggttcttcgcgacgtgaggaggggccgggacttggagcaaatcctgacccagtacactaccttcgtgaagcctgcttttgaggagttttgtctaccaacgaagaagtatgcggacgtaataatccccaggggcgtcgataacatggtggccatcaatctgattgttcagcatatacaggatatcttgaacggcgatatatgcaagtggcacaggggtggctctaacggtcgctcctacaaacgaaccttcagtgagcctggagaccaccccggaatgcttacaagcggaaaacgaagtcacctggagtcatcctcaaggccccattag

SEQ ID NO: 221772 - DNA, 834 bp, Artificial Sequence
  derived and/or modified sequence
atggcaagcgccggaggggaggactgcgagtctccagcacctgaagccgatcgccctcatcagcggccattcttgataggcgtgtctgggggaactgcctctgggaaaagcacagtgtgtgagaagattatggagttgctgggccagaacgaagttgaacagcggcagaggaaagtcgttattctctctcaggacagattttacaaagttctgacagctgaacagaaagccaaagctctgaagggccagtacaacttcgaccaccccgacgcctttgataatgatcttatgcataggacactcaagaacattgtcgagggcaagaccgtggaagtccccacttatgatttcgtgacgcattctagactccccgagacaacggtcgtgtatccagctgatgtggtcctgtttgagggcattctggtattctatagtcaggagatccgtgacatgtttcaccttcggctttttgtggatacagacagtgacgtaagactgtcaaggcgggtccttagggatgtccgacgcggacgggatcttgagcagattttgacccaatacacaacatttgtgaaacctgccttcgaagagttctgcctccccacaaagaagtacgccgacgttataattccacgaggagtggataacatggtggccattaacctgattgtgcagcatattcaagatatcttgaatggggatatctgtaaatggcacagggggggatccaacggaagaagctacaaacgcacgttttcggagccgggtgatcaccccggtatgctgaccagcggtaagcgatcgcacctggagtccagttcacgtcctcactag

SEQ ID NO: 221773 - DNA, 2167 bp, Artificial Sequence
  derived and/or modified sequence
gctccggttgcctccgacctcggcgctgggcgggcgcgccgggcctggggaaggggcgggcgcggggacccgatgcgcgggagcggaggccgagatggcttcggcgggaggcgaagactgcgagagccccgcgccggaggccgaccgtccgcaccagcggcccttcctgataggggtgagcggcggcactgccagcgggaagtcgaccgtgtgtgagaagatcatggagttgctgggacagaacgaggtggaacagcggcagcggaaggtggtcatcctgagccaggacaggttctacaaggtcctgacggcagagcagaaggccaaggccttgaaaggacagtacaattttgaccatccagatgcctttgataatgatttgatgcacaggactctgaagaacatcgtggagggcaaaacggtggaggtgccgacctatgattttgtgacacactcaaggttaccagagaccacggtggtctaccctgcggacgtggttctgtttgagggcatcttggtgttctacagccaggagatccgggacatgttccacctgcgcctcttcgtggacaccgactccgacgtcaggctgtctcgaagagttctccgggacgtgcgccgagggagggacctggagcagattctgacgcagtacaccaccttcgtgaagccggccttcgaggagttctgcctgccgacaaagaagtatgccgatgtgatcatcccgcgaggagtggacaatatggttgccatcaacctgatcgtgcagcacatccaggacattctgaatggtgacatctgcaaatggcaccgaggagggtccaatgggcggagctacaagcggaccttttctgagccaggggaccaccctgggatgctgacctctggcaaacggtcacatttggagtccagcagcagaccccactgaggggctgccgagcctcagggcaggtctcccgcccggcatgtgtgttcagggactgagcctggggacgcccacccacacccactgcttcctctcggcgcaccccaggggagtgttagcagcgaggccttcctcactcaggagtggaaactcagatgtgtcactcagactcaacttgctgggacactgacaggcgttcctgaggttttcagccacttaggctcgttgcggtttaaagatccctctaggtcactgagaaatgccacagaatgtgcaggaagcctgggaggcttctgtgaggaatgtgaggcacattattggggaaattgaggagacagcctagacactggctggcctgatgttttgttgacagtgaacccacagtgggagagagttttttccagtctgatctggttcttacacactcacacacataactcaaaagttttgtgaacaagtactttccttttttacatgttacatgtcctcatgttttctgttttctgtttcataacacaaggctggttgtggcctacaaacctaatttcatgacccagtggtttgcagtccagcgtggcctacacggatatggggagccactgagggatgttttccccccttgcttgtgccttaaaggcagagaagcgaggcggatgccctggaagcacccagcatcacacccaggcttgtgcggggccaggctgggagcccatgcagtagggcagaaggcagcggaggccaggtctgtcccggctggagaacagcgtccacgcagtcctgcctggggtcaggccctcactgaccctcaggggagcccccaaggtgctgtctgtctagacaggctgtcccaccccagggtggctagtggccatatgcagggaatggtgcttctggctgtggcacgcactggatcacccaggtcccagcagacatggccgcccaaagtcagcaagcctcctttgtgctatgtggagctcacagcctcacatgtgaacacccgtgtctgggttgcctggggtgatcctccctcctgcgtggtggctgtctctggaaagcatcccttgccgctgccatgggcagccccagcccccgtccgtccaggctcacccacagtagtgatgcagacgtgacgtgggggaagggggctgagccctgtggctgggttctgacaactgtaacggttttgtcgagcttaggcccctttggagggagaatcaataaataacaaacaccaactacaaa

SEQ ID NO: 221774 - protein, 579 aa, Artificial Sequence
  derived and/or modified sequence
MKDFSDVILCMEATESSKTEFCNPAFEPESGPPCPPPVFPEDASYSVPAPWHGRRPRGLRPDCRFSWLCVLLLSSLLLLLLGLLVAIILAQLQAAPPSGASHSPLPAGGLTTTTTTPTITTSQAAGTPKGQQESGVSPSPQSTCGGLLSGPRGFFSSPNYPDPYPPNTHCVWHIQVATDHAIQLKIEALSIESVASCLFDRLELSPEPEGPLLRVCGRVPPPTLNTNASHLLVVFVSDSSVEGFGFHAWYQAMAPGRGSCAHDEFRCDQLICLLPDSVCDGFANCADGSDETNCSAKFSGCGGNLTGLQGTFSTPSYLQQYPHQLLCTWHISVPAGHSIELQFHNFSLEAQDECKFDYVEVYETSSSGAFSLLGRFCGAEPPPHLVSSHHELAVLFRTDHGISSGGFSATYLAFNATENPCGPSELSCQAGGCKGVQWMCDMWRDCTDGSDDNCSGPLFPPPELACEPVQVEMCLGLSYNTTAFPNIWVGMITQEEVVEVLSGYKSLTSLPCYQHFRRLLCGLLVPRCTPLGSVLPPCRSVCQEAEHQCQSGLALLGTPWPFNCNRLPEAADLEACAQP

SEQ ID NO: 221775 - DNA, 1740 bp, Artificial Sequence
  derived and/or modified sequence
atgaaggacttcagcgacgtgatcctgtgcatggaggccaccgagagcagcaagaccgagttctgcaaccccgccttcgagcccgagagcggccccccctgccccccccccgtgttccccgaggacgccagctacagcgtgcccgccccctggcacggcagaagacccagaggcctgagacccgactgcagattcagctggctgtgcgtgctgctgctgagcagcctgctgctgctgctgctgggcctgctggtggccatcatcctggcccagctgcaggccgccccccccagcggcgccagccacagccccctgcccgccggcggcctgaccaccaccaccaccacccccaccatcaccaccagccaggccgccggcacccccaagggccagcaggagagcggcgtgagccccagcccccagagcacctgcggcggcctgctgagcggccccagaggcttcttcagcagccccaactaccccgacccctacccccccaacacccactgcgtgtggcacatccaggtggccaccgaccacgccatccagctgaagatcgaggccctgagcatcgagagcgtggccagctgcctgttcgacagactggagctgagccccgagcccgagggccccctgctgagagtgtgcggcagagtgcccccccccaccctgaacaccaacgccagccacctgctggtggtgttcgtgagcgacagcagcgtggagggcttcggcttccacgcctggtaccaggccatggcccccggcagaggcagctgcgcccacgacgagttcagatgcgaccagctgatctgcctgctgcccgacagcgtgtgcgacggcttcgccaactgcgccgacggcagcgacgagaccaactgcagcgccaagttcagcggctgcggcggcaacctgaccggcctgcagggcaccttcagcacccccagctacctgcagcagtacccccaccagctgctgtgcacctggcacatcagcgtgcccgccggccacagcatcgagctgcagttccacaacttcagcctggaggcccaggacgagtgcaagttcgactacgtggaggtgtacgagaccagcagcagcggcgccttcagcctgctgggcagattctgcggcgccgagccccccccccacctggtgagcagccaccacgagctggccgtgctgttcagaaccgaccacggcatcagcagcggcggcttcagcgccacctacctggccttcaacgccaccgagaacccctgcggccccagcgagctgagctgccaggccggcggctgcaagggcgtgcagtggatgtgcgacatgtggagagactgcaccgacggcagcgacgacaactgcagcggccccctgttccccccccccgagctggcctgcgagcccgtgcaggtggagatgtgcctgggcctgagctacaacaccaccgccttccccaacatctgggtgggcatgatcacccaggaggaggtggtggaggtgctgagcggctacaagagcctgaccagcctgccctgctaccagcacttcagaagactgctgtgcggcctgctggtgcccagatgcacccccctgggcagcgtgctgcccccctgcagaagcgtgtgccaggaggccgagcaccagtgccagagcggcctggccctgctgggcaccccctggcccttcaactgcaacagactgcccgaggccgccgacctggaggcctgcgcccagccctag

SEQ ID NO: 221776 - DNA, 1740 bp, Artificial Sequence
  derived and/or modified sequence
atgaaggacttttcggacgtcatcctgtgtatggaagctaccgaaagtagcaagaccgaattttgcaaccctgcctttgaacccgagtcagggcccccttgcccgcctcctgtcttcccagaggacgccagctattccgtgcccgcgccttggcatggccgaaggcccagaggcttacgtccagactgtaggttctcctggctgtgcgttctcctgctctccagcctcctcctgttgctgctgggcctgctggtggcgataattctggcacaactgcaggcagcacctcccagcggagcaagccactccccactacctgctgggggcttgaccactaccacaaccacacctacaatcactacgtcacaggcagctggaacccctaagggacagcaggaatctggggttagtccctctcctcaaagcacatgtggtggtctcctgtccggtcctcgcggtttcttttctagccctaactaccccgacccgtacccaccaaacacacactgcgtgtggcacattcaggtggccacagaccacgcgatccaactaaagatcgaagcactctctatcgagagcgtcgccagttgtctgttcgatagattagagctgagccccgagccagagggcccgttgctgcgtgtttgcggtcgtgtgccccctcctacgctgaatacaaacgcatctcatttactggttgtgtttgtttctgactcctccgttgagggctttggtttccacgcatggtatcaggccatggcgcccggtcggggctcctgtgcccacgatgagttccggtgtgaccagctcatctgcttgctgccagactccgtttgcgatgggttcgctaattgcgccgatggaagtgatgaaaccaactgttctgcaaagttcagcggctgcggaggcaacctaacaggcttgcagggaaccttttccacaccctcctatctgcagcagtatcctcaccagctgctctgtacatggcacataagcgtgcccgcggggcactctatagaacttcagtttcacaatttcagcctagaggcacaggatgaatgcaagtttgactatgtggaagtctacgagaccagctccagtggagcattcagcttactggggcgcttttgcggggctgagcccccgccccatctcgtgtcgtcccatcatgagctcgccgtccttttccgcactgaccacggaatctcgtccggaggattctctgccacctacttggcctttaacgcaaccgagaacccatgtggtccttctgagctgtcttgtcaggctgggggctgtaaaggagtccaatggatgtgcgatatgtggcgggactgcactgacggaagtgacgacaactgctctggtcccttgtttcctccccctgagctcgcttgtgagcctgtgcaggtggagatgtgtttgggcctcagctataataccacggctttcccaaacatctgggtggggatgattacacaggaggaagtagtagaagtgctctcagggtacaagagcctgacttcccttccttgctaccagcacttccgtcgcctcctgtgcggactgctcgtccccaggtgcacaccacttggaagcgtcttacctccctgcaggagtgtatgtcaggaggctgagcaccaatgtcaatccgggctagccctcctcggtaccccttggcctttcaattgcaatcgactacccgaggccgccgacctggaagcttgcgcccagccctag

SEQ ID NO: 221777 - DNA, 1740 bp, Artificial Sequence
  derived and/or modified sequence
atgaaagatttcagcgacgttattctgtgcatggaggcgaccgagtcatccaagactgaattttgcaaccccgctttcgagcctgaaagcgggcccccctgcccgccccctgttttccccgaggatgcctcttacagcgtccccgccccatggcacgggaggagaccacgcggcttacgtccagactgccggttttcttggctctgtgttcttttgctctcctcactgcttttgctgcttctgggattgctggttgccatcatcctggcccagctgcaagctgcacccccgtcaggggccagccatagcccgcttccagctggcggtctgactacaacaacaacgacaccaacgatcaccacctctcaggcggccgggacgccgaagggccagcaggaatcaggggtgagcccatcaccgcaaagtacctgtggtggactcctcagtggtccaagaggttttttctcctctccgaactatccagatccatatccacccaatacccattgcgtctggcacattcaggtggcaacagaccacgcaatacagctgaaaatcgaggcactctctattgaaagcgtcgcttcgtgcctgtttgatcggctggaactgtctccagaaccagaggggccactgctgagagtgtgcggccgagtccccccccctacactcaatacaaatgccagccacctcttagtagtgtttgtctccgactcctcagtggagggcttcggctttcatgcatggtatcaggctatggcccccgggcggggttcgtgtgcacacgacgaattcagatgtgaccagctcatttgccttctgcccgatagcgtgtgtgacgggtttgcaaactgcgccgatgggtcagatgagactaattgtagtgctaagttctcagggtgcggcgggaatttaaccggcctccaagggactttctccacgccaagctatctccagcagtaccctcatcaactgctttgcacttggcacatcagcgtcccagctgggcattcaattgagctccagtttcacaatttctctctggaagcacaagatgagtgcaaatttgactacgttgaagtctatgaaacaagtagctctggggccttctccctgttgggaaggttttgcggagccgagccccctccacacctggtttcaagtcatcacgagcttgcagttttgttcaggaccgaccacggaattagctctggagggttctcagctacttacctggcatttaacgctaccgaaaatccctgtggtcccagtgaactttcatgccaggcaggggggtgtaaaggcgtgcaatggatgtgcgacatgtggcgagattgcaccgatggaagtgatgacaattgttcgggacccttgtttcctcctcctgagctggcctgtgagccagttcaggtggaaatgtgcctgggcctatcttacaacaccaccgccttccctaatatctgggtggggatgatcacgcaggaagaagtggtagaagtcctgtctggctataaatccctcacctccttaccctgttaccagcactttcgcagactgctctgcgggctgttagtacctcgttgcactccgcttgggagcgtgcttcctccttgccgatcggtgtgccaagaggccgaacaccagtgtcagtcagggttagccctgttgggaacaccctggccattcaactgcaataggctgcctgaagcagcagacttggaggcctgtgctcagccctag

SEQ ID NO: 221778 - DNA, 1740 bp, Artificial Sequence
  derived and/or modified sequence
atgaaggacttcagtgatgtgatcctgtgcatggaggccacagagagcagcaagacagagttctgcaacccagcctttgagcctgagagcggccccccctgccccccacctgtgtttcctgaagatgccagctacagcgtgcctgccccctggcacggccggcggccccggggcctgcggccagactgccgcttctcctggctgtgtgtgctgctgctgagcagcctgctgctgctgctgctgggcctgctggtggccatcatcctggcccagctgcaggccgccccacccagcggggccagccacagccccctgcctgctgggggcctgaccaccaccaccaccacccccaccatcaccaccagccaggccgccggcacccccaagggccagcaggagagcggcgtgagccccagcccccagagcacctgtggcggcctgctgagcggcccccggggcttcttcagcagccccaactacccagacccctacccacccaacacccactgtgtgtggcacatccaggtggccacagaccacgccatccagctgaagattgaggccctgagcattgaatctgtggccagctgcctgtttgaccggctggagctgagccctgagcctgagggccccctgctgcgggtgtgtggccgggtgcccccacccaccctgaacaccaatgccagccacctgctggtggtgtttgtgtctgacagctctgtggagggcttcggcttccacgcctggtaccaggccatggcccctggccggggcagctgtgcccatgatgagttccgctgtgaccagctgatctgcctgctgcctgattctgtgtgtgatggctttgccaactgtgctgatggcagtgatgagaccaactgcagcgccaagttcagcggctgcggcggcaacctgaccggcctgcagggcaccttcagcacccccagctacctgcagcagtacccccaccagctgctgtgcacctggcacatctctgtgcctgctggccacagcattgagctgcagttccacaacttcagcctggaggcccaggatgagtgcaagtttgattatgtggaggtgtatgagaccagcagcagcggggccttcagcctgctgggccgcttctgtggggctgagcccccaccccacctggtgagcagccaccacgagctggccgtgctcttcagaacagaccacggcatcagcagcggcggcttcagcgccacctacctggccttcaatgccacagagaacccctgtggccccagcgagctgagctgccaggccggcggctgcaagggcgtgcagtggatgtgtgacatgtggagggactgcacagatggcagtgatgacaactgcagcggccccctcttccccccacctgagctggcctgtgagcctgtgcaggtggagatgtgcctgggcctgagctacaacaccacagccttccccaacatctgggtgggcatgatcacccaggaggaggtggtggaggtgctgagcggctacaagagcctgaccagcctgccctgctaccagcacttccggcggctgctgtgtggcctgctggtgccccgctgcacccccctgggctctgtgctgcccccctgccgctctgtgtgccaggaggccgagcaccagtgccagagcggcctggccctgctgggcaccccctggcccttcaactgcaaccggctgcctgaggccgctgacctggaggcctgtgcccagccctag

SEQ ID NO: 221779 - DNA, 2280 bp, Artificial Sequence
  derived and/or modified sequence
actctaccaaggacagcccaagaactggtctagcctggcagccttttccctcgggtagtagaggctgcccctctgacagggagtttgtggtcagcgagtgggcccttgggggtcttgggctgtcacagggactccagaaagccatgcagagccttgtgccatgaaggacttctcagatgtcatcctctgcatggaggcaacagaatcgagcaagaccgagttctgcaatcctgccttcgagcctgagtctgggccaccctgccctcccccagttttcccagaggatgccagctacagcgtcccagctccctggcatggtcggcgtcctcgagggctacggccagactgccgcttctcctggctctgtgtcctcctgctctccagcctgctcctcctgctgcttgggctgctggtggccatcatcctggcccagctgcaggctgcacccccatctggggcgtcccatagcccactgcctgccggaggccttaccacgaccaccaccacccccaccatcaccacctctcaggcagctgggacccctaaagggcagcaggagtcaggcgtgagcccctccccacagtccacctgtggaggcctcctctctggcccaaggggcttcttcagcagccctaactacccagacccttacccccccaacacccactgcgtgtggcatatccaggtggccacagaccatgcaatacagctcaagatcgaagccctcagcatagagagtgtggcctcttgcctttttgatcgcttggaactctcccctgagcctgaaggccccctcctcagggtttgtggaagggtgcctccccccacgctcaacaccaatgccagccacctcctggtggtcttcgtctctgacagcagtgtggaaggatttggtttccatgcctggtaccaggctatggcccctgggcgcgggagctgtgcccatgatgagttccgctgtgaccagctcatctgcctgctacctgactcagtgtgtgatggttttgccaactgtgctgacggcagtgatgagaccaattgcagtgccaagttctcggggtgtggggggaatctgactggcctccagggcactttctctactcccagctacctgcagcagtaccctcaccaactgctctgcacctggcatatctcggtgcctgccggacacagcatagaactacagttccacaacttcagcctggaggctcaggacgagtgcaagtttgactacgtggaggtgtatgagaccagcagctcaggggccttcagcctcctgggcaggttctgtggagcagagccacccccccacctcgtctcctcgcaccatgagctggctgtgctgtttaggacagatcatggcatcagcagtggaggcttctcagccacctacctggccttcaatgccacggagaacccctgtgggcccagtgagctctcctgccaggcaggagggtgtaagggtgtgcagtggatgtgtgacatgtggagagactgcaccgatggcagcgatgacaactgcagcggccccttgttcccacccccagagctggcctgtgagcctgtccaggtggagatgtgcctcggtctgagctacaacaccacagccttccctaacatctgggtgggcatgatcacccaggaggaggtggtagaggtcctcagcggttacaagagcctgacaagcctgccctgctaccagcatttccggaggctcctgtgtgggctgcttgtgccccgttgcaccccactaggcagtgttctgcccccttgccgctctgtctgccaggaagcggagcaccagtgccagtctggcctggcactactgggcaccccctggcccttcaactgcaacaggctgccagaggcagctgacctggaagcttgtgcccagccctgaccctgaagccggcccctgccctcttcctgcccgtcctcttttgccggtcagggctggcacgcaggggaacaaaggaaggagcatcagcagggtctctacccatccttctctggggctcccagggagggggaagagaagtcctcagctggggctcatgggaccctaccaccctccctgctccttcctgtccctttaccggtcccaggctgctgactggccccacactgtgccaccggacaatcgagaccacttcccatccaggcctcttcccctttccatctgctttttcagcttctccatcgcctgccttctgaccttttccttgattcaacaaaaatgtactgagcatctattcatgtggcaggcccctgtcctaggcc

SEQ ID NO: 221780 - DNA, 3917 bp, Artificial Sequence
  derived and/or modified sequence
actctaccaaggacagcccaagaactggtctagcctggcagccttttccctcgggtagtagaggctgcccctctgacagggagtttgtggtcagcgagtgggcccttgggggtcttgggctgtcacagggactccagaaagccatgcagagccttgtgccatgaaggacttctcagatgtcatcctctgcatggaggcaacagaatcgagcaagaccgagttctgcaatcctgccttcgagcctgagtctgggccaccctgccctcccccagttttcccagaggatgccagctacagcgtcccagctccctggcatggtcggcgtcctcgagggctacggccagactgccgcttctcctggctctgtgtcctcctgctctccagcctgctcctcctgctgcttgggctgctggtggccatcatcctggcccagctgcaggctgcacccccatctggggcgtcccatagcccactgcctgccggaggccttaccacgaccaccaccacccccaccatcaccacctctcaggcagctgggacccctaaagggcagcaggagtcaggcgtgagcccctccccacagtccacctgtggaggcctcctctctggcccaaggggcttcttcagcagccctaactacccagacccttacccccccaacacccactgcgtgtggcatatccaggtggccacagaccatgcaatacagctcaagatcgaagccctcagcatagagagtgtggcctcttgcctttttgatcgcttggaactctcccctgagcctgaaggccccctcctcagggtttgtggaagggtgcctccccccacgctcaacaccaatgccagccacctcctggtggtcttcgtctctgacagcagtgtggaaggatttggtttccatgcctggtaccaggctatggcccctgggcgcgggagctgtgcccatgatgagttccgctgtgaccagctcatctgcctgctacctgactcagtgtgtgatggttttgccaactgtgctgacggcagtgatgagaccaattgcagtgccaagttctcggggtgtggggggaatctgactggcctccagggcactttctctactcccagctacctgcagcagtaccctcaccaactgctctgcacctggcatatctcggtgcctgccggacacagcatagaactacagttccacaacttcagcctggaggctcaggacgagtgcaagtttgactacgtggaggtgtatgagaccagcagctcaggggccttcagcctcctgggcaggttctgtggagcagagccacccccccacctcgtctcctcgcaccatgagctggctgtgctgtttaggacagatcatggcatcagcagtggaggcttctcagccacctacctggccttcaatgccacggagaacccctgtgggcccagtgagctctcctgccaggcaggagggtgtaagggtgtgcagtggatgtgtgacatgtggagagactgcaccgatggcagcgatgacaactgcagcggccccttgttcccacccccagagctggcctgtgagcctgtccaggtggagatgtgcctcggtctgagctacaacaccacagccttccctaacatctgggtgggcatgatcacccaggaggaggtggtagaggtcctcagcggttacaagagcctgacaagcctgccctgctaccagcatttccggaggctcctgtgtgggctgcttgtgccccgttgcaccccactaggcagtgttctgcccccttgccgctctgtctgccaggaagcggagcaccagtgccagtctggcctggcactactgggcaccccctggcccttcaactgcaacaggctgccagaggcagctgacctggaagcttgtgcccagccctgaccctgaagccggcccctgccctcttcctgcccgtcctcttttgccggtcagggctggcacgcaggggaacaaaggaaggagcatcagcagggtctctacccatccttctctggggctcccagggagggggaagagaagtcctcagctggggctcatgggaccctaccaccctccctgctccttcctgtccctttaccggtcccaggctgctgactggccccacactgtgccaccggacaatcgagaccacttcccatccaggcctcttcccctttccatctgctttttcagcttctccatcgcctgccttctgaccttttccttgattcaacaaaaatgtactgagcatctattcatgtggcaggcccctgtcctaggccctagggatccaactggctgtctgcctctagaactctccaccctcatctctctgcgtatttctccctgaaatggggtctggtccttggtctctgccactgccctgcctctcctctggccctgggaacaggaggtgccctgtgtgtccgtctctcgaagttctgcctctctgtgcccagctcaagtctctctccccctcctttctccccctaaactttggccggccgccgggcgacaccacgagttatttcccagctatttcccggtccgggagctcttggcccctgaacaactggtttcctcttggagtctgggaggaggaaagcggagccggcagggagcgaaccaggactggggtgacggcagggcagggggcgcctggccggggagaagcgcgggggctggagcaccaccaactggagggtccggagtagcgagcgccccgaaggaggccatcggggagccgggaggggggactgcgagaggaccccggcgtccgggctcccggtgccagcgctatgaggccactcctcgtcctgctgctcctgggcctggcggccggctcgcccccactggacgacaacaagatccccagcctctgcccggggcaccccggccttccaggcacgccgggccaccatggcagccagggcttgccgggccgcgatggccgcgacggccgcgacggcgcgcccggggctccgggagagaaaggcgagggcgggaggccgggactgccgggacctcgaggggaccccgggccgcgaggagaggcgggacccgcggggcccaccgggcctgccggggagtgctcggtgcctccgcgatccgccttcagcgccaagcgctccgagagccgggtgcctccgccgtctgacgcacccttgcccttcgaccgcgtgctggtgaacgagcagggacattacgacgccgtcaccggcaagttcacctgccaggtgcctggggtctactacttcgccgtccatgccaccgtctaccgggccagcctgcagtttgatctggtgaagaatggcgaatccattgcctctttcttccagtttttcggggggtggcccaagccagcctcgctctcggggggggccatggtgaggctggagcctgaggaccaagtgtgggtgcaggtgggtgtgggtgactacattggcatctatgccagcatcaagacagacagcaccttctccggatttctggtgtactccgactggcacagctccccagtctttgcttagtgcccactgcaaagtgagctcatgctctcactcctagaaggagggtgtgaggctgacaaccaggtcatccaggagggctggcccccctggaatattgtgaatgactagggaggtggggtagagcactctccgtcctgctgctggcaaggaatgggaacagtggctgtctgcgatcaggtctggcagcatggggcagtggctggatttctgcccaagaccagaggagtgtgctgtgctggcaagtgtaagtcccccagttgctctggtccaggagcccacggtggggtgctctcttcctggtcctctgcttctctggatcctccccaccccctcctgctcctggggccggcccttttctcagagatcactcaataaacctaagaaccctc

SEQ ID NO: 221781 - DNA, 1740 bp, Artificial Sequence
  derived and/or modified sequence
atgaaggacttcagcgacgtgatcctgtgcatggaggccaccgagagtagtaaaacagagttttgtaatccggcattcgaacccgaatcaggtcccccatgccctccccccgtgttccctgaagacgcatcatactctgtgcctgccccttggcacggcagacgcccaagaggactccggccggactgccgcttttcttggttgtgtgtcctcctgttgtcctcccttctgctgttgttgctgggattattagtcgctattatcttggctcaacttcaggcagcccctcctagtggcgcctctcacagtccccttcccgcgggaggcctgacgactacaaccaccactccaacaatcacaactagtcaagctgcgggtactcctaaaggccaacaggaatctggggtttctccaagcccgcagtcaacatgcggcggattgctcagtggtccaaggggattcttctcgtcgcctaactaccccgacccgtacccaccgaatactcactgtgtctggcacatacaggtcgctaccgaccacgcgatccaattgaaaattgaagcactgtctatcgagtcagtcgcatcctgcctctttgaccgtcttgaactgtctcctgagcctgaaggaccattgctccgtgtgtgtggccgcgtccctccccccactctcaataccaacgcatcccatctcttggtggtgtttgtgagcgatagcagcgtcgaggggtttgggttccacgcctggtaccaggcgatggctcctggacgcggcagttgcgcacacgatgagttccggtgcgatcagctgatatgtctcctgccagacagcgtatgtgacgggttcgcaaactgtgctgacggatcagacgaaacaaattgctctgcaaagttttcaggatgcggcggaaatctgaccggactgcaagggaccttctctactccctcttatcttcagcaatatccccatcagctgttgtgcacgtggcacatttctgtgcccgccggccattcaatcgagctgcagttccacaacttcagtctggaagcgcaggacgaatgtaagttcgattacgttgaggtttacgagacaagctctagcggcgcgttcagcttgcttgggcgcttttgcggagccgaaccacctccacatctggtgagcagccatcacgagctcgctgtgctgtttaggactgatcatgggattagctccggagggttttccgctacgtacctcgccttcaacgcaacggaaaacccctgcggtcccagcgagctatcttgtcaggcaggtgggtgtaaaggcgtacaatggatgtgtgatatgtggcgcgactgcacggatggaagtgacgacaactgtagcggtcccctctttccacctccagaactcgcctgcgaacccgtgcaggtggaaatgtgtttaggactgtcctacaataccactgctttcccaaacatctgggtcggcatgatcacacaagaggaggtggtggaggtgttgagcggctacaagagtctcacttcgcttccctgttatcagcactttaggaggttgctctgcggcctgttagtgcctcgctgcacccctctgggatctgtgctacctccctgcagatctgtgtgtcaggaggcagaacatcagtgccagagtggtctggctttgttgggaaccccttggccctttaattgtaacagactgcctgaggccgccgacctggaagcctgcgcccagccctag

SEQ ID NO: 221782 - DNA, 1740 bp, Artificial Sequence
  derived and/or modified sequence
atgaaggacttcagcgacgtgatcctgtgcatggaggccaccgagtcctccaagacggaattctgcaatcccgcattcgagcccgagtcgggtcccccgtgtccaccccccgtctttccagaagacgcttcgtatagcgttccagctccctggcacggccggcgccctcgcggcctgagaccagattgtcgcttctcctggctgtgcgtgttactcctgtcgagcctgctccttctgttgcttggcctgctggtggctataattctcgcacaattgcaagctgccccacctagtggggcctctcacagccccctaccagccggcgggctaactactactacgacaacccctaccattacaacctcacaggctgctggcaccccgaaggggcaacaggaaagtggcgtgagccctagtccgcagtccacctgcggtgggctcttaagtgggcccagaggcttcttcagttctcctaattatccagacccttatcctccaaacacgcattgcgtgtggcacatacaggtggctaccgatcacgctattcaactgaagatagaggccttgtcgatcgagagcgtggcatcttgtctctttgaccgcttagagctttcccccgaaccagaaggacctctcttgcgggtttgcggcagagtccctcctcctactctgaatacaaatgcaagccatttgttggttgtgttcgtgtctgatagctcagtagagggcttcgggtttcacgcctggtaccaggccatggcgcccgggcgtggttcctgtgcccacgacgaattccgctgtgaccagctgatctgtctgctgccagactctgtgtgcgatggctttgccaactgtgctgatgggtccgacgaaaccaactgctctgctaaattcagcgggtgtgggggaaatcttaccggtcttcagggcacatttagcaccccttcctacctgcagcaatacccacatcagctgctctgtacttggcacatttccgtgcctgccggccactccatcgaattacagtttcataatttttccctggaggcccaggatgaatgtaaattcgattatgtagaggtgtacgagaccagcagcagcggagcattctcactgcttgggcgattttgcggcgcagagccacccccacatctggtgagtagtcaccatgagctagcggtgctgttcagaacggaccacggcatctcatctggcggcttctccgccacttacctcgccttcaacgcaaccgaaaacccctgcggtccatccgaactgtcctgccaggccggaggctgcaaaggagtgcagtggatgtgtgatatgtggcgggattgtaccgacggctctgatgacaactgttcaggccctctgttccctcctcccgaactcgcttgcgaaccagtgcaggtggagatgtgtctgggcctgagctacaacactaccgcctttccaaacatctgggtgggcatgatcacccaggaggaggtagtggaagtactgagcgggtacaagagcttgacttcactgccctgttatcagcacttccgccgattgctatgtgggctgctagtaccccgttgcacacccctgggcagcgtgcttcctccctgtagatctgtctgccaggaggctgaacatcaatgccagagcggtctcgccctcctcggcactccgtggccgtttaattgtaatcggctgcccgaagccgccgacttggaagcttgcgcacagccctag

SEQ ID NO: 221783 - DNA, 1740 bp, Artificial Sequence
  derived and/or modified sequence
atgaaggacttctccgatgtcattctgtgtatggaagcaaccgagagcagtaagactgaattttgtaatcctgccttcgagcctgagtcaggacctccttgccctcctcccgtcttccctgaggatgccagctactccgtgcccgctccctggcacgggaggaggccaaggggtttgagacctgattgtcgtttcagttggctgtgcgtgctgcttctatcttcactgttgttgcttctgcttgggctgttagtagctattatccttgctcagttgcaggccgctcccccaagcggagcctcccattcgccattgcccgctggaggcctcacgaccaccaccaccactcccaccatcactacatcccaggctgctggaaccccaaaaggacaacaggaatccggggtttcaccgtcaccacagtctacctgtggcggattgctgtctggccctaggggcttcttctcatctccgaactaccccgacccctatccaccaaatacccactgcgtttggcacatccaagtcgcaaccgatcatgccattcagctcaaaatcgaggccttaagcatagagtccgtggccagttgtctatttgaccgcctggaactgtcacctgaaccggagggcccactgcttcgagtctgcggcagggtgccacctcccactctgaacactaacgctagccatctactcgttgtgtttgtgtctgattcctccgtggagggcttcggcttccatgcgtggtaccaggctatggctccaggccgaggctcatgcgcgcatgatgaatttagatgcgatcagcttatatgtttgctgcccgacagcgtatgcgatggctttgcaaattgcgccgacggctctgacgagacaaattgttccgcaaagttctccggctgtgggggaaacctgactggccttcagggaaccttctccactccttcttatctgcagcagtatccccaccagctgctgtgtacctggcacatcagcgtgcccgctggtcactccatagagctgcagttccataatttttccttagaagcccaagacgaatgcaagtttgattatgtcgaagtgtatgaaacgtcctcctctggagctttcagtttactaggacggttctgtggcgctgagcccccaccacatctggtttcttcacaccacgagctggccgtgctgtttaggacagatcatgggatatcttccgggggattctccgccacatatctggccttcaacgctactgagaatccttgcggcccaagcgaactgagttgccaggctgggggttgcaaaggtgtgcagtggatgtgcgacatgtggagggattgtactgacggctcagacgataactgcagcgggcctctttttcctcctccagagctcgcctgtgaacctgtgcaggtcgaaatgtgcctcgggctatcctataacacaaccgcgttcccaaatatttgggtcggaatgataacgcaggaggaagttgtagaagttctctcaggatataagtcactgactagcctcccatgttatcaacatttccgtagactgttgtgcggactcctggtgcctagatgcacacctctgggcagtgttttacccccttgcaggtccgtttgccaagaggctgaacaccagtgtcagagtgggcttgcattgctagggaccccttggccttttaattgtaacaggcttcctgaggccgctgatctggaggcctgtgcccaaccttag

SEQ ID NO: 221784 - DNA, 1740 bp, Artificial Sequence
  derived and/or modified sequence
atgaaggacttcagcgatgtaattttatgcatggaggccactgagagctccaagacggagttctgtaacccagcttttgagccagaatctggccctccttgcccaccccctgtcttccccgaggacgccagttactccgttcctgcgccttggcacggacggcgtcctagaggtcttagacctgactgtagattttcatggctctgcgtgctgctgttaagctcactcctgctcctgctcctcggacttctggtggccattattctggcccagctacaagccgcacccccttctggcgctagtcatagcccgctccctgcaggcggtcttaccaccaccactaccacccccaccatcaccacttctcaggctgcagggactcctaaaggccaacaagagagcggggtcagcccctcaccccaatccacatgcggcggtctgttgagtggacctcggggattttttagtagccctaattaccctgatccctatcctcccaacactcactgtgtgtggcacattcaggtcgcaactgaccacgccatccagctgaagatcgaggctctgagcatagagagcgtggcctcttgtttgttcgatcgcctcgagctaagccctgagcctgagggtccccttttgcgggtgtgcggaagggtgcctcctcctacactaaatacgaacgcgagccacctgctggtggtttttgtgagcgactccagcgtcgaaggatttggcttccatgcgtggtaccaagccatggctcccggaagagggagttgtgcccatgacgagttcagatgcgaccagttgatctgcctcctccctgacagcgtctgcgatggattcgctaactgcgcggatggcagcgatgagaccaactgctccgcaaaatttagcggatgcgggggaaacctaacagggttacaagggaccttttctacaccatcctatctccagcagtatcctcaccaactgctgtgcacttggcatatctccgtgcctgctggccatagcatcgagttacagtttcataatttctctctagaagcacaggatgaatgtaaattcgactacgtcgaggtgtacgagacaagtagtagcggcgcattttctttactcggcaggttctgcggggctgagcccccaccccatctggtgtcctcacaccatgaactggctgtcctttttaggactgaccacggcatatcttctggtggcttctccgcaacttatctggcgttcaatgccaccgaaaacccctgcgggccaagtgagctctcatgccaggccggaggatgcaaaggcgtccagtggatgtgcgacatgtggcgggactgcactgacgggagtgatgacaattgcagcggtcccctctttcctcccccagaactggcttgcgagccagtgcaggtggagatgtgtctaggacttagttacaatactaccgcttttccgaatatctgggtggggatgattacccaggaagaagtcgtcgaggtgcttagtggctacaaatcccttactagcctgccctgttaccaacactttcgcaggttgctgtgtggactgttggtgccacggtgtactccgctcggcagcgtgttgcccccatgccgttcagtttgccaggaggcggagcaccagtgtcaatctggcttggcactcctgggcacaccttggccattcaactgcaatcggctgccggaggctgccgacctcgaggcttgtgcccaaccatag

SEQ ID NO: 221785 - protein, 228 aa, Artificial Sequence
  derived and/or modified sequence
MPTNCAAAGCATTYNKHINISFHRFPLDPKRRKEWVRLVRRKNFVPGKHTFLCSKHFEASCFDLTGQTRRLKMDAVPTIFDFCTHIKSMKLKSRNLLKKNNSCSPAGPSNLKSNISSQQVLLEHSYAFRNPMEAKKRIIKLEKEIASLRRKMKTCLQKERRATRRWIKATCLVKNLEANSVLPKGTSEHMLPTALSSLPLEDFKILEQDQQDKTLLSLNLKQTKSTFI

SEQ ID NO: 221786 - DNA, 687 bp, Artificial Sequence
  derived and/or modified sequence
atgcccaccaactgcgccgccgccggctgcgccaccacctacaacaagcacatcaacatcagcttccacagattccccctggaccccaagagaagaaaggagtgggtgagactggtgagaagaaagaacttcgtgcccggcaagcacaccttcctgtgcagcaagcacttcgaggccagctgcttcgacctgaccggccagaccagaagactgaagatggacgccgtgcccaccatcttcgacttctgcacccacatcaagagcatgaagctgaagagcagaaacctgctgaagaagaacaacagctgcagccccgccggccccagcaacctgaagagcaacatcagcagccagcaggtgctgctggagcacagctacgccttcagaaaccccatggaggccaagaagagaatcatcaagctggagaaggagatcgccagcctgagaagaaagatgaagacctgcctgcagaaggagagaagagccaccagaagatggatcaaggccacctgcctggtgaagaacctggaggccaacagcgtgctgcccaagggcaccagcgagcacatgctgcccaccgccctgagcagcctgcccctggaggacttcaagatcctggagcaggaccagcaggacaagaccctgctgagcctgaacctgaagcagaccaagagcaccttcatctag

SEQ ID NO: 221787 - DNA, 687 bp, Artificial Sequence
  derived and/or modified sequence
atgccgacgaactgcgctgccgcgggttgtgctactacatataataaacatattaatatcagctttcatcgtttcccactagacccgaagcgtcgcaaagagtgggtgagacttgtgcgccgcaagaattttgtgccggggaagcacacattcctgtgctctaagcattttgaagcttcctgctttgacctgacaggtcaaacaaggagactcaagatggacgcggtgcctacaatattcgacttttgcacccacatcaaaagtatgaaacttaagtccagaaatttactgaaaaagaataacagttgtagccctgctggaccaagtaatctcaaatcgaatatttcatcacagcaggtactgttggagcattcctatgcgttccggaaccctatggaggccaagaaacgcatcattaaactggaaaaagagatagcaagcctgcggaggaaaatgaagacttgtctccaaaaagaacgcagggccacacggagatggattaaggctacatgcctggtgaaaaacctggaggctaattcagtccttcccaagggcacctccgaacacatgctgcctaccgctctgagtagcctgccattggaggatttcaagatcctcgaacaggatcagcaggacaagactctccttagcctcaaccttaaacagacaaaaagcacattcatttag

SEQ ID NO: 221788 - DNA, 687 bp, Artificial Sequence
  derived and/or modified sequence
atgcccaccaactgtgccgccgccggctgtgccaccacctacaacaagcacatcaacatctccttccaccgcttccccctggaccccaagaggaggaaggagtgggtgcggctggtgcggaggaagaactttgtgcctgggaagcacaccttcctgtgcagcaagcactttgaggccagctgctttgacctgaccggccagacccggcggctgaagatggatgctgtgcccaccatctttgacttctgcacccacatcaagtccatgaagctgaagagcaggaacctgctgaagaagaacaacagctgcagccctgctggccccagcaacctgaagagcaacatcagcagccagcaggtgctgctggagcacagctatgccttcaggaaccccatggaggccaagaagaggatcatcaagctggagaaggagatcgccagcctgcggaggaagatgaagacctgcctgcagaaggagcggcgggccacccggcgctggatcaaggccacctgcctggtgaagaacctggaggccaacagcgtgctgcccaagggcaccagcgagcacatgctgcccacagccctgagcagcctgcccctggaggacttcaagatcctggagcaggaccagcaggacaagaccctgctgagcctgaacctgaagcagaccaagagcaccttcatctag

SEQ ID NO: 221789 - DNA, 687 bp, Artificial Sequence
  derived and/or modified sequence
atgcccaccaactgcgccgccgccggctgcgccaccacctacaacaagcatatcaacatcagttttcacagattcccgcttgacccaaaaaggaggaaagagtgggttagactcgtgagacgcaaaaattttgtgccaggcaagcacacattcctctgttccaagcactttgaagccagttgcttcgatctaacgggccagacccgaaggttgaaaatggacgccgtgcctacaatcttcgacttttgtacacatatcaagtccatgaaacttaaaagtagaaacttgttaaaaaagaacaacagttgcagcccagccggccctagtaatctgaagtcgaacattagttctcagcaggtcctcctggagcattcctacgcctttcggaaccctatggaggccaaaaagaggatcataaaactggaaaaggaaatcgcttctttaagacgcaagatgaaaacctgcctgcaaaaagagcggcgtgccactcgccggtggattaaagcaacctgtctggtgaaaaatctggaggccaactccgtgctgccaaaaggcacctcagaacacatgctgcctacagctctgtcaagcctccctctagaggactttaaaatccttgaacaggaccaacaggacaaaacgctgttgagcctgaatctgaagcagaccaagagcacattcatttag

SEQ ID NO: 221790 - DNA, 687 bp, Artificial Sequence
  derived and/or modified sequence
atgccaaccaactgcgccgctgccggatgtgccacaacctataacaagcatatcaacatctccttccaccgctttccgctagaccctaagagaaggaaagagtgggttagattggtccggcgaaaaaatttcgtgcccggtaagcacacctttctctgctcaaaacactttgaggcaagctgtttcgaccttacaggacagacgcgtcggctgaagatggacgcagtcccgacaatcttcgatttttgtacccacattaaatctatgaaattaaagtcacgtaatttactgaaaaagaataacagttgctcacccgcaggtccttccaacctgaagtctaacatttcctcccaacaggtcctcctcgaacacagttacgccttccgcaatcccatggaggctaagaagcgcatcatcaaactggagaaggagatcgcctccctgaggcgtaagatgaagacctgtctgcagaaggagcggcgtgcgaccagaagatggatcaaagccacttgtctggtgaagaacctggaggctaacagcgtacttcctaaaggaacatcagaacatatgttgcccaccgcattatccagcctacccttggaggacttcaaaattctggagcaggaccaacaggacaagactctcttgtcactcaacctcaagcagacgaaatctacctttatttag

SEQ ID NO: 221791 - DNA, 5719 bp, Artificial Sequence
  derived and/or modified sequence
atacagctcttccgaggtggagagggctctcgccagctctgactgctgctgaacccggatcctgctcctcctcccagaggaggtctgcaccccggcttgcctcctcgctcacccactcctcgcccccgactccagcgactcccaccccggtaaggcctgcctcgaaagcggaaacggtccaaggcgaggtggctccgctcccagaaagacggccggggactgctttcggacagtgagctcgaaggcatccgtacagaaggcggatgagaccggaacggttctttgggtcggtagctgctgggtcccctgaggtggccccgctcagacgcgtgccgcgagcgtgagaaattcctcagctgctgctgagaagaggacgatgacgaggaagagccaccgcctccgccagatccaccgccccgggccgagtgaggaggccttcgccgcggatagggtaacagcccgccgccgctgctgctgctgctgctccgactccgtatctggctgttattatcgtcgtcactgatttccccatcttcaagctccccttcttccttcggcgagaggccactggaggccggggccggagtatctgcggtcgccatccggggagcagcgccttccacacaaccttagccctccgtccggggatccgcccgacaattgcctcgtttcccttctttcctaacggactgggtcggtgcggtcttaccctactcggacaccaagcggcctctgctccccaacttccccgcaccccagcaccccagctctctctcgccggaccgtcgcaacccagttccctttcctagcgcccccttgctcctcagcgatcggggttcttccgcctcgcgagaaagggactctggtagcggctgtacccgaaacgtcacttcctgcgacacgcaggaaacaaaggctcccagttcacgcgataataagaccaactcgatactcactaggatttgtagtctttcgtctttcttcgggtttactcttccggtcctagggtcacacccaccgcagggtctggcttggtacagttgggtgcatgcagaagtaggtggagctgctgttgcagccttgagagagttttattgtaaaactcttgtaatttatagtaatcggaggggaaaacacctcttccttttaattgctctgaggaccgctgccaaagaaacgcagtagatccgctccctcttgggggcggggagaaagaacgggttgtgtccgccatgttggtgaagtcaagcgaaggcgactagagctccaggagggccagttctgtgggctctagtcggccatattaataaagagaaagggaaggctgaccgtccttcgcctccgcccccacatacacaccccttcttcccactccgctctcacgactaagctctcacgattaaggcacgcctgcctcgattgtccagcctctgccagaagaaagcttagcagccagcgcctcagtagagacctaagggcgctgaatgagtgggaaagggaaatgccgaccaattgcgctgcggcgggctgtgccactacctacaacaagcacattaacatcagcttccacaggtttcctttggatcctaaaagaagaaaagaatgggttcgcctggttaggcgcaaaaattttgtgccaggaaaacacacttttctttgttcaaagcactttgaagcctcctgttttgacctaacaggacaaactcgacgacttaaaatggatgctgttccaaccatttttgatttttgtacccatataaagtctatgaaactcaagtcaaggaatcttttgaagaaaaacaacagttgttctccagctggaccatctaatttaaaatcaaacattagtagtcagcaagtactacttgaacacagctatgcctttaggaatcctatggaggcaaaaaagaggatcattaaactggaaaaagaaatagcaagcttaagaagaaaaatgaaaacttgcctacaaaaggaacgcagagcaactcgaagatggatcaaagccacgtgtttggtaaagaatttagaagcaaatagtgtattacctaaaggtacatcagaacacatgttaccaactgccttaagcagtcttcctttggaagattttaagatccttgaacaagatcaacaagataaaacactgctaagtctaaatctaaaacagaccaagagtaccttcatttaaatttagcttgcacagagcttgatgcctatccttcattcttttcagaagtaaagataattatggcacttatgccaaaattcattatttaataaagttttacttgaagtaacattactgaatttgtgaagacttgattacaaaagaataaaaaacttcatatggaaattttatttgaaaatgagtggaagtgccttacattagaattacggacttaaaaattttgctaataaattgtgtgtttgaaaggtgttttttgtttttgtctttttaaactactgttaaaagaacagcttatgataagtaatatgtttaacttagagaagaattttttcctgtaccaaagttggcatattgcattctaaataagatgctaaataagagttaaccaacattcaacatgaccttaaaactgctgggttttgtattaattaaattataattggcactgtgatttgaaaaatttatagaaaaaaaggtacagggcaagtttttaaattaaaactttctatattttgttttaccagtaaaagtgagcttatcatggcctctctcataagaatgattttaaaataggttgtaaaatattttgaaaatatttgaatgtgaagtaccattgagtcatccaaactaggtaaggcctcaagtactttaaactagtaaaatctagtagctgataatattcacctaagtaagtgttgtaaaataattcagagttcaggacctagcttagataaatgtatactactctttttctcataataaaaatcttacatttccaacttcaaaattggtgcttccatatttgttgataaccaaaactcctaaggttttttgttttctttttaactactttccaaatgcatactatacctcagaaatagtgtatcaatatagtgggctttttttttcctcttcataaacccacagtaaaatttaatcacaggaaactacttatatcttcacactttgtattgataacttaaaatggcatcagtttatcttagacatcagcttgctttttatctccttttttagtgagtgaaatagagcaactagcatgcctgtgttcccagctacttgggaggctaaggtgggaagatcaattgaacctaggaggttgaggctatagtgagctgtgattgcacgactgcactccagcctgggcaatggagtgagactcctgtctctaaaacagcaacaacaaaaataaagcaaccatagtgcataagggaaattaaatgttccctatagaaatatgtgtatgtctgtgatagtggtatgcaaatgctaattattttataaaataaaagttcagaactattcttatcattgccacttgaacaattaaagggtttgctttatttcactaatgtttaataggaaccctttgcttcaaacagctttgttgaaatcatgtaaaaatttgttaatagagaatcaagttatttaactcaacttatttaattcaagcttgtgatactaacatacaaaggtagcataaaccaagtcataaattgctgtaatctttcctgtaaagtaatagctacttcatgatttttttaaaaatttcatttttttgctatttaggattgcatttgcttggctcctagtaacaattcttttacagtattagcactctctttactaaggaatgcctcccaaggaaatgcaaaggtaggaaaagtctcttagaatgcccatgaggtatttaaaacagatatttatgaaaatctttttgtgaatgttataaatcttgctagttattttatctttatcttaagtattagatgtagttccttggaattgtcattacatatttatttttttctagtatggtttcaaataactttttgccaacatataatcatcatcaaacattcactgaccatatctattttataactcaaaataagttggacaaataatcattttaataaaaactattttttccaagtataaccactgtcatgtggttcacccttcaccccagatacaaaacacttatttgtgtagcccagttcccatctacagtaataccttgaaaccttaataaattttaaaaatcataaaaataaaatattgtaaaatacaacaaattttggacaaggttacttcatcttcattcattattacctgacagtattaaactactactcaataattttagagtaaacttttctgtgttttctccgtgattttcattgtgctgtcctgacaacatgctccaaactctttgcatcaaattgttttattaacatacatttgtctaccttaaaactagctttattcacagagaaaaacctaaaaggagtctattaaaatgctgctttcagtttgatagttttttttttaatcactctgaccataaactaactgaaattataatggattttttttcctctcccggtcacaacacagatcttctgttcatttgttctctgtctactgggcaccaacctctacaaagaaccagccaaaggctaggtacttgatataaaaaggaatattacattattttctgccctcaagttgctctatctcctgaaagaaacaagtaatatttataatacaatatgataaatgctacaaaagaaatagctgtaaagtcctttggtaaatgctgttgaattggaattcagtaagaactataaactgtagacctttttataatcaaatgcttttgtcttgaaacaaaacagattcctccttatattgacttagcaaaggaggtacaaggacattggcatttgacctgaattatggtgttttattgaatgagctataagacaacatttttaccctttaaaatgaacactgaacaaatgtgttaatggtatctttgttaaaaggaaaacatagctataaataaaatactacatcgaaatccagcactggagttcatttgaaatttgatattttgtgtaaaataacaaacctattaacacagatttttaaaataactcagaatcgtataaagcactttggtacttatttgttctcttttcccttacattctgtgtggtaggtggtattatctctgatttacacatgaagacatccttgttaatgcaatttatttattcattcgggcatttactgtgtgccaacttgcaaaaggaatagaaatgtctgtgatctagatagttctagattgaacatagattttctgccaacaaatcctctctgctgttcacattatcctttgtttaacgtatgaaccaggttactaaaataggataaatcatgtgtcttaaaatatgaaaatagtaaagtctttgaggtcacttgatcttctctaagtagactttataatattgtgttttatctcatttctcaatattagaatacgggtagattttaattttgctataatataggaaatggttcatctttgtaccaaaatattgcattcttctgatatttagacagttggaaactttctaaaattgaggattttgtagtgtatactaaataattgcatattcaaaaaaatgtattctgagtatggtgatattaaacatttttccccaa

SEQ ID NO: 221792 - protein, 440 aa, Artificial Sequence
  derived and/or modified sequence
MSMLAERRRKQKWAVDPQNTAWSNDDSKFGQRMLEKMGWSKGKGLGAQEQGATDHIKVQVKNNHLGLGATINNEDNWIAHQDDFNQLLAELNTCHGQETTDSSDKKEKKSFSLEEKSKISKNRVHYMKFTKGKSWKALTLSQKRPYVDEAERLRLQHMQDYPNYKYRPRRKKQAKRLCKRVDPGFLLSSLSRDQNALPEKRSGSRGALGEKEDRGEYSPGTALPSLRGCYHEGPAGGGGGGTPSSVDTYPYGLPTPPEMSPLDVLEPEQTFFSSPCQEEHGHPRRIPHLPGHPYSPEYAPSPLHCSHPLGSLALGQSPGVSMMSPVPGCPPSPAYYSPATYHPLHSNLQAHLGQLSPPPEHPGFDALDQLSQVELLGDMDRNEFDQYLNTPGHPDSATGAMALSGHVPVSQVTPTGPTETSLISVLADATATYYNSYSVS

SEQ ID NO: 221793 - protein, 388 aa, Artificial Sequence [sequence omitted]

SEQ ID NO: 221794 - DNA, 3219 bp, Artificial Sequence
  derived and/or modified sequence
aagttggacgccccgacccgtgcgagggccaggtccgcgcctgccccgccaggcgaagcgaggcgacccgcgtgcggccatggcttcgctgctgggagcctacccttggcccgagggtctcgagtgcccggccctggacgccgagctgtcggatggacaatcgccgccggccgtcccccggcccccgggggacaagggctccgagagccgtatccggcggcccatgaacgccttcatggtttgggccaaggacgagaggaaacggctggcagtgcagaacccggacctgcacaacgccgagctcagcaagatgctgggaaagtcgtggaaggcgctgacgctgtcccagaagaggccgtacgtggacgaggcggagcggctgcgcctgcagcacatgcaggactaccccaactacaagtaccggccgcgcaggaagaagcaggccaagcggctgtgcaagcgcgtggacccgggcttccttctgagctccctctcccgggaccagaacgccctgccggagaagagaagcggcagccggggggcgctgggggagaaggaggacaggggtgagtactcccccggcactgccctgcccagcctccggggctgctaccacgaggggccggctggtggtggcggcggcggcaccccgagcagtgtggacacgtacccgtacgggctgcccacacctcctgaaatgtctcccctggacgtgctggagccggagcagaccttcttctcctccccctgccaggaggagcatggccatccccgccgcatcccccacctgccagggcacccgtactcaccggagtacgccccaagccctctccactgtagccaccccctgggctccctggcccttggccagtcccccggcgtctccatgatgtcccctgtacccggctgtcccccatctcctgcctattactccccggccacctaccacccactccactccaacctccaagcccacctgggccagctttccccgcctcctgagcaccctggcttcgacgccctggatcaactgagccaggtggaactcctgggggacatggatcgcaatgaattcgaccagtatttgaacactcctggccacccagactccgccacaggggccatggccctcagtgggcatgttccggtctcccaggtgacaccaacgggtcccacagagaccagcctcatctccgtcctggctgatgccacggccacgtactacaacagctacagtgtgtcatagagctggaggcgccccgtccggtcagccctcgcgccctctccttcttgtgccttgagtggcagaggagccgtccagccacaccagctttcctcccaccgctcagggcagggaggtctgaactgcggccccagagcctttggcctaagctggactctccttatccgagtgccgcctctatccccttccccacgttccagcccctgcagcccacattttaagtatattccttcaagtgagttttcctccagcccctgagagttgctgtctcccagtggaatgttcactgacgtcttttcttggtagccatcatcgaaactaatggggggacagacttgatagccaaggtcccttctggtccagttttctgatttagggttctctcaagattaataaaggaagatggggaaatttgactcattaatgagctcgctaacctacgatctggtgataattttgtgtgcacagcccaaggaccacgaggctttctgcactttctgcacccccttccaaagtgaccacaaaatttcaaagggactcatacaatttgagaaaaaacagtcaacctgatttgagaaattaaccagtatggctaactatatcacagaaaatgggattgagttaaaactattttattttaaatatacattttaaagcagttctttttttttgttaatttgtttattatacacacacttcaagagaatatgcacagtctaggccgggcacggtggctcacgcctgtaatcccagcactttgggaggccgaggcatgtggatcacctgaggtcaggagtttgagaccagcctagacaacatggtgaaaccttgtctctatgaaaaatacaaaatttgctgggagtggtggtgcatgcctgtaatcccagctacttggaaggctgaggcaggagaatgtcttgaacctaggaggtggaggttgcagtgagctgagattgcaccattgcactccagcctgtgcaacaagagtgaaactccatttcaagaaaaaaaaaaaaaaaagaatatgcacagtctgaatgtataccaggagtgtgagagacacatgcccacttcatgcaactcctaaactcaaagtctaaatcagatatttttattaacaatgacaacttgttgccaactccctgtttctaatgaccaaagacccagggtacctaaaaggactttgcaaccaagcaaagtcactgtcttcaaatctggatacacactttcccctctgtagattcaaaaggtgcttccttcccggctgtctccagcttccttactctcttttctgggatttctttttctcttctttctgctcttcctccactgctgaactggtccctaactgaaacagcccctgacttatcccaagcatgcttcctttagctgctgtgagaatttgtcttcctcaccagccaggtcctcaggcaaagtcctcagccagtgctttagagcaacttcccgcaaatcagaaactcactgtgattccaaaaatgtttctgagccctggacccctgcccccaaaatattttcatctttcccccaaacctcctttaaaggagcatgcataacagtgtgctgaaagacagttgttggttttttgattttagcatattatttcctgtatgaaatatgttttatataatctcctattatttttatcttatgttttgtattgttgataaatcctttttgtccttctaagatgtcctattgtaaaatcacttataaggtatgattactctttatgctattactttatatgccatttggtaataaatagtaaattgttgatgatatgattgactgatgcgcagtccagagcatgtatgaataatctcataaaacagtatcacagacattaagctaaactgtttcgtttttttgaaagaacaactcatactttggaacagttgtcaatattaatttgttgcaaatatttaatttaaataaacatttttgtaccatgaaaa

SEQ ID NO: 221795 - DNA, 1323 bp, Artificial Sequence
  derived and/or modified sequence
atgagcatgctggccgagagaagaagaaagcagaagtgggccgtggacccccagaacaccgcctggagcaacgacgacagcaagttcggccagagaatgctggagaagatgggctggagcaagggcaagggcctgggcgcccaggagcagggcgccaccgaccacatcaaggtgcaggtgaagaacaaccacctgggcctgggcgccaccatcaacaacgaggacaactggatcgcccaccaggacgacttcaaccagctgctggccgagctgaacacctgccacggccaggagaccaccgacagcagcgacaagaaggagaagaagagcttcagcctggaggagaagagcaagatcagcaagaacagagtgcactacatgaagttcaccaagggcaagagctggaaggccctgaccctgagccagaagagaccctacgtggacgaggccgagagactgagactgcagcacatgcaggactaccccaactacaagtacagacccagaagaaagaagcaggccaagagactgtgcaagagagtggaccccggcttcctgctgagcagcctgagcagagaccagaacgccctgcccgagaagagaagcggcagcagaggcgccctgggcgagaaggaggacagaggcgagtacagccccggcaccgccctgcccagcctgagaggctgctaccacgagggccccgccggcggcggcggcggcggcacccccagcagcgtggacacctacccctacggcctgcccaccccccccgagatgagccccctggacgtgctggagcccgagcagaccttcttcagcagcccctgccaggaggagcacggccaccccagaagaatcccccacctgcccggccacccctacagccccgagtacgcccccagccccctgcactgcagccaccccctgggcagcctggccctgggccagagccccggcgtgagcatgatgagccccgtgcccggctgcccccccagccccgcctactacagccccgccacctaccaccccctgcacagcaacctgcaggcccacctgggccagctgagccccccccccgagcaccccggcttcgacgccctggaccagctgagccaggtggagctgctgggcgacatggacagaaacgagttcgaccagtacctgaacacccccggccaccccgacagcgccaccggcgccatggccctgagcggccacgtgcccgtgagccaggtgacccccaccggccccaccgagaccagcctgatcagcgtgctggccgacgccaccgccacctactacaacagctacagcgtgagctag

SEQ ID NO: 221796 - DNA, 1323 bp, Artificial Sequence
  derived and/or modified sequence
atgtctatgctggcagaaagaaggcggaaacagaagtgggcagtggatcctcagaacactgcctggtccaacgacgatagcaaatttggacagcgaatgttagaaaagatgggctggagcaaagggaagggcctcggtgcccaggaacagggcgcgacagaccacatcaaggtacaggtgaagaacaaccatttggggctcggcgccaccattaataacgaggataattggattgcacatcaggacgacttcaatcagctgcttgccgaactcaatacctgccacggacaggagaccacagattcctccgataaaaaggagaagaagtccttcagcctggaggagaagagcaaaatctccaagaacagggtgcattatatgaagtttacaaagggcaagagctggaaggccctgaccctctcccaaaaacgcccttatgtcgacgaagcggaacgcctccgcttgcaacatatgcaggactacccaaattacaaatatcggcctcggcgcaaaaaacaggcaaaacgcctctgtaaacgggttgaccccgggttcctcctctcctccctgtccagagaccagaacgccctgccagagaagaggtctggaagtcgaggggccctcggagagaaggaagatagaggggagtactcaccagggacagccttgccctcactgagaggatgctatcacgagggtccagcggggggcgggggaggtggcacccctagtagcgtggatacctacccttacggcttgcccacaccgcctgaaatgtctccattagacgtactagaacccgaacagacctttttttcctcaccttgtcaggaagagcacggacaccctcggcgcattccccatctcccgggacacccatattcccccgaatacgccccatcccctttgcactgctctcaccccttgggctcattagccctcggccaaagccctggagtgagtatgatgagcccagtgcctggatgcccaccttctccagcctactatagccctgccacataccatccactgcatagtaatctgcaggcacacctcggacagttatccccaccccctgaacaccctgggttcgacgcgttggaccagctgtcccaggtggagctgctcggcgatatggataggaatgaattcgatcagtatctgaataccccagggcaccctgattcagccacaggcgccatggctctgtccggccacgttcctgtctctcaggtgacaccaactgggccaactgaaacttccctgatctcagttctcgccgatgcgactgcaacatactataattcctatagtgtgagctag

SEQ ID NO: 221797 - DNA, 1323 bp, Artificial Sequence
  derived and/or modified sequence
atgtccatgctggccgagaggaggaggaagcagaagtgggccgtggacccccagaacacagcctggagcaatgatgacagcaagtttggccagaggatgctggagaagatgggctggagcaagggcaagggcctgggcgcccaggagcagggcgccacagaccacatcaaggtgcaggtgaagaacaaccacctgggcctgggcgccaccatcaacaatgaagacaactggatcgcccaccaggatgacttcaaccagctgctggccgagctgaacacctgccacggccaggagaccacagacagcagtgacaagaaggagaagaagagcttcagcctggaggagaagagcaagatcagcaagaacagagtgcactacatgaagttcaccaagggcaagtcctggaaggccctgaccctgagccagaagaggccctacgtggatgaggccgagcggctgcggctgcagcacatgcaggactaccccaactacaagtaccggcccaggaggaagaagcaggccaagaggctgtgcaagagggtggaccccggcttcctgctgagcagcctgagccgggaccagaatgccctgcctgagaagaggagcggcagcagaggagccctgggggagaaggaggacagaggagagtacagccctggaacagccctgcccagcctgcggggctgctaccacgagggccctgctgggggcggcggcggcggcacccccagctctgtggacacctacccctacggcctgcccaccccacctgagatgagccccctggatgtgctggagcctgagcagaccttcttcagcagcccctgccaggaggagcacggccacccccggcgcatcccccacctgcccggccacccctacagcccagaatatgcccccagccccctgcactgcagccaccccctgggcagcctggccctgggccagagccctggggtgtccatgatgagccctgtgcccggctgcccccccagccctgcctactacagccctgccacctaccaccccctgcacagcaacctgcaggcccacctgggccagctgagccccccacctgagcaccctggctttgatgccctggaccagctgagccaggtggagctgctgggggacatggacagaaatgaatttgaccagtacctgaacaccccaggccacccagacagcgccaccggggccatggccctgagcggccacgtgcctgtgtcccaggtgacccccaccggccccacagagaccagcctcatctctgtgctggctgatgccacagccacctactacaacagctacagcgtgtcctag

SEQ ID NO: 221798 - DNA, 1323 bp, Artificial Sequence
  derived and/or modified sequence
atgagcatgctggccgagcggcggcggaagcagaagtgggccgtggaccctcagaacaccgcatggtcaaatgacgacagcaagtttggtcaacggatgctggaaaagatgggttggagtaaaggtaaggggcttggcgcccaggaacaaggagcaaccgaccacattaaggtgcaggtaaaaaacaaccacctgggtttaggcgccaccattaacaacgaagacaactggatcgcgcaccaggacgacttcaatcagttactggccgaactgaatacttgccatggccaggagaccactgattcatctgataaaaaagaaaagaagtccttttctctcgaagagaagagtaaaattagtaagaatagggtacactatatgaagttcaccaaaggtaaaagctggaaggctctgacgctctctcagaagaggccgtatgttgatgaggccgaacggcttagactgcagcatatgcaggactaccctaattataaatataggccaaggcggaaaaagcaagcaaaacggctgtgcaagcgtgtcgatccgggcttccttctgtcatctctctccagggatcagaatgcattgcctgagaagagatccggcagccgtggtgccctcggcgaaaaggaagatcggggcgagtacagcccaggcacagcgctgcccagcctcagagggtgttaccatgagggccctgcaggcgggggcggtggggggacaccctcctccgtggatacatatccatatggcttacccacgcctcccgagatgagtcctctcgatgttctggaaccagaacaaactttcttcagctctccatgccaagaagagcacggccatcccagacggatccctcacctcccaggccacccctactcacctgagtatgctccctcaccattgcattgtagtcatcccttggggagcctggccctcgggcaatcaccaggggtttcaatgatgtctcccgtgccaggctgtcccccttctcctgcatactacagtccagccacataccatcctctccactccaatctccaagcgcatcttggccagcttagcccaccccctgaacaccctggctttgacgccctggaccaattatcccaagtggagctcttaggtgatatggatcggaacgagttcgaccagtaccttaacactccaggccaccccgattccgctactggggccatggccctctcgggacacgtcccagtgtcacaggtgactcctacaggtccaaccgagactagcttaatctcagtcctggcagatgcaactgccacgtattacaacagttattctgtgagttag

SEQ ID NO: 221799 - DNA, 1323 bp, Artificial Sequence
  derived and/or modified sequence
atgtctatgctcgctgagagaaggagaaagcagaaatgggccgttgacccgcagaacactgcttggagcaacgacgactcaaaatttggtcagcggatgttggagaaaatgggatggagcaaggggaaaggattgggagcgcaggagcagggcgctacagaccatatcaaggtgcaggtcaagaataaccacctcggtctcggagccaccatcaacaatgaggataattggattgctcatcaggatgactttaatcagttgctcgctgagttaaatacctgccatggacaggaaacaaccgattcaagtgacaagaaggaaaagaaatctttctccctggaagagaaaagtaagattagcaaaaaccgggtccactatatgaagttcactaaaggtaagtcctggaaggcgctgaccctgtcccaaaaaagaccttacgttgacgaggcagaacgcctcaggttgcaacatatgcaggattaccctaattacaagtaccgaccacgccgaaaaaagcaggcaaagagactgtgtaagcgggttgatccgggttttctactgtcatcgctgtcacgggatcagaatgcactgccagaaaagaggtcaggcagtcgaggtgcgctgggcgagaaagaggatcgcggtgaatacagccctggcactgctttgccgagcctgagggggtgctatcacgagggaccagctggcggtgggggaggcggtaccccttctagtgtcgacacatacccttatgggctgccaactccacctgagatgtcaccactcgatgtgctagagcccgagcagactttctttagctcaccatgtcaggaagaacacgggcatcccaggaggattcctcacttgcctggccatccatattctccagagtacgccccttctcctttacattgttcccacccgctggggtccctggccttagggcaatccccgggagtcagtatgatgtccccagtcccaggctgtcctcccagcccagcatactatagtcccgctacttatcatccactgcatagtaatctgcaggctcatctagggcagctcagcccccctcctgagcatcctgggttcgacgccctggaccagctatctcaagttgagctgctaggtgatatggatagaaacgagttcgaccagtacctgaatacgcccggacacccggacagcgctacaggagccatggccctatccgggcacgtccccgtcagccaggtgactcccaccggaccaacagagacctctctgatatctgtgctcgcagacgccacagccacctactacaactcctacagcgtcagctag

SEQ ID NO: 221800 - DNA, 1753 bp, Artificial Sequence
  derived and/or modified sequence
tacgcacgtcctgattctcctggagtctccagcccgcccagtggccgcagtcacccaggtccagaggcggcggtatcacaggctctccgacatgtctatgctggctgaacgtcggcggaagcagaagtgggctgtggatcctcagaacactgcctggagtaatgacgattccaagtttggccagcggatgctagagaagatggggtggtctaaaggaaagggtttaggggctcaggagcaaggagccacagatcatattaaagttcaagtgaaaaataaccacctgggactcggagctaccatcaataatgaagacaactggattgcccatcaggatgattttaaccagcttctggccgaactgaacacttgccatgggcaggaaaccacagattcctcggacaagaaggaaaagaaatcttttagccttgaggaaaagtccaaaatctccaaaaaccgtgttcactatatgaaattcacaaaaggaaagtcgtggaaggcgctgacgctgtcccagaagaggccgtacgtggacgaggcggagcggctgcgcctgcagcacatgcaggactaccccaactacaagtaccggccgcgcaggaagaagcaggccaagcggctgtgcaagcgcgtggacccgggcttccttctgagctccctctcccgggaccagaacgccctgccggagaagagaagcggcagccggggggcgctgggggagaaggaggacaggggtgagtactcccccggcactgccctgcccagcctccggggctgctaccacgaggggccggctggtggtggcggcggcggcaccccgagcagtgtggacacgtacccgtacgggctgcccacacctcctgaaatgtctcccctggacgtgctggagccggagcagaccttcttctcctccccctgccaggaggagcatggccatccccgccgcatcccccacctgccagggcacccgtactcaccggagtacgccccaagccctctccactgtagccaccccctgggctccctggcccttggccagtcccccggcgtctccatgatgtcccctgtacccggctgtcccccatctcctgcctattactccccggccacctaccacccactccactccaacctccaagcccacctgggccagctttccccgcctcctgagcaccctggcttcgacgccctggatcaactgagccaggtggaactcctgggggacatggatcgcaatgaattcgaccagtatttgaacactcctggccacccagactccgccacaggggccatggccctcagtgggcatgttccggtctcccaggtgacaccaacgggtcccacagagaccagcctcatctccgtcctggctgatgccacggccacgtactacaacagctacagtgtgtcatagagctggaggcgccccgtccggtcagccctcgcgccctctccttcttgtgccttgagtggcagaggagccgtccagccacaccagctttcctcccaccgctcagggcagggaggtctgaactgcggccccagagcctttggcctaagctggactctccttatccgagtgccgcctctatccccttccccacgttccagcccctgcagcccacattttaagtatattccttcaagtgagttttcctccagcccctgagagttgctgtctcccagtggaatgttcactgacgtcttttcttggtagccatcatcgaaactaatggggggacagacttgatag

SEQ ID NO: 221801 - DNA, 1167 bp, Artificial Sequence
  derived and/or modified sequence
atggccagcctgctgggcgcctacccctggcccgagggcctggagtgccccgccctggacgccgagctgagcgacggccagagcccccccgccgtgcccagaccccccggcgacaagggcagcgagagcagaatcagaagacccatgaacgccttcatggtgtgggccaaggacgagagaaagagactggccgtgcagaaccccgacctgcacaacgccgagctgagcaagatgctgggcaagagctggaaggccctgaccctgagccagaagagaccctacgtggacgaggccgagagactgagactgcagcacatgcaggactaccccaactacaagtacagacccagaagaaagaagcaggccaagagactgtgcaagagagtggaccccggcttcctgctgagcagcctgagcagagaccagaacgccctgcccgagaagagaagcggcagcagaggcgccctgggcgagaaggaggacagaggcgagtacagccccggcaccgccctgcccagcctgagaggctgctaccacgagggccccgccggcggcggcggcggcggcacccccagcagcgtggacacctacccctacggcctgcccaccccccccgagatgagccccctggacgtgctggagcccgagcagaccttcttcagcagcccctgccaggaggagcacggccaccccagaagaatcccccacctgcccggccacccctacagccccgagtacgcccccagccccctgcactgcagccaccccctgggcagcctggccctgggccagagccccggcgtgagcatgatgagccccgtgcccggctgcccccccagccccgcctactacagccccgccacctaccaccccctgcacagcaacctgcaggcccacctgggccagctgagccccccccccgagcaccccggcttcgacgccctggaccagctgagccaggtggagctgctgggcgacatggacagaaacgagttcgaccagtacctgaacacccccggccaccccgacagcgccaccggcgccatggccctgagcggccacgtgcccgtgagccaggtgacccccaccggccccaccgagaccagcctgatcagcgtgctggccgacgccaccgccacctactacaacagctacagcgtgagctag

SEQ ID NO: 221802 - DNA, 1167 bp, Artificial Sequence
  derived and/or modified sequence
atggctagtttgttaggtgcttatccatggcccgaaggactggaatgcccagctctggatgcagagttgagcgatgggcaaagcccacctgctgtgccacgacctccaggtgataaaggcagcgaatcacggatacggcggcccatgaatgccttcatggtgtgggccaaagacgagcgtaaacggctggccgtccagaatcccgatttgcacaacgccgagctttcaaagatgcttggtaagagctggaaggcacttactcttagccagaagagaccatacgtggatgaggctgagagactgaggctgcaacacatgcaagactaccctaactataagtacagacctcggcgcaagaagcaggcgaagagactgtgcaagagagtggacccgggattcctattatcaagcctgagcagagatcagaatgcactccccgagaagcgctccggctctcggggtgcattaggcgaaaaagaagaccgcggtgaatatagcccagggaccgctctgccttcactccgtggctgctatcacgaaggaccagcaggaggtgggggcggcgggaccccttcttccgtagacacttatccttacggattaccgacacccccagagatgagccctttggacgtacttgagccggaacagacatttttctcctctccttgccaggaggaacatggccatccacggcggattccacacctcccagggcacccgtactcgccagaatatgcaccctctcccctccattgctcccatcctttgggctctctggctctcggccaatccccaggggtgtccatgatgtctccagtgcctggctgccctccctcccctgcatattactcacctgccacatatcatcccctgcacagcaatctgcaagcccatctggggcagttgagtccgcctcctgaacatcctggatttgatgctctcgatcagctgtctcaggtcgaactgctcggcgatatggatcggaatgaattcgaccagtatctaaatacgcccggtcaccccgattctgctacgggcgcaatggcactttcaggtcatgtacccgtatctcaggtcactccaacggggcccactgaaactagcctgatttccgtgcttgcggacgcgactgccacatactacaactcctactctgtatcctag

SEQ ID NO: 221803 - DNA, 1323 bp, Artificial Sequence
  derived and/or modified sequence
atgagtatgctcgccgagagaaggcgcaagcagaaatgggctgtggatcctcagaatacagcctggagtaacgacgacagcaagttcggacaacggatgctcgagaagatgggatggagcaaaggcaaaggtcttggcgcccaggaacagggcgccaccgaccacatcaaggtccaagtgaagaataaccacctgggcctgggggcaaccataaacaacgaggataattggatcgcccaccaggacgactttaaccagctgctggctgagctgaatacttgtcacgggcaggagaccacagactcatctgacaagaaagaaaaaaagagtttctcgcttgaagaaaagtctaagatttctaagaatagagtccattacatgaaattcaccaaagggaagagctggaaggcgctgacactctcgcaaaagcgcccatatgtagacgaagcggagcggctgagactgcagcacatgcaagattaccctaactataagtaccggccaagacggaagaagcaggcgaagaggctgtgtaagcgcgttgacccgggattccttttgagctctctgtctcgcgaccaaaatgcactccctgaaaagagatcagggtctcggggcgctttgggagaaaaagaggacagaggagagtattcgcctggcaccgcattaccaagcctacggggatgctatcacgaggggcccgccggcggaggagggggggggacacctagctctgtggacacttacccttatggattgccaacacctcccgaaatgtcacccctcgatgtgctggaacccgagcaaaccttttttagtagtccctgccaggaggagcatggacatcctcggcgaataccccaccttcctggtcacccatattcaccagagtatgcccccagtcccctacattgtagtcaccctttgggtagcctggcactagggcagtcccccggggtatcaatgatgagtccggtgccagggtgtcccccctcaccagcctattactcccctgctacatatcaccctctccattcaaacttacaggcccatctggggcagctgagcccacctccggagcaccccggctttgacgccttggatcagttgtcacaggttgagctgcttggagatatggatagaaacgagtttgatcagtatttgaatacacccggtcacccagatagcgccacaggggctatggcgctgagtggccacgtccccgtttcacaggtgactccaactgggcctacagagacctcccttattagtgtcttggcagatgcaacagcaacatactacaatagctattccgtgtcttag

SEQ ID NO: 221804 - DNA, 1167 bp, Artificial Sequence
  derived and/or modified sequence
atggccagcctgctgggcgcctacccctggccagagggcctggagtgcccagccctggatgctgagctgagtgatggccagagccccccagctgtgcccaggcctcctggggacaagggcagcgagagccgcatccggcggcccatgaatgccttcatggtgtgggccaaggatgagaggaagaggctggccgtgcagaacccagacctgcacaatgctgagctgagcaagatgctgggcaagtcctggaaggccctgaccctgagccagaagaggccctacgtggatgaggccgagcggctgcggctgcagcacatgcaggactaccccaactacaagtaccggcccaggaggaagaagcaggccaagaggctgtgcaagagggtggaccccggcttcctgctgagcagcctgagccgggaccagaatgccctgcctgagaagaggagcggcagcagaggagccctgggggagaaggaggacagaggagagtacagccctggaacagccctgcccagcctgcggggctgctaccacgagggccctgctgggggcggcggcggcggcacccccagctctgtggacacctacccctacggcctgcccaccccacctgagatgagccccctggatgtgctggagcctgagcagaccttcttcagcagcccctgccaggaggagcacggccacccccggcgcatcccccacctgcccggccacccctacagcccagaatatgcccccagccccctgcactgcagccaccccctgggcagcctggccctgggccagagccctggggtgtccatgatgagccctgtgcccggctgcccccccagccctgcctactacagccctgccacctaccaccccctgcacagcaacctgcaggcccacctgggccagctgagccccccacctgagcaccctggctttgatgccctggaccagctgagccaggtggagctgctgggggacatggacagaaatgaatttgaccagtacctgaacaccccaggccacccagacagcgccaccggggccatggccctgagcggccacgtgcctgtgtcccaggtgacccccaccggccccacagagaccagcctcatctctgtgctggctgatgccacagccacctactacaacagctacagcgtgtcctag

SEQ ID NO: 221805 - DNA, 1167 bp, Artificial Sequence
  derived and/or modified sequence
atggccagcctgctgggcgcctacccctggcccgagggcctggagtgcccggcactggacgcagagctatctgatgggcagagccctcccgccgtcccacgcccccctggcgacaagggctcagaatcaaggatcagacgacccatgaatgccttcatggtgtgggcgaaggatgaaaggaaacgacttgccgtacagaaccctgatttgcacaatgcagaactgagcaagatgctaggcaagagctggaaagccctaacattgagccagaagcgcccctatgtggacgaagccgaacgactacgcctgcagcatatgcaggactaccctaactacaaatacagacctaggagaaagaagcaggcaaaacggctgtgcaagcgagtggaccccgggttccttcttagcagcctatctcgcgaccaaaacgcactgcctgagaaacgctctggctcacggggcgcacttggcgagaaggaggatcgaggggaatactccccgggaacagccttgccatctcttagaggctgctatcatgagggccctgcggggggtgggggtggtgggacaccttcctctgtggatacctacccttatgggttaccaaccccacctgagatgtctcctctggacgtgctcgaaccagagcagaccttttttagctcaccatgtcaggaagagcatgggcaccccaggcgaattccacaccttcctggccatccctattctcccgaatacgctcccagccccttacactgttcacaccctctcgggtcgttggccctcggccagagccctggtgtgtccatgatgtctcctgttcctgggtgccccccatccccagcgtattattctcctgcaacgtaccacccccttcattctaatctccaggcacatctcgggcaactctctccaccccctgaacacccagggtttgacgccctggatcagctcagccaggtcgaactccttggggacatggatcggaatgagttcgatcaatatctgaatacccctgggcatccagattctgctactggcgctatggcactgtcaggtcacgtgcccgtctcccaggtgacacctactgggccaacagagacatcgctcatttccgttttggctgacgccaccgcaacttattacaatagctactctgttagctag

SEQ ID NO: 221806 - DNA, 1323 bp, Artificial Sequence
  derived and/or modified sequence
atgagcatgctggccgagcggcggcggaagcagaagtgggccgtggacccccagaacacggcttggagcaacgacgactctaaattcggtcagcggatgctggagaagatgggatggtccaagggcaaaggactgggggctcaagaacagggtgccacagaccacatcaaagtccaggtgaaaaataaccatctggggctcggcgccactattaacaatgaggacaattggatagcacaccaggatgattttaaccagctcctggccgaactgaatacctgccacggtcaggagactactgacagctctgacaaaaaggagaaaaaatctttttctctggaagaaaagtcaaagatctccaagaatagggtgcattacatgaaattcactaagggcaagagttggaaggccctcactttgagtcaaaagagaccatacgtggatgaggccgagcggctacgattgcagcatatgcaggattaccccaactacaagtatcgacctcgccgcaagaaacaggccaagagattgtgcaagagagttgatcccggattcttgctgagttctttatcgcgggaccagaacgccctgccagaaaagaggtcaggcagcaggggagccctcggcgaaaaagaggaccggggagaatacagtcctgggacagcactcccaagcctccgtggttgctaccacgaggggccagctggtgggggaggtggcggcaccccctcatccgtggatacatacccttatggcctccccacaccccccgagatgtcgcccttggatgttctggagcccgagcaaacctttttttccagtccctgccaagaagagcatggacaccccagacggatacctcacctccctggccacccttacagtcctgaatacgctccctcgcctttacactgttcccacccgctgggcagtttggcactgggccagtctcctggcgtgtcgatgatgagtccagttccgggctgtccaccaagcccggcctattactctcctgccacgtatcaccctctgcactctaatctccaggcgcatttgggacagctgtctcctcctcccgagcaccctggcttcgacgctctggaccaactctctcaggtggaactgctaggtgacatggatcgcaacgaattcgaccaataccttaacacccccggacaccctgattctgctaccggagctatggctctgtcagggcatgtccctgtttcccaagttaccccaactgggccaactgagacgtccctgatctctgtgctagctgacgctactgctacttactacaacagttattctgtgagttag

SEQ ID NO: 221807 - DNA, 1167 bp, Artificial Sequence
  derived and/or modified sequence
atggcttccctgctgggcgcttatccttggcctgaaggcctggaatgtcccgcactcgatgcagaactgagcgacgggcaatcccccccagccgtgcccagacccccaggcgataaaggctctgagagtaggatccggagacctatgaacgctttcatggtgtgggccaaggacgagcgcaaacgtttagctgtgcagaaccccgacctccataacgcagaactcagcaagatgctcggcaagtcttggaaagcactgacgctatctcagaaaagaccttatgtggatgaggcggaaaggctcaggcttcaacatatgcaggactacccaaactataaataccgtcccaggcgtaaaaaacaggcaaagcgcctatgcaaacgggtcgatccaggatttcttctgtcatccctgagtagagaccagaacgctttgcccgaaaagcggtccgggtccaggggcgctctcggagaaaaagaggaccgcggagaatatagtccagggaccgctttaccttctttgcggggatgctatcacgaagggcctgccggagggggtggtggcggaaccccatcttcagtggatacctatccctatggtctccccacaccccctgagatgtcccctttggacgtgctcgagcccgagcagacatttttctcgtctccttgtcaggaggaacatgggcatccccgtaggatcccacatttaccaggacatccttattcccctgagtatgcaccctccccactgcactgttcccacccgcttggttctctcgctctgggtcagtcacctggagtgtctatgatgtcccccgtccccggatgtcccccatctcctgcctactactccccagcaacttaccaccccctacattctaacttgcaagctcatttgggccagttgagcccaccgccagagcacccaggatttgatgcgttggaccagctgagccaagtggagttgctcggagacatggaccgcaacgagttcgaccagtatctgaatacccctgggcatccagacagtgcgacaggtgcgatggcactgtctggacatgtccccgttagtcaggtgactccaactggaccgactgaaacaagtttgatatccgtcttggctgacgcgacggccacatactataattcttatagcgtgagctag

SEQ ID NO: 221808 - DNA, 1323 bp, Artificial Sequence
  derived and/or modified sequence
atgagcatgctagcagaacggcgtcgcaagcagaaatgggcggttgaccctcagaacactgcgtggagtaatgatgactctaaatttggacaacggatgctggaaaaaatggggtggtccaagggcaagggactgggcgctcaggagcagggggcaaccgaccatataaaagtacaggtgaagaacaatcacctgggactgggagctacgataaacaatgaggataattggatcgcccaccaggatgattttaatcaattgttagccgagctcaatacatgtcacgggcaagaaaccacggatagtagtgacaagaaagaaaagaagagtttttctctcgaggagaaaagcaagatctctaaaaacagagttcattacatgaaattcacaaagggcaagagctggaaggccttaacattgagtcagaaaagaccatatgttgatgaagcggagcggctccggctgcaacatatgcaggactatccaaattataagtatcgacccagacggaaaaagcaagctaagcgtctgtgcaagcgcgtggatcccggatttctgcttagcagcctttctagggatcagaatgcattgcccgaaaaaaggtcaggctcacgtggggctcttggggagaaggaggatcgcggagaatactccccaggcaccgcattaccctccttgcggggatgttaccatgagggccctgcgggtggtggcggtggaggtaccccatcctccgttgacacatacccctatggactgccaacacccccagagatgtctcccctggacgtgctggagcctgaacagactttttttagcagcccctgccaggaggaacacggacaccccagaagaattcctcacttacccggtcatccatactctcccgagtacgcaccgtcacctttgcattgttcacatccactgggaagcctggctctaggacaaagccctggcgtctccatgatgtctcccgtcccaggatgtccgccaagccccgcttattactcacccgctacgtatcaccctctccacagcaacctgcaggcccacctcggccagctctctccacctcctgagcaccctggctttgacgcccttgatcagctgtctcaagttgagctgctgggcgacatggataggaacgagtttgatcaatacttaaacacaccaggccacccggactccgctactggcgctatggccctctccgggcacgtgcccgtgagccaggtaacacctactggtcctacggaaactagcctaatcagcgtgctagctgatgctaccgcaacgtattataactcctacagcgtgtcatag

SEQ ID NO: 221809 - DNA, 3216 bp, Artificial Sequence
  derived and/or modified sequence
aagttggacgccccgacccgtgcgagggccaggtccgcgcctgccccgccaggcgaagcgaggcgacccgcgtgcggccatggcttcgctgctgggagcctacccttggcccgagggtctcgagtgcccggccctggacgccgagctgtcggatggacaatcgccgccggccgtcccccggcccccgggggacaagggctccgagagccgtatccggcggcccatgaacgccttcatggtttgggccaaggacgagaggaaacggctggcagtgcagaacccggacctgcacaacgccgagctcagcaagatgctgggaaagtcgtggaaggcgctgacgctgtcccagaagaggccgtacgtggacgaggcggagcggctgcgcctgcagcacatgcaggactaccccaactacaagtaccggccgcgcaggaagaagcaggccaagcggctgtgcaagcgcgtggacccgggcttccttctgagctccctctcccgggaccagaacgccctgccggagaagagaagcggcagccggggggcgctgggggagaaggaggacaggggtgagtactcccccggcactgccctgcccagcctccggggctgctaccacgaggggccggctggtggtggcggcggcggcaccccgagcagtgtggacacgtacccgtacgggctgcccacacctcctgaaatgtctcccctggacgtgctggagccggagcagaccttcttctcctccccctgccaggaggagcatggccatccccgccgcatcccccacctgccagggcacccgtactcaccggagtacgccccaagccctctccactgtagccaccccctgggctccctggcccttggccagtcccccggcgtctccatgatgtcccctgtacccggctgtcccccatctcctgcctattactccccggccacctaccacccactccactccaacctccaagcccacctgggccagctttccccgcctcctgagcaccctggcttcgacgccctggatcaactgagccaggtggaactcctgggggacatggatcgcaatgaattcgaccagtatttgaacactcctggccacccagactccgccacaggggccatggccctcagtgggcatgttccggtctcccaggtgacaccaacgggtcccacagagaccagcctcatctccgtcctggctgatgccacggccacgtactacaacagctacagtgtgtcatagagctggaggcgccccgtccggtcagccctcgcgccctctccttcttgtgccttgagtggcagaggagccgtccagccacaccagctttcctcccaccgctcagggcagggaggtctgaactgcggccccagagcctttggcctaagctggactctccttatccgagtgccgcctctatccccttccccacgttccagcccctgcagcccacattttaagtatattccttcaagtgagttttcctccagcccctgagagttgctgtctcccagtggaatgttcactgacgtcttttcttggtagccatcatcgaaactaatggggggacagacttgatagccaaggtcccttctggtccagttttctgatttagggttctctcaagattaataaaggaagatggggaaatttgactcattaatgagctcgctaacctacgatctggtgataattttgtgtgcacagcccaaggaccacgaggctttctgcactttctgcacccccttccaaagtgaccacaaaatttcaaagggactcatacaatttgagaaaaaacagtcaacctgatttgagaaattaaccagtatggctaactatatcacagaaaatgggattgagttaaaactattttattttaaatatacattttaaagcagttctttttttttgttaatttgtttattatacacacacttcaagagaatatgcacagtctaggccgggcacggtggctcacgcctgtaatcccagcactttgggaggccgaggcatgtggatcacctgaggtcaggagtttgagaccagcctagacaacatggtgaaaccttgtctctatgaaaaatacaaaatttgctgggagtggtggtgcatgcctgtaatcccagctacttggaaggctgaggcaggagaatgtcttgaacctaggaggtggaggttgcagtgagctgagattgcaccattgcactccagcctgtgcaacaagagtgaaactccatttcaagaaaaaaaaaaaaaaaagaatatgcacagtctgaatgtataccaggagtgtgagagacacatgcccacttcatgcaactcctaaactcaaagtctaaatcagatatttttattaacaatgacaacttgttgccaactccctgtttctaatgaccaaagacccagggtacctaaaaggactttgcaaccaagcaaagtcactgtcttcaaatctggatacacactttcccctctgtagattcaaaaggtgcttccttcccggctgtctccagcttccttactctcttttctgggatttctttttctcttctttctgctcttcctccactgctgaactggtccctaactgaaacagcccctgacttatcccaagcatgcttcctttagctgctgtgagaatttgtcttcctcaccagccaggtcctcaggcaaagtcctcagccagtgctttagagcaacttcccgcaaatcagaaactcactgtgattccaaaaatgtttctgagccctggacccctgcccccaaaatattttcatctttcccccaaacctcctttaaaggagcatgcataacagtgtgctgaaagacagttgttggttttttgattttagcatattatttcctgtatgaaatatgttttatataatctcctattatttttatcttatgttttgtattgttgataaatcctttttgtccttctaagatgtcctattgtaaaatcacttataaggtatgattactctttatgctattactttatatgccatttggtaataaatagtaaattgttgatgatatgattgactgatgcgcagtccagagcatgtatgaataatctcataaaacagtatcacagacattaagctaaactgtttcgtttttttgaaagaacaactcatactttggaacagttgtcaatattaatttgttgcaaatatttaatttaaataaacatttttgtaccatga

SEQ ID NO: 221810 - protein, 232 aa, Artificial Sequence
  derived and/or modified sequence
MAGDTEVWKQMFQELMREVKPWHRWTLRPDKGLLPNVLKPGWMQYQQWTFARFQCSSCSRNWASAQVLVLFHMNWSEEKSRGQVKMRVFTQRCKKCPQPLFEDPEFTQENISRILKNLVFRILKKCYRGRFQLIEEVPMIKDISLEGPHNSDNCEACLQGFCAGPIQVTSLPPSQTPRVHSIYKVEEVVKPWASGENVYSYACQNHICRNLSIFCCCVILIVIVVIVVKTAI

SEQ ID NO: 221811 - DNA, 699 bp, Artificial Sequence
  derived and/or modified sequence
atggccggtgacaccgaggtgtggaaacagatgtttcaggagctaatgcgagaagtcaagccctggcacaggtggactctgcggccagataagggtcttcttcctaatgtgttaaaacctggatggatgcaataccagcaatggacatttgcacggtttcagtgctcttcctgttctcggaattgggctagcgcccaggtactcgtgctgttccacatgaactggagcgaggagaagagtcggggccaagtgaagatgcgggttttcacccaaagatgcaaaaaatgcccacaacctctgtttgaagacccagagttcactcaggaaaatatctctcgcattctaaaaaacctggtgttccggatcctgaagaagtgctatagaggacggtttcagctcatcgaagaagtcccaatgattaaggatatctcactagagggtccccacaactcagacaattgcgaagcttgcctgcagggcttctgcgcaggcccaattcaagtaacttctctgccacctagccagactcctagggttcactcaatttataaagtggaggaggttgtgaagccttgggccagtggcgaaaatgtctattcttatgcttgccagaaccacatctgccgtaatcttagcatattctgttgttgcgtgatcctgattgtcatagtggtgattgttgtgaagactgcaatctag

SEQ ID NO: 221812 - DNA, 699 bp, Artificial Sequence
  derived and/or modified sequence
atggccggggacacagaggtgtggaagcagatgttccaggagctgatgagggaggtgaagccctggcaccgctggaccctgcggccagacaagggcctgctgcccaacgtgctgaagccaggctggatgcagtaccagcagtggacctttgcccgcttccagtgcagcagctgcagcaggaactgggccagcgcccaggtgctggtgctcttccacatgaactggagcgaggagaagagccggggccaggtgaagatgagggtcttcacccagcgctgcaagaagtgcccccagcccctgtttgaggaccctgagttcacccaggagaacatcagccgcatcctgaagaacctggtgttccgcatcctgaagaagtgctaccggggccgcttccagctgattgaggaggtgcccatgatcaaggacatcagcctggagggcccccacaacagcgacaactgtgaggcctgcctgcagggcttctgtgccggccccatccaggtgaccagcctgccccccagccagaccccccgggtgcacagcatctacaaggtggaggaggtggtgaagccctgggccagcggggagaatgtgtacagctatgcctgccagaaccacatctgcaggaacctgagcatcttctgctgctgcgtcatcctgattgtgattgtggtgattgtggtgaagacagccatctag

SEQ ID NO: 221813 - DNA, 699 bp, Artificial Sequence
  derived and/or modified sequence
atggccggcgacaccgaggtgtggaagcagatgttccaggagctgatgagagaagtcaagccctggcaccgctggacactcaggcccgacaagggactgttgcccaatgtgctaaagcctggatggatgcagtaccagcagtggacttttgcccggttccagtgtagtagctgttcgcgaaactgggcctcagcacaggtgctggtactgtttcatatgaactggtcggaggagaagtccagagggcaagttaagatgagagtatttacacaacggtgcaagaaatgtccgcaaccacttttcgaggaccccgaatttacccaggagaacatttctagaatcttaaaaaatctggtgtttaggatactgaagaaatgctaccgtggtaggttccagctgatcgaagaggtcccgatgatcaaagacatctcgctggagggcccgcataattcagataactgtgaagcctgtcttcagggcttctgtgccgggccaattcaggttacctctctgccaccttcacagaccccgcgagttcattctatatacaaggtcgaggaggtcgtgaagccatgggcctctggtgagaacgtttactcctatgcttgccaaaaccatatatgtagaaatctgagtattttctgctgctgcgttatcctcattgtgatcgtggtaattgtagtgaaaaccgcaatctag

SEQ ID NO: 221814 - DNA, 699 bp, Artificial Sequence
  derived and/or modified sequence
atggccggagatacagaagtgtggaagcagatgttccaggaactgatgcgcgaggtgaaaccatggcatcgatggacacttagaccagataaggggctgctgcctaatgtcttgaaacccggatggatgcaataccagcagtggaccttcgccagattccagtgttcatcctgctcacgaaattgggcttccgcacaggtgctcgtccttttccacatgaactggtcagaagaaaagtctcgtgggcaagttaagatgcgcgtgttcacccagcgatgcaaaaaatgtcctcaaccactcttcgaggatccagagttcacccaggagaacatctccaggatcctaaaaaatttggtgttcagaatccttaagaaatgctaccgagggagatttcaactaattgaagaggttccgatgattaaagacatctcattggagggtccacacaactccgacaattgtgaagcatgcctgcagggattttgtgcgggaccaatccaggtgacctcacttccacctagccagacacccagggtacattctatttacaaggtggaagaagtggtcaagccctgggcctccggagagaacgtgtacagctacgcttgtcaaaaccatatctgcaggaatttaagtatattctgctgctgtgtgatcctgattgttatcgttgtgattgttgtgaagaccgcgatttag

SEQ ID NO: 221815 - DNA, 1321 bp, Artificial Sequence
  derived and/or modified sequence
tttctcatgggtgggcagccttggctgtctgccggaacgtaaagagcatggagcaaggacatgggaatccgaatcccgctgaggtcccaggaccacttcatccttcttccctgtgcctctcctccccagcatgagcacagcagcctgatggagaaggattttccaatgttagaactggaaagaacacctgtagcctgtctccaccgtttacagtggtgctggaagtgaaaagatgtgttccaggtcacaggcaggtagacagcggagccagactgaaattcactcctcctgatttggagtttagagctcttctttggcaacattttgatgaataaaatcacaagttctgtgtcttttgaaattccttgtggagcctagtgccatcctctgaacttggagccaactgacctttgtccttggggcagagacatggttcatgggcccaatccaggtcctcaaagggagggcaggtctgagtccttgccctctgaagtcagaaacctcatctcccactacagacctgccagggcccaggagagctcgacccacccaggcacaccatagccccagagatggctggggacacagaagtgtggaagcaaatgtttcaggagttaatgcgggaggtgaagccatggcacaggtggaccctgagaccagacaagggccttcttcccaacgtcctgaagccaggctggatgcaataccagcagtggaccttcgccaggttccagtgctcctcctgctctcgtaactgggcctctgcccaagttctggtccttttccacatgaactggagtgaggagaagtccaggggccaggtgaagatgagggtgtttacccagagatgtaagaagtgcccccaacctctgtttgaggaccctgagttcacacaagagaacatctcaaggatcctgaaaaacctggtgttccgaattctgaagaaatgctatagaggaagatttcagttgatagaggaggttcctatgatcaaggacatctctcttgaagggccacacaatagtgacaactgtgaggcatgtctgcagggcttctgtgctgggcccatacaggttacaagcctccccccatctcagaccccaagagtacactccatttacaaggtggaggaggtagttaagccctgggcctcaggagagaatgtctattcctacgcatgccaaaaccacatctgtaggaacttaagcattttctgctgttgtgtcattctcattgttatcgtggtgattgttgtaaaaactgctatatgagccttggaaacatgaagctaagtcagaaaaaaaatcagatacaaaaagtc

SEQ ID NO: 221816 - DNA, 699 bp, Artificial Sequence
  derived and/or modified sequence
atggccggcgacaccgaggtgtggaagcagatgttccaggagctgatgagagaggtgaagccctggcacagatggaccctgagacccgacaagggcctgctgcccaacgtgctgaagcccggctggatgcagtaccagcagtggaccttcgccagattccagtgcagcagctgcagcagaaactgggccagcgcccaggtgctggtgctgttccacatgaactggagcgaggagaagagcagaggccaggtgaagatgagagtgttcacccagagatgcaagaagtgcccccagcccctgttcgaggaccccgagttcacccaggagaacatcagcagaatcctgaagaacctggtgttcagaatcctgaagaagtgctacagaggcagattccagctgatcgaggaggtgcccatgatcaaggacatcagcctggagggcccccacaacagcgacaactgcgaggcctgcctgcagggcttctgcgccggccccatccaggtgaccagcctgccccccagccagacccccagagtgcacagcatctacaaggtggaggaggtggtgaagccctgggccagcggcgagaacgtgtacagctacgcctgccagaaccacatctgcagaaacctgagcatcttctgctgctgcgtgatcctgatcgtgatcgtggtgatcgtggtgaagaccgccatctag

SEQ ID NO: 221817 - protein, 181 aa, Artificial Sequence
  derived and/or modified sequence
MASAGSGMEEVRVSVLTPLKLVGLVCIFLALCLDLGAVLSPAWVTADHQYYLSLWESCRKPASLDIWHCESTLSSDWQIATLALLLGGAAIILIAFLVGLISICVGSRRRFYRPVAVMLFAAVVLQVCSLVLYPIKFIETVSLKIYHEFNWGYGLAWGATIFSFGGAILYCLNPKNYEDYY

SEQ ID NO: 221818 - DNA, 546 bp, Artificial Sequence
  derived and/or modified sequence
atggccagcgccggcagcggcatggaggaggtgagagtgagcgtgctgacccccctgaagctggtgggcctggtgtgcatcttcctggccctgtgcctggacctgggcgccgtgctgagccccgcctgggtgaccgccgaccaccagtactacctgagcctgtgggagagctgcagaaagcccgccagcctggacatctggcactgcgagagcaccctgagcagcgactggcagatcgccaccctggccctgctgctgggcggcgccgccatcatcctgatcgccttcctggtgggcctgatcagcatctgcgtgggcagcagaagaagattctacagacccgtggccgtgatgctgttcgccgccgtggtgctgcaggtgtgcagcctggtgctgtaccccatcaagttcatcgagaccgtgagcctgaagatctaccacgagttcaactggggctacggcctggcctggggcgccaccatcttcagcttcggcggcgccatcctgtactgcctgaaccccaagaactacgaggactactactag

SEQ ID NO: 221819 - DNA, 546 bp, Artificial Sequence
  derived and/or modified sequence
atggcctctgctggatctggtatggaggaggtgcgggtctcagtgttgaccccgcttaaactggtgggtttggtgtgcatcttcttggccttatgcctggacctgggcgcagttctcagcccagcctgggtgactgctgaccaccagtattatcttagcttatgggagagctgtagaaaacccgcttcgctcgacatttggcactgcgagtccacattaagcagcgactggcaaattgcaaccttggctctgttgctaggcggggccgccattatcctcatcgcattcctcgtgggcctgatttcaatttgcgttggctcacgacggagattctatcgcccagtggccgtgatgctgtttgcagctgtcgttctccaggtatgctctctggtgctctatcccatcaaattcattgagacagtgtccctgaagatctatcacgagttcaactggggctacggactggcatggggcgcgacaatcttctcctttgggggagctatcttgtattgcttaaaccccaagaattatgaggattattactag

SEQ ID NO: 221820 - DNA, 546 bp, Artificial Sequence
  derived and/or modified sequence
atggccagcgctggcagcggcatggaggaggtgcgggtgtctgtgctgacccccctgaagctggtgggcctggtgtgcatcttcctggccctgtgcctggacctgggcgctgtgctgagccctgcctgggtgacagctgaccaccagtactacctgagcctgtgggagagctgcaggaagccagccagcctggacatctggcactgtgagagcaccctgagcagtgactggcagatcgccaccctggccctgctgctgggcggggccgccatcatcctgattgccttcctggtgggcctcatcagcatctgtgtgggcagcagaagacgcttctacagacctgtggccgtgatgctgtttgctgctgtggtgctgcaggtgtgcagcctggtgctgtaccccatcaagttcatcgagaccgtgtccctgaagatctaccacgagttcaactggggctacggcctggcctggggcgccaccatcttctcctttggaggagccatcctgtactgcctgaaccccaagaactatgaggactactactag

SEQ ID NO: 221821 - DNA, 546 bp, Artificial Sequence
  derived and/or modified sequence
atggccagcgccggcagcggcatggaggaggtgcgggtgagcgtgctgacgccccttaagctcgttggactcgtgtgtattttcttagccctgtgcttagacttgggcgccgtgctttcaccggcttgggttacagctgatcaccagtattatctgtctctttgggaaagctgtcgtaaacccgcctccttggatatatggcactgcgagagcacactctcttctgactggcagatcgctactttggcactgctgctcggcggagctgctatcatacttattgccttccttgtgggtcttatatctatttgcgtgggatccaggaggagattctatagacccgtagccgtgatgctcttcgccgcggttgttttacaggtgtgcagtctagtattgtacccaatcaagtttattgagacagtctcattgaagatctaccatgaatttaattggggttacgggctggcctggggagccacgatttttagctttggaggggccatcttgtattgtttgaaccctaagaactatgaggattactattag

SEQ ID NO: 221822 - DNA, 546 bp, Artificial Sequence
  derived and/or modified sequence
atggcttcagccggatccggaatggaagaggtgagagtatctgtcctcacgccgctcaagttagtgggcctcgtttgcatcttcttagccctgtgcctggatctcggagccgtcttgagtcctgcctgggtcactgcagaccaccagtactaccttagtctatgggaatcttgtagaaagcctgcttcactggacatctggcactgcgaaagcaccttgtcatctgactggcagatcgcaaccctcgccctgctgctagggggtgcagcaataatcctgatcgcattcttggtgggactgatcagcatctgtgtgggttcaaggcgccgattctacagacctgtggccgtgatgctctttgcggctgttgtccttcaggtgtgcagtctggtcctctacccgataaagtttattgagaccgttagcctgaagatttatcacgagttcaattggggctatggactcgcatggggcgctaccatcttctcttttggtggcgcaattttgtactgtttgaacccaaagaattacgaggactattattag

SEQ ID NO: 221823 - DNA, 4054 bp, Artificial Sequence
  derived and/or modified sequence
ggcagagcgcggcgcggggccggcggcgaaggtccggggtggaatcgacgtcgctgcggctgccgacgacccacacccggccggccgcctccgcagacccaccttggccgcgcggcagggggcgcgcagagccccgagggagcgagtccccgcgcgtggcagctcggcggcttctcccttcgggaggtccggctcccggctctccggacccgcctggcgtcctcgcctgcggcggggcggacgacagcggcgcccaggaatggcttcggcgggcagcggcatggaggaggtgcgcgtgtcggtgctgacccccttgaagctggtcgggctggtgtgcatcttcctggcgctgtgtctggacctgggggcggtgctgagcccggcctgggtcacagctgaccaccagtactacctgtcgttgtgggagtcctgccggaaacccgccagcttggacatctggcactgcgagtccacgctcagcagcgattggcagattgctactctggctttactcctgggcggcgctgccatcattctcattgcattcctggtgggtttgatttctatctgcgtgggatctcgaaggcgtttctatagacctgttgcggtcatgctttttgcagcagttgttttacaggtttgcagcctggtcctttacccaatcaagttcattgaaactgtgagcttgaaaatttaccatgagttcaactggggttatggcctggcctggggtgcaactatattttcgtttgggggtgccatcctttattgcctgaaccctaagaactatgaagactactactagaaccaatagtctcaaagtaaaaacaaccaccaccatccaacaaaaggattacgtctgcatcttttctaacttactattttctaaaacacttgtggagcatcaagcagtttgctcagttgatttaatcttttttgccttttggctgtcaacatcataaccagcttttacatccattttagaaatctgcacaaattaagagagctgattagacataggcaaatgctgcaaacttccaatatgttcatatcgtttttcttgacaaatgaagggtctatatgacagcaaccattgtgagaaactagttggaatgagatttgcctcaatctcctattgcctgcaggggagcagttggcataagcaacatttagaagttcctttgcgctgacaaggattccactgttagagcccttaccgcctgcttatcctacccaatgactacattggctgttggttatttgcttgagtgagcccttgaaaaatgaactgcccttcagcatctaatgggagttgtgaatgtaactggttaatgatacacattccaccttcaggaacactctttttaatgggaggttatgctttggcaatcagcgtctccctgggaagagagtcaagacttggagacatgtgcttctcattatgtggttagaaattggtgcctcagccctatctagactggggaaaaattgaggatctctgtttttcctggggcaaacagaaagaaatctgcatgagttgcttttgtaccctttaaatcatttgccaaacattgcagcaaacaagtgtgcgtatgtaacaagcttcactgtttttatagaaggtgaaccattagtataaatggtaataagttgttccctaaccctccacatacatttgcctatcacacgtaaaattaatatttactctagtgaagtggtttgagcactaaccttgtacacattgttaagaggcttagattggtattcatacttatttaccatacaaaagtatggtaccttaaagcttttgctctatgttctttactgtttcactggaaagtgtcaatagagttgcctaagaataaaaattgaaatggtgttaatctgaaaattaatgattctctgtaagcactgtagttgaaaagagagtagcaattaggatgatcattttgtgtaaaattcattaaaatagaaggctgctattttttgcaagtattttaaatgtcttcatttttttaagaaaggaatagcgatagatttatataaatatctaaatgtctcagtagaggagtagaattcatctggttatcacctggtcctctgaagttaactgatgggctaaccgatttgtgcacacacttaggatggatttatgttaagggaattacttactgactgttcaatggaaggaagtattaataatagggaataagtttgcaactaatctcatgctgcaaacttgtgttaattctgtttaatatacaaatttggatagcttaattataaacatatttttatatcaaatatacagttctaatataaaagttataaataattatttttgttaacaaagacactaaaacagtatgttctggttttggccctcttgcagaaagaagcattagaaaaattactttaaaagtagctatatgttactgtattgcaaaatctgttaagagcaggaccacatcgatagtatttaataatttgttttacctcccaaaacacagttcttctttcagcttgtcttaagaatggttgccaaaaacaacagccaaaaaaaaaaaacctattttattatccaaatgctagaaaacacacatgaattttctataaaatcacgaatatgaagtaccaggtttagtcttactttagcaatgatagacaaaagcgaataaatacatcacagacagaaacctttataaaaatatatgattctataaagaatcattagaaattatgagtggaaattctccagaaagatagtattatagagtcttttgaagcaattttttgagaaatagtaaaatctggggcagagtgtcttgcagttaattgcatattgtcagagcagcatgagaaatatgatatttggatagggatttcagcaactaaacattctctgttctgagatctctttattcctgaataatgaaagaatagtactttggtgctgacaccaatgaggcacttctcttggtcctagtagaggatgcagtgtactgttaaaccaatatcatcacatctcgagtcttatcaagttttcattctctgtcaatatgacaagctcaaagtgacagaatatgttataggttgaagcacacatatttgcagtttactgaaaagtagatttcttatgtgacttttttcccttctcagcaaagagccctacactagatttctaccatcactaatatttggaagtatttcattactaacaatctcagtacaacatgaaaattgttgcttctcatctaaaatacaattttgtctatcagaataaacacaagtgaaattttcacctacattaacattatgtctttgcagctttaggtttgttagatgtgttcttaagcataatttttagccacaaacccattgttagatagatatctatggatatagatctacatctatagatatagatatacacacatatatatactcacacacatatagcataaaatactcagcagggctagttattccgatttcttgcacaattatttagctttttgtaagttcaacatgtaaattttaaagacataaatatagagagacttatgtgtttgaatataaatgatatatatggattagcatgtacctgtatattattaaacatgcaatgaactgactggtaagtgacgtctaattgtatggctagcaatgtaatttattcagactgtatttttgtacagagcagtgcactctaacctatgcctctgtgtcctctttaatgcctaaagctgtgcctagaaatttcatctgtcttaaaagtaaaatatacttcatgctgtttatgctattagtttctgtactgctattctatatttattatttttaaatatatgacatgtttactacttaaacatgaattcatggtatcctggttattttttttaagtcatctgggggaaaacctgtttatcactccagtgattttgagtttgcagtttcacaatcagttcttcatttcatgatttttgtagttgacatgaagtcatctatgtggaaaaaaataaaaataaaagtgatttcacggatgtggtttgaa

SEQ ID NO: 221824 - protein, 444 aa, Artificial Sequence
  derived and/or modified sequence
MEEEGKKGKKPGIVSPFKRVFLKGEKSRDKKAHEKVTERRPLHTVVLSLPERVEPDRLLSDYIEKEVKYLGQLTSIPGYLNPSSRTEILHFIDNAKRAHQLPGHLTQEHDAVLSLSAYNVKLAWRDGEDIILRVPIHDIAAVSYVRDDAAHLVVLKTAQDPGISPSQSLCAESSRGLSAGSLSESAVGPVEACCLVILAAESKVAAEELCCLLGQVFQVVYTESTIDFLDRAIFDGASTPTHHLSLHSDDSSTKVDIKETYEVEASTFCFPESVDVGGASPHSKTISESELSASATELLQDYMLTLRTKLSSQEIQQFAALLHEYRNGASIHEFCINLRQLYGDSRKFLLLGLRPFIPEKDSQHFENFLETIGVKDGRGIITDSFGRHRRALSTTSSSTTNGNRATGSSDDRSAPSEGDEWDRMISDISSDIEALGCSMDQDSA

SEQ ID NO: 221825 - DNA, 1335 bp, Artificial Sequence
  derived and/or modified sequence
atggaggaagaagggaagaagggcaaaaaacccgggattgtaagcccattcaaacgcgtttttcttaaaggcgagaagtcccgggataagaaggctcacgagaaggtcacagagagaaggccactacatacagtagtccttagcctccctgaacgcgtggagccagatagactgctgagtgactacatcgagaaggaagtaaagtaccttggccaactaaccagtatcccagggtacctgaatccttccagtcggaccgaaatccttcacttcattgataacgcaaaaagagcccaccaactgccgggacatctcacccaggagcacgatgccgtcctgtcactgtcggcctacaacgtgaaacttgcctggagagatggtgaggacatcatactgagggtccccatccacgacatcgctgctgtgtcctatgtcagggacgatgctgcccacctggtggtactgaagaccgcacaggatcctgggatcagcccatcccaatcactgtgcgccgagagcagccgtggactgtctgctggtagtctgtccgagagcgctgtgggcccagtcgaagcctgttgcctggtcattctggcagcagagtccaaggtggcagcagaggaactctgttgtctgctgggacaggtgttccaggtggtgtataccgaatccacaattgacttccttgaccgcgcaatctttgatggcgctagcacccctacacatcacctatccttacactcggatgacagctcgacaaaggtggatattaaggaaacatatgaagttgaggcaagtaccttttgctttcccgagtctgtagacgttgggggtgctagcccccatagcaaaaccatttcagaaagcgagctgagcgcatcagcaaccgagctcctccaggattatatgctcacactccgaaccaaactatctagtcaggagattcagcaattcgccgccctactccatgagtatcggaacggagcctccatccacgaattctgcatcaacttgcggcagttatacggcgattcccgcaaatttttactgctgggattaagacccttcatccccgaaaaggacagtcagcactttgaaaactttttggagactatcggggtcaaagacggaaggggaatcattactgattccttcggcagacatcgcagagcattaagtactaccagttctagcacaacaaacggcaaccgagctactggttcctctgatgaccggtccgccccatccgaaggggacgagtgggatcggatgattagtgacattagttcagatatcgaggccctcggttgcagcatggaccaggattctgcctag

SEQ ID NO: 221826 - DNA, 1335 bp, Artificial Sequence
  derived and/or modified sequence
atggaggaggagggcaagaagggcaagaagccaggcatcgtgagccccttcaagagggtcttcctgaagggggagaagagccgggacaagaaggcccacgagaaggtgacagaaagaagacccctgcacacagtggtgctgagcctgcctgagcgggtggagccagaccggctgctgagtgactacatcgagaaggaggtgaagtacctgggccagctgaccagcatccctggctacctgaaccccagcagcaggacagagatcctgcacttcatcgacaatgccaagagggcccaccagctgcccggccacctgacccaggagcatgatgctgtgctgagcctgagcgcctacaacgtgaagctggcctggagagatggagaggacatcatcctgcgggtgcccatccatgacattgctgctgtgtcctatgtgagagatgatgctgcccacctggtggtgctgaagacagcccaggaccccggcatcagccccagccagagcctgtgtgccgagagcagccggggcctgtctgctggcagcctgtctgagagcgctgtgggccctgtggaggcctgctgcctggtgatcctggccgctgagagcaaggtggccgctgaggagctgtgctgcctgctgggccaggtgttccaggtggtgtacacagagagcaccatcgacttcctggaccgggccatctttgatggagccagcacccccacccaccacctgagcctgcacagtgatgacagcagcaccaaggtggacatcaaggagacctatgaggtggaggccagcaccttctgcttccctgagagcgtggatgtgggcggggccagcccccacagcaagaccatcagcgagagcgagctgagcgccagcgccacagagctgctgcaggactacatgctgaccctgcggaccaagctgagcagccaggagatccagcagtttgctgccctgctgcacgagtacagaaatggagccagcatccacgagttctgcatcaacctgcggcagctgtatggagacagcaggaagttcctgctgctgggcctgcggcccttcatccctgagaaggacagccagcactttgagaacttcctggagaccatcggcgtgaaggatggccggggcatcatcacagacagctttggccgccacagaagagccctgagcaccaccagcagcagcaccaccaatggaaacagagccaccggcagcagtgatgacagaagtgcccccagtgaaggagatgagtgggacaggatgatcagtgacatcagcagtgacatcgaggccctgggctgcagcatggaccaggacagcgcctag

SEQ ID NO: 221827 - DNA, 1335 bp, Artificial Sequence
  derived and/or modified sequence
atggaggaggagggcaagaagggcaagaagcccggcatcgtgagcccattcaaacgcgtgttcctgaaaggtgagaagtctagggataaaaaagcccatgaaaaggtcaccgaaaggaggcccctgcacactgtcgttttgagtctgcccgaacgcgttgagccagataggctgttatcagactatatcgagaaggaggttaaatatcttggacagttgaccagtatacccgggtacctgaaccctagcagtcgcacagaaatattgcattttatagataatgctaaaagagcccaccagctccctgggcacttgacccaggaacacgacgccgttctttccctatccgcgtataacgttaagctagcctggcgcgacggggaggacatcatcctgagagtgcccatccacgatattgccgctgtcagctacgttcgagacgacgccgcccacctagtggtacttaaaactgcacaggatccaggaatcagcccttcccagtcgctttgtgctgaatccagtcgcgggctctctgctggatccctgagcgagtccgctgtcggacctgttgaggcttgttgcctggtcatccttgccgctgaatccaaagtggccgcggaagagttatgctgcctgcttggacaggtctttcaggtggtctacacagaatccactattgattttctggatagagctattttcgacggcgcttccacaccaacccatcatcttagccttcatagcgacgactccagtactaaggtggacatcaaggagacctacgaggtggaagcttctactttttgctttcctgagagcgtcgacgtgggtggcgccagccctcacagcaaaactataagtgagtctgagcttagtgcgtccgcaactgaactcttgcaagactacatgttgaccctgcgcacaaagctatcatcgcaggagatacagcagttcgccgctctgttacacgagtacaggaatggcgctagcatccacgaattttgcatcaatctcagacagctttacggggatagccggaagttcttactacttggtcttcgcccattcatccccgagaaagatagccaacactttgaaaacttcctggagacaattggtgtgaaggacggcagaggaatcattaccgattcctttggtaggcacaggcgcgcactctcaactacatcgtcgtctacaaccaacggcaaccgagccacaggcagttctgacgatagatcagccccatccgagggagacgaatgggacagaatgatatccgatattagttctgacattgaggctttaggttgctcgatggatcaggactctgcctag

SEQ ID NO: 221828 - DNA, 1335 bp, Artificial Sequence
  derived and/or modified sequence
atggaggaggagggcaagaagggtaagaagcccggaatcgtgagcccattcaagcgcgtttttttgaaaggggaaaaatcccgcgacaaaaaggcacacgaaaaagttacggagcggaggccactgcatacggtggttctctcactgcccgagagggtcgagcccgatcggttattgtccgattacattgaaaaggaagtgaagtacttgggacagctcacctccatacctggctacctcaacccctcctccagaactgaaatccttcacttcattgacaacgcgaaacgggctcaccagctgcctgggcacctcacccaggaacatgatgcagtactctcccttagcgcttataatgttaagctggcctggcgcgacggggaagatataatcctccgggtaccaattcacgatatcgcggcagtgtcttatgtcagggatgacgctgctcacctcgtcgtcctcaagacagctcaagaccccggaatctccccctcccaatcgttgtgtgccgaatcttccaggggtttgagtgctgggagcctgtcagagtcggccgtgggacccgtagaagcttgctgtctggtgatcctcgctgcggagtctaaagtcgcggctgaggaactgtgttgtttactcggccaggtgttccaggtggtgtacacagagtcgactatcgatttcctggatcgcgctattttcgacggcgcttctactccaactcatcaccttagcctgcactccgatgatagtagcacaaaggtggatatcaaggagacatatgaagtcgaggcttcaacattttgcttccccgagtcagttgatgtaggcggtgcgtcaccacattctaagacaattagtgaatcagaactgtctgcttctgccaccgaactcttgcaagattacatgttaaccctgcgcacaaagctgagctcccaggagatccagcaatttgcagcgttactgcatgagtacaggaatggggctagcattcacgagttctgtatcaatctcagacagctatatggggacagccgaaagttcctgctccttgggcttcggccattcattcctgaaaaagactctcagcatttcgagaactttctggaaacaattggcgtgaaggatggcaggggtataattacagactcctttggcaggcaccgcagggctctgtcaacaactagctcatccacaaccaacgggaatcgcgctaccgggagctccgacgaccgcagtgccccaagcgaaggtgacgagtgggacaggatgatctctgatatatccagcgatattgaagctctgggctgctctatggatcaagacagcgcctag

SEQ ID NO: 221829 - DNA, 1894 bp, Artificial Sequence
  derived and/or modified sequence
ggggcgcggccggggcggagacttcgggcccggctggcgggcggcgccgggagcgcgggggcggcgggcccgggtcgagcatgtagcggctgctggcggcggggctcccggggcgggccgggcgggccgcgggagccgcacgcggcgatatggaagaggagggcaagaagggcaagaagcctggaattgtctcgccatttaaacgagtattcctaaaaggtgaaaagagtagagataagaaagcccatgagaaggtgacagagaggcgccctctgcacactgtggtgttgtcattgcctgagcgcgtcgagccagacagactgctgagcgactatattgagaaggaggtaaagtatttaggtcagttaacgtccataccaggatacctgaatccctccagtaggactgaaatcctgcatttcatagacaatgcaaagagagcccaccagcttccgggacacttgactcaggagcacgatgctgtgctcagcctgtctgcgtacaacgtcaagctggcctggagggacggggaggatatcatcctcagggtgcccatccatgacatcgccgccgtctcctatgttcgggatgacgctgcacacctggtggtcctgaagacagcccaggacccagggatctcccccagccagagtctgtgtgcggaaagttccagaggcctcagtgcaggctccctgtcggagagtgcagttgggcccgtggaggcatgctgcctggtcatcctggctgcagagagcaaggtcgctgcggaggagctttgctgtctgctaggccaggtcttccaggttgtttacacggagtccaccatcgactttctggacagagcgatatttgatggggcctctaccccgacccaccacctgtccctgcacagcgatgactcttctacaaaagtggacattaaggagacctacgaggtggaagccagcactttctgcttccctgaatctgtggatgtgggtggtgcatcaccccacagcaagaccatcagtgagagcgagctgagcgccagcgccactgagctgctgcaggactacatgctgacgctgcgcaccaagctgtcatcacaggagatccagcagtttgcagcactgctgcacgagtaccgcaatggggcctctatccacgagttctgcatcaacctgcggcagctctacggggacagccgcaagttcctgctgcttggtctgaggcccttcatccctgagaaggacagccagcacttcgagaacttcctggagaccattggcgtgaaggatggccgcggcatcatcactgacagctttggcaggcaccggcgggccctgagcaccacatccagttccaccaccaatgggaacagggccacgggcagctctgatgaccggtcggcaccctcagagggggatgagtgggaccgcatgatctcggacatcagcagcgacattgaggcgctgggctgcagcatggaccaggactcagcatgatggacagtggatgggggggcacccacaccttccgcgcagtcgtcataggccttcccagaaggagctgcccagacctgcgtgtcagcccttggtggtggccagggagaggcgcccggtgcagatggccccgggcggcccaggtcctctactgtgaaggagcagggagctgccgagggacacgagcctcagtgcggggtggaaggctctttgccttgtccaccagggctcagccaagccctgcagtgtgtccccgctcggggagggcccggccgagcgggcagggagagccagtcctgtcggctgggcccttggacggctgtcagttttgcacatgatgttcctattgtaactctcagagaccttaaaaagaagtttactgcaatgtgaataatttaatctctggttgccaa

SEQ ID NO: 221830 - DNA, 1335 bp, Artificial Sequence
  derived and/or modified sequence
atggaggaggagggcaagaagggcaagaagcccggcatcgtgagccccttcaagagagtgttcctgaagggcgagaagagcagagacaagaaggcccacgagaaggtgaccgagagaagacccctgcacaccgtggtgctgagcctgcccgagagagtggagcccgacagactgctgagcgactacatcgagaaggaggtgaagtacctgggccagctgaccagcatccccggctacctgaaccccagcagcagaaccgagatcctgcacttcatcgacaacgccaagagagcccaccagctgcccggccacctgacccaggagcacgacgccgtgctgagcctgagcgcctacaacgtgaagctggcctggagagacggcgaggacatcatcctgagagtgcccatccacgacatcgccgccgtgagctacgtgagagacgacgccgcccacctggtggtgctgaagaccgcccaggaccccggcatcagccccagccagagcctgtgcgccgagagcagcagaggcctgagcgccggcagcctgagcgagagcgccgtgggccccgtggaggcctgctgcctggtgatcctggccgccgagagcaaggtggccgccgaggagctgtgctgcctgctgggccaggtgttccaggtggtgtacaccgagagcaccatcgacttcctggacagagccatcttcgacggcgccagcacccccacccaccacctgagcctgcacagcgacgacagcagcaccaaggtggacatcaaggagacctacgaggtggaggccagcaccttctgcttccccgagagcgtggacgtgggcggcgccagcccccacagcaagaccatcagcgagagcgagctgagcgccagcgccaccgagctgctgcaggactacatgctgaccctgagaaccaagctgagcagccaggagatccagcagttcgccgccctgctgcacgagtacagaaacggcgccagcatccacgagttctgcatcaacctgagacagctgtacggcgacagcagaaagttcctgctgctgggcctgagacccttcatccccgagaaggacagccagcacttcgagaacttcctggagaccatcggcgtgaaggacggcagaggcatcatcaccgacagcttcggcagacacagaagagccctgagcaccaccagcagcagcaccaccaacggcaacagagccaccggcagcagcgacgacagaagcgcccccagcgagggcgacgagtgggacagaatgatcagcgacatcagcagcgacatcgaggccctgggctgcagcatggaccaggacagcgcctag

SEQ ID NO: 221831 - protein, 240 aa, Artificial Sequence
  derived and/or modified sequence
MRTEAEAAGPPLEPGDFVQLPVPVIQQLYHWDCGLACSRMVLRYLGQLDDSEFERALQKLQLTRSIWTIDLAYLMHHFGVRHRFCTQTLGVDKGYKNQSFYRKHFDTEETRVNQLFAQAKACKVLVEKCTVSVKDIQAHLAQGHVAIVLVNSGVLHCDLCSSPVKYCCFTPSGHHCFCRTPDYQGHFIVLRGYNRATGCIFYNNPAYADPGMCSTSISNFEEARTSYGTDEDILFVYLDS

SEQ ID NO: 221832 - DNA, 3482 bp, Artificial Sequence
  derived and/or modified sequence
agattcgagacctggaagggctggggcggcgcttggggcggcccagccgccgcctcccgttctctcctccgcagcggcggcggtggcggagaaggaactcgacacgcaccgaccgccctcccgccccagccgaagcggaagctgtagcccgctctgggccggggccatgggcgccccgcgccgcccgggtcatgaggacggaggcggaggcagcggggccgccgctcgagcccggggactttgtgcaactgcctgtgcccgtcatccagcagctctaccactgggactgtggcctggcctgctccaggatggtgctgcggtacctgggccagctggacgacagtgagtttgagagagccctgcagaagctgcagctgaccaggagcatctggaccatcgacctggcctacctgatgcaccactttggcgtgaggcaccgcttctgtacccagaccctgggtgtcgacaagggctacaagaaccagtccttctacaggaagcactttgacacagaagagacccgggtgaatcagctgtttgcacaagcaaaggcctgcaaggtgctggtggagaaatgcacagtgagtgtgaaggacatccaggcgcacctggctcagggccatgtggccatcgtgctggtgaactcgggggtgctgcactgtgacctgtgctccagccctgtcaagtactgctgcttcacccccagtggccaccactgcttctgccgcactcctgactaccagggccacttcatcgtgctgcgtggctacaaccgggccactggctgcatcttctacaacaacccagcctatgccgacccaggaatgtgcagcaccagcatcagtaactttgaggaggccagaaccagctatggcacagatgaggacatcctctttgtctacttggacagctgacagcaggagcctggtgcgcctaggccctcggaccccatccccaccccagccgggcccgctcaggatgccctggcccaggcttggggctgctggggttggaatgtggaactgcagcctcagcccatctggcagagtcccaggaactcggagactggcacagctgctttgtctgccagtgccgtgtgttgtcatgtcactcaccccaagcacctgctggctgctggaagcataccccaagaccccaagccttgactccagctgcgcccacaggaagtccagtcccgacagtgcccttgttgcctttgagccagatccatggcaatggtctccccacagaccgcaggactgagcctggagagagaagttgcttgacggatgccacttgtcaggacagtatgtgagtgtctggagacagcatagctgaccccaatcccccagggctgaggacccctccaggcccctctctcctggaagtgctgcatatgcccctgtgcccagtggttgatgataccaccaccacctgcctacccatgggcccaagtttctgtggctcattacagggcatctgacccctgccacccagcatagacacacctcacagctgccctgccatgcagagccctggccgctggagactcttaaagcccccacagccctccaggtcctccagctctgtcagatggagggctctcgggcctagatcccactggtaggcctcgtggctggcagcagtgctctgggaataaacagctgccctagccccagagggatccctgcacccaggaggcctcctgacaccagccaaaatcctgacagcagggtctgccctcttgagtgtggggagcccctagtcctttaaggttggctgctaaggcctgtgctccaaagcaacgggctggggcagcctgcagctgcccacccaacctggtcttcacaccagattgcacaggatactgggtcttgtctatcttgatggagaagaggggttcctgcccaggatcttacaacacagcaagtagcatagagctctttccttcctcttttttggggaggttggggtcaggggttgtttctttgagatttaagttttcatttttgaggggtaatcaccttcaagtaaaacagtaatagcaagagtgaaggtactttggaaccactaacacctctgcacagggcagttagccagctcaagttctttttcagagaaagggacttggccagtggtttaagtacctgccccttcacctctcagacgaggcagctgacgaggcagctggcccagtcttgggagtctgctcaggacagtggtggagctgggtcttgaaccccagtctgcacctaaaaaactaaaggaaatggatttttttttttttttttgagacggagactcactctgttgcccagactggagtgcagtggcacgatcttggcttactacaacctccgcctcctgggttcaagcgatcctcctgcctcagccccccactagctgggactacaggcacatgccaccatgcccggctaatttttttgtatttttagtagagaccaggcttcgccatgttggccaggctggtctcgaacccctgagctcaggtgatccacctgcctcggcctcccaaagtgggaaatgggtcattttcaaaggggcaacagtgataccatccctgcactcctgggtcctgctcttccaatgcccaaggcatggcatggtggcagctgtgcccccgcccattgctttggagcacagatgactctgggggcagaggtgggctctgtttaggagggcagtgagaccacccagccaaattgcttctcaaccctagacaaagcctttggccaagagggaggtgctgttagttgggcagcccttctgggtttcagagaccggtgttggctctagactggtctcatctccattgccttaatgccaggtggcccaggagtacccatgcacagcagctgtggggtgtgggcatcttcaggtggtgttctggtaaaattgttagaatagctgtatgaaggaaaccagtgggaggaaatgaagttttcaggatggtgggatgtgatttagacagtgcacatgctgttagggctgtcactagggagtggccttcatggagggtggtaacagcacctcagtccagccaaaatgtttagaaacactcagtctctggtcccagaggatggcttctcagggcatgccacaagttaaaggtcaccttcctgaaagatgaatgagaaagctgcccattctcaagactcatctgcctagggagggtcacagaggcaggatgtaagacacactgtgttgcattcttgcacaagtcatgaaaatggagccagagagcctggacatcagggacttttgcccacagcacatgacaccgacagctgcccagcctgttcacatgctggggaccagcacagcacctgaagccatgtgggacagttgggctttgttcattctagccacggggatgaaagggatcttttgcattgcagagattttatatatattttgtttgtaatgagccattctcaataaacattattctcactgcaaaa

SEQ ID NO: 221833 - DNA, 723 bp, Artificial Sequence
  derived and/or modified sequence
atgagaaccgaggccgaggccgccggcccccccctggagcccggcgacttcgtgcagctgcccgtgcccgtgatccagcagctgtaccactgggactgcggcctggcctgcagcagaatggtgctgagatacctgggccagctggacgacagcgagttcgagagagccctgcagaagctgcagctgaccagaagcatctggaccatcgacctggcctacctgatgcaccacttcggcgtgagacacagattctgcacccagaccctgggcgtggacaagggctacaagaaccagagcttctacagaaagcacttcgacaccgaggagaccagagtgaaccagctgttcgcccaggccaaggcctgcaaggtgctggtggagaagtgcaccgtgagcgtgaaggacatccaggcccacctggcccagggccacgtggccatcgtgctggtgaacagcggcgtgctgcactgcgacctgtgcagcagccccgtgaagtactgctgcttcacccccagcggccaccactgcttctgcagaacccccgactaccagggccacttcatcgtgctgagaggctacaacagagccaccggctgcatcttctacaacaaccccgcctacgccgaccccggcatgtgcagcaccagcatcagcaacttcgaggaggccagaaccagctacggcaccgacgaggacatcctgttcgtgtacctggacagctag

SEQ ID NO: 221834 - DNA, 723 bp, Artificial Sequence
  derived and/or modified sequence
atgcgcaccgaggctgaggccgccggacccccccttgagccaggggattttgtgcaactgccagttcctgtaattcagcagctctaccattgggattgtggcctggcctgcagcaggatggttctcaggtatctaggacagctcgacgactcggagttcgagcgcgcactgcaaaaactgcaacttacccggtctatctggaccatcgaccttgcctacctgatgcatcacttcggcgtgcgacacaggttctgcacgcagacactgggtgtcgataagggatataaaaaccagtccttttacaggaagcactttgacacagaggagactagagtcaatcaactgttcgcacaagccaaggcatgtaaggtgctcgttgaaaaatgtacagtgagcgtgaaagatattcaggctcacctggcgcaaggtcacgttgcaatagtactggtgaacagcggcgtgcttcattgcgacctttgctcttcgcccgtgaagtattgctgttttacccctagcgggcatcattgcttctgtagaaccccagattatcagggtcacttcatcgttttgagggggtacaatagagccacaggttgcatattctataataatccagcgtatgcagatcccggtatgtgtagcacgtccataagcaatttcgaagaggcgagaacaagctacggcactgatgaggatatactgttcgtatacttagactcttag

SEQ ID NO: 221835 - DNA, 723 bp, Artificial Sequence
  derived and/or modified sequence
atgaggacagaagctgaggccgccggcccccccctggagcccggggactttgtgcagctgcctgtgcctgtgatccagcagctgtaccactgggactgtggcctggcctgcagcaggatggtgctgcgctacctgggccagctggatgattctgaatttgagcgggccctgcagaagctgcagctgaccaggagcatctggaccatcgacctggcctacctgatgcaccactttggagtgcgccaccgcttctgcacccagaccctgggcgtggacaagggctacaagaaccagagcttctacaggaagcactttgacacagaggagaccagggtgaaccagctgtttgcccaggccaaggcctgcaaggtgctggtggagaagtgcaccgtgtctgtgaaggacatccaggcccacctggcccagggccacgtggccatcgtgctggtgaacagcggcgtgctgcactgtgacctgtgcagcagccctgtgaagtactgctgcttcacccccagcggccaccactgcttctgcaggaccccagactaccagggccacttcatcgtgctgcggggctacaacagagccaccggctgcatcttctacaacaacccagcctatgctgaccccggcatgtgcagcaccagcatcagcaactttgaggaggcccggaccagctatggaacagatgaggacatcctgtttgtgtacctggacagctag

SEQ ID NO: 221836 - DNA, 723 bp, Artificial Sequence
  derived and/or modified sequence
atgcggaccgaggccgaggccgccggcccccccctggagcccggcgactttgtgcaactccccgtcccagtgattcagcagctgtaccactgggattgtggcctagcgtgctccagaatggtgctcaggtaccttggtcagctggatgatagcgagtttgagcgcgccctgcagaaactccagctgactagaagtatctggacaattgacttggcctatctaatgcaccacttcggagtccggcacagattttgtacccagacactgggcgtggacaagggatataagaatcagtccttctatcgtaaacactttgacaccgaagagacgcgggtgaaccagctttttgctcaggcgaaggcatgtaaagtgctcgtcgaaaagtgcactgtatcggtgaaagacattcaagcccatctcgcgcagggtcacgtcgccattgtcctggtcaattcaggggttttgcattgcgacctatgttccagccccgtcaagtactgttgctttaccccttccggacaccactgtttctgccgcacacccgactaccaaggccacttcatcgtgctgcggggctataaccgcgcaacagggtgcatcttttataacaaccccgcctacgctgatccggggatgtgctctaccagtatctcgaattttgaagaagcccggacaagctatggtaccgatgaagatatcctctttgtctacctcgactcatag

SEQ ID NO: 221837 - DNA, 723 bp, Artificial Sequence
  derived and/or modified sequence
atgcgcaccgaggcagaggccgctgggcctcctttagagcctggggatttcgtgcagctgccagtgcccgtgatccagcagttgtaccattgggattgtgggttggcatgctctagaatggttttgcgttatctggggcagctggacgattcagaatttgagcgcgcattgcaaaaacttcagctgactagaagcatttggaccatagatcttgcttacctgatgcatcacttcggtgttcgccataggttttgcacgcagaccttgggtgttgacaaaggctacaagaatcagtccttttaccgcaaacactttgatacagaggagacccgggtcaatcaactgttcgcacaggcaaaggcctgtaaagtccttgttgagaagtgtacggtctcagtgaaggatattcaggctcacctggctcaagggcacgtggcaatcgtcttggttaattcgggtgtcctgcattgtgacttatgctctagccctgtcaagtattgttgttttacgccgtccggtcaccattgcttttgccggacaccggattaccagggccacttcattgttttgcgcggatataaccgtgcaaccggctgcattttctataataaccctgcttatgccgaccccggaatgtgctcaacatctatttccaactttgaggaggccagaacttcttacggcaccgatgaggacatcctgtttgtatacttggatagctag

SEQ ID NO: 221838 - DNA, 426 bp, Artificial Sequence
  derived and/or modified sequence
atgacaatcatggtggaggatattatgaaacttctctgctccttgagcggagagagaaaaatgaaagccgctgttaaacactctgggaagggcgctctcgtgacaggcgcaatggcttttgttgggggcctcgtaggtggaccacccggccttgcagttggaggagccgtaggaggattactgggggcctggatgacaagcggccagtttaagcccgttccccagattctgatggagttgccacccgccgagcagcagcggctattcaacgaggctgcagctatcattcgtcacctggagtggaccgacgccgtgcaactcaccgcccttgtcatggggtcagaagctcttcagcaacagctcttggctatgctggtcaactacgttacaaaggagctgcgagctgaaatccagtacgatgattag

SEQ ID NO: 221839 - DNA, 426 bp, Artificial Sequence
  derived and/or modified sequence
atgaccatcatggtggaggacatcatgaagctgctgtgcagcctgagcggggagaggaagatgaaggctgctgtgaagcacagcggcaagggggccctggtgactggagccatggcctttgtgggcggcctggtgggcggccccccaggcctggccgtgggcggcgctgtgggcggcctgctgggcgcctggatgaccagcggccagttcaagcctgtgccccagatcctgatggagctgcccccagctgagcagcagaggctcttcaatgaggccgccgccatcatccgccacctggagtggacagatgctgtgcagctgacagccctggtgatgggcagcgaggccctgcagcagcagctgctggccatgctggtgaactacgtgaccaaggagctgcgggcagagatccagtatgatgactag

SEQ ID NO: 221840 - DNA, 426 bp, Artificial Sequence
  derived and/or modified sequence
atgaccatcatggtggaggacatcatgaagctgctgtgcagcctgtccggcgagcggaaaatgaaggcagccgtgaaacactccgggaagggagcactggtaacgggagctatggcgttcgtcggagggctggtgggggggcctcctggtctggccgtcggcggcgccgtaggaggactccttggggcctggatgacttctggacagttcaaaccagttcctcagatcctgatggagctgcccccagctgaacagcagaggctctttaatgaggccgctgcaatcatccgccatctggagtggacagatgcagtccaactcaccgcgctcgtgatgggaagcgaagcacttcagcagcagctgctggccatgttagtgaattacgtaactaaggagctcagggccgaaatccagtacgatgattag

SEQ ID NO: 221841 - DNA, 426 bp, Artificial Sequence
  derived and/or modified sequence
atgacaatcatggtggaagatattatgaagctgttgtgttccttgagtggggaacggaaaatgaaggcagccgtgaagcacagcggcaagggtgcgctagttacaggggctatggcatttgtgggaggcctagtggggggtcctccgggactggctgttggaggcgcagtggggggtttacttggggcatggatgacctcaggccagttcaagccagtaccgcagattctcatggaattgcccccagccgagcagcagagactcttcaacgaggcagctgcaataatacgccacctcgaatggacggacgcagtacagcttacagctctcgtgatgggtagcgaggcgctgcagcaacagcttttagccatgctggtgaattatgtcacaaaggaactgagagccgagatccagtatgatgattag

SEQ ID NO: 221842 - DNA, 426 bp, Artificial Sequence
  derived and/or modified sequence
atgaccatcatggtggaggacatcatgaagctgctgtgcagcctgagcggcgagagaaagatgaaggccgccgtgaagcacagcggcaagggcgccctggtgaccggcgccatggccttcgtgggcggcctggtgggcggcccccccggcctggccgtgggcggcgccgtgggcggcctgctgggcgcctggatgaccagcggccagttcaagcccgtgccccagatcctgatggagctgccccccgccgagcagcagagactgttcaacgaggccgccgccatcatcagacacctggagtggaccgacgccgtgcagctgaccgccctggtgatgggcagcgaggccctgcagcagcagctgctggccatgctggtgaactacgtgaccaaggagctgagagccgagatccagtacgacgactag

SEQ ID NO: 221843 - protein, 292 aa, Artificial Sequence
  derived and/or modified sequence
MAAAAAAAVAGVGRGGGGAEPRQERSRARGWAGVERSEGRRMEPGEELEEEGSPGGREDGFTAEHLAAEAMAADMDPWLVFDARTTPATELDAWLAKYPPSQVTRYGDPGSPNSEPVGWIAVYGQGYSPNSGDVQGLQAAWEALQTSGRPITPGTLRQLAITHHVLSGKWLMHLAPGFKLDHAWAGIARAVVEGQLQVAKVSPRAKEGGRQVICVYTDDFTDRLGVLEADSAIRAAGIKCLLTYKPDVYTYLGIYRANRWHLCPTLYESRFQLGGSARGSRVLDRANNVELT

SEQ ID NO: 221844 - DNA, 1559 bp, Artificial Sequence
  derived and/or modified sequence
aaagttgttgttgaggtggcgcggcgctaagatggcggcggcggcggcggcggccgtggcgggggtggggcgcggtggcggtggcgcggagccacggcaggagcggagccgggcccggggctgggccggcgtcgaacgcagcgaaggccggaggatggaaccaggtgaggagctggaagaggagggctctccaggtggccgtgaggatggcttcaccgccgagcacctggctgcagaggccatggcagctgacatggacccctggctagtgtttgatgcccgcacaacgcctgccactgagctggatgcctggctggccaagtacccaccatcccaagttacccgctatggggaccccggttcacccaactcagagcctgtgggctggattgcagtgtatgggcagggctacagccccaactccggggacgtgcagggcctgcaggcagcctgggaagctctgcagaccagtgggcggcccatcacaccgggtaccctgcgccagctcgccatcacccaccacgtgctctcgggcaagtggcttatgcatctggcaccgggcttcaagctggaccacgcctgggctggcattgcccgggccgtggttgaaggccagcttcaggtggccaaggtgagcccacgtgccaaggagggtgggcgccaggtcatctgtgtttacacggacgacttcacggaccgcttgggtgtactggaggcggattcagccatccgtgcagcgggcattaagtgcctgctcacctacaagcctgatgtctacacctacctgggcatctaccgggccaatcgctggcacctctgccccactctctatgagagccgtttccagcttgggggtagtgcccgtggctcccgagtgcttgaccgtgccaacaacgtggaactgacctaggggggccaaattggggagactgcccactcccccctccatgctggggttggatcctcctgtcttcctccttgtcctatgaaggccacaccccccagctctggggactcctaggtcacttgggaactacctgcatcttcagtccccttgaacttctgccctctgttcagggctgacacaagccccacaggctggggggctccggttccctgagggatgagccttcagcctccctttgtaatgctgctcctctccactgcccagcaccatgagttgggtgcagacacctagaaggagagacttcttggaacgctcatcccccgctatacctccccttcctcctgcatctccccttctttccttccccctcaggagagagaaaacttagtgcttccagcccttcttggagccttcatggtccaggggtaggggccccactggcctgagcatgccattttgaggggagggtagttgtgcctacttatcccctggcagaggggatgccaggaccatggacatgaggcttgcccatccctgccaacttacacagcctgtaccactgtccccccttccttggctactttgacatgtgcctgctcctggcatttcaataaaacccggcttgggtctgtgtcttgagtgttttttaaaa

SEQ ID NO: 221845 - DNA, 879 bp, Artificial Sequence
  derived and/or modified sequence
atggccgccgccgccgccgccgccgtggccggcgtgggcagaggcggcggcggcgccgagcccagacaggagagaagcagagccagaggctgggccggcgtggagagaagcgagggcagaagaatggagcccggcgaggagctggaggaggagggcagccccggcggcagagaggacggcttcaccgccgagcacctggccgccgaggccatggccgccgacatggacccctggctggtgttcgacgccagaaccacccccgccaccgagctggacgcctggctggccaagtacccccccagccaggtgaccagatacggcgaccccggcagccccaacagcgagcccgtgggctggatcgccgtgtacggccagggctacagccccaacagcggcgacgtgcagggcctgcaggccgcctgggaggccctgcagaccagcggcagacccatcacccccggcaccctgagacagctggccatcacccaccacgtgctgagcggcaagtggctgatgcacctggcccccggcttcaagctggaccacgcctgggccggcatcgccagagccgtggtggagggccagctgcaggtggccaaggtgagccccagagccaaggagggcggcagacaggtgatctgcgtgtacaccgacgacttcaccgacagactgggcgtgctggaggccgacagcgccatcagagccgccggcatcaagtgcctgctgacctacaagcccgacgtgtacacctacctgggcatctacagagccaacagatggcacctgtgccccaccctgtacgagagcagattccagctgggcggcagcgccagaggcagcagagtgctggacagagccaacaacgtggagctgacctag

SEQ ID NO: 221846 - DNA, 879 bp, Artificial Sequence
  derived and/or modified sequence
atggctgccgctgccgcggcagcagtcgccggtgtgggtagaggcggtggaggggcagaaccacggcaagagcgctcgcgcgcaagagggtgggctggcgtggagcgctcagaaggccgtcggatggagcccggtgaagagttggaggaggaaggcagtcccgggggtagagaggacggattcaccgcagaacacttggcggccgaggcaatggcagctgacatggacccatggctggtcttcgatgcacgaaccacacctgcaaccgagctggacgcgtggctggcaaagtatccccctagccaagtaaccagatatggagatccaggcagtcctaacagtgagcctgtcggctggatcgctgtttacgggcagggatactcccctaatagcggagacgtgcagggactccaggctgcttgggaagcgttgcagacatccggacgccctattacccctggcacgttaagacaactggccatcacccatcatgtgctgtcaggtaagtggctcatgcatctggcgcccggctttaagctcgatcacgcatgggccggaattgcccgggctgtggtagaaggccagttgcaggtggccaaggtatccccccgagccaaggaaggtggccgacaggtgatctgtgtgtacacagacgacttcacggaccgactgggagttctggaggctgattccgcgatcagggctgccggcattaaatgccttctcacgtacaagcctgatgtgtacacatacctaggaatataccgtgcaaacagatggcacctgtgccccactctgtacgagtccaggttccaacttgggggttcagcccggggctctagggtgctggatagggctaacaatgtagagttaacctag

SEQ ID NO: 221847 - DNA, 879 bp, Artificial Sequence
  derived and/or modified sequence
atggctgctgctgctgctgctgctgtggccggcgtgggccggggcggcggcggcgctgagccccggcaggagaggagccgggcccggggctgggccggcgtggagaggtctgagggccgcaggatggagcccggggaggagctggaggaggagggcagccctgggggccgggaggatggcttcaccgctgagcacctggccgctgaggccatggctgctgacatggacccctggctggtgtttgatgcccggaccaccccagccacagagctggatgcctggctggccaagtacccacccagccaggtgacccgctacggggaccccggcagccccaacagcgagcctgtgggctggattgctgtgtatggccagggctacagccccaacagcggagatgtgcagggcctgcaggccgcctgggaggccctgcagaccagcggccggcccatcaccccaggcaccctgcggcagctggccatcacccaccacgtgctgagcggcaagtggctgatgcacctggcccctggcttcaagctggaccacgcctgggccggcatcgcccgggctgtggtggagggccagctgcaggtggccaaggtgagcccccgggccaaggagggcggccggcaggtgatctgtgtgtacacagatgacttcacagaccggctgggcgtgctggaggccgacagcgccatccgggccgccggcatcaagtgcctgctgacctacaagccagatgtgtacacctacctgggcatctaccgggccaaccgctggcacctgtgccccaccctgtatgagagccgcttccagctgggcggcagcgcccggggcagccgggtgctggaccgggccaacaacgtggagctgacctag

SEQ ID NO: 221848 - DNA, 879 bp, Artificial Sequence
  derived and/or modified sequence
atggccgccgccgccgccgccgccgtggccggcgtgggccggggcgggggaggcgccgagcctaggcaagagagaagtagggcgaggggctgggcaggagtggagagatccgagggacgaagaatggaacccggcgaggaactcgaagaagagggatcacccggaggccgcgaagatgggtttactgctgaacacctcgccgctgaggcaatggcagctgacatggacccatggctggtattcgatgcacggacaacaccagccacagagttagacgcgtggcttgccaaatacccacctagtcaagttacccgatacggagaccccgggagccccaacagcgaacctgtaggatggatcgccgtgtacggtcaaggttattcacccaattcaggagatgtgcaaggtctgcaagctgcctgggaggcattacagacaagcggtcgcccaatcacaccgggaacgctgagacagctggccattacccaccacgtgttgtcaggaaaatggctcatgcatctggcccccggtttcaaactggaccacgcctgggccggcatcgcgcgggctgtggtggagggccaactgcaggttgcaaaagtttcgcctagggcgaaggaagggggtcggcaggtgatctgcgtctataccgacgattttacagataggctgggggtcctggaagctgactcagccatcagagcagcgggcataaagtgcctgctcacctataaaccagacgtttatacatatcttgggatttaccgggctaaccgatggcatctgtgtccaaccttgtatgagagcagattccagttgggcggatcagctcgcggctctcgggtcctcgacagggccaataatgtggagttaacctag

SEQ ID NO: 221849 - DNA, 879 bp, Artificial Sequence
  derived and/or modified sequence
atggcagcagccgctgctgcagccgtggccggagtgggacgcggaggcggaggtgctgagcctaggcaagaacggagtcgtgccagaggatgggccggagtggaacggtccgaaggcaggcgcatggagccaggggaggaactggaggaggaaggctcacctggagggcgagaagacggatttacagccgaacacctcgccgctgaggccatggccgctgacatggacccatggctggttttcgacgcccgaacgacgcctgcgacagaactggacgcttggttggcgaaatatcctccaagtcaagtaacaaggtatggagatccgggaagtccgaattctgaacccgtggggtggatagccgtgtacggacaggggtacagtcctaacagcggcgacgtacagggcctgcaggcagcctgggaagccctccagacctcaggtcgccctatcactcctggaacactccgccagctcgccattacacaccatgtgttgagcggcaagtggctgatgcatcttgctccaggatttaagctcgaccatgcgtgggctggtattgcaagggctgttgtcgagggacagctgcaggtggcaaaggtttcaccacgggctaaggaggggggacgccaagttatctgtgtatacaccgatgactttacagatagactgggagtcctcgaagccgactcggcgatcagggccgcaggcattaaatgtctgcttacctataaacctgacgtgtacacctaccttgggatctatagggctaatcgctggcacctatgtcccaccctgtacgagagtcgctttcaacttggcggatccgcaaggggatcacgcgtccttgatagggccaataatgtcgagctaacctag

SEQ ID NO: 221850 - protein, 267 aa, Artificial Sequence
  derived and/or modified sequence
MGARQIQTSSSQTSPEEAMGTPRIQHLLILLVLGASLLTSGLELYCQKGLSMTVEADPANMFNWTTEEVETCDKGALCQETILIIKAGTETAILATKGCIPEGEEAITIVQHSSPPGLIVTSYSNYCEDSFCNDKDSLSQFWEFSETTASTVSTTLHCPTCVALGTCFSAPSLPCPNGTTRCYQGKLEITGGGIESSVEVKGCTAMIGCRLMSGILAVGPMFVREACPHQLLTQPRKTENGATCLPIPVWGLQLLLPLLLPSFIHFS

SEQ ID NO: 221851 - protein, 262 aa, Artificial Sequence
  derived and/or modified sequence
IQTSSSQTSPEEAMGTPRIQHLLILLVLGASLLTSGLELYCQKGLSMTVEADPANMFNWTTEEVETCDKGALCQETILIIKAGTETAILATKGCIPEGEEAITIVQHSSPPGLIVTSYSNYCEDSFCNDKDSLSQFWEFSETTASTVSTTLHCPTCVALGTCFSAPSLPCPNGTTRCYQGKLEITGGGIESSVEVKGCTAMIGCRLMSGILAVGPMFVREACPHQLLTQPRKTENGATCLPIPVWGLQLLLPLLLPSFIHFS

SEQ ID NO: 221852 - protein, 249 aa, Artificial Sequence
  derived and/or modified sequence
MGTPRIQHLLILLVLGASLLTSGLELYCQKGLSMTVEADPANMFNWTTEEVETCDKGALCQETILIIKAGTETAILATKGCIPEGEEAITIVQHSSPPGLIVTSYSNYCEDSFCNDKDSLSQFWEFSETTASTVSTTLHCPTCVALGTCFSAPSLPCPNGTTRCYQGKLEITGGGIESSVEVKGCTAMIGCRLMSGILAVGPMFVREACPHQLLTQPRKTENGATCLPIPVWGLQLLLPLLLPSFIHFS

SEQ ID NO: 221853 - DNA, 804 bp, Artificial Sequence
  derived and/or modified sequence
atgggcgccagacagatccagaccagcagcagccagaccagccccgaggaggccatgggcacccccagaatccagcacctgctgatcctgctggtgctgggcgccagcctgctgaccagcggcctggagctgtactgccagaagggcctgagcatgaccgtggaggccgaccccgccaacatgttcaactggaccaccgaggaggtggagacctgcgacaagggcgccctgtgccaggagaccatcctgatcatcaaggccggcaccgagaccgccatcctggccaccaagggctgcatccccgagggcgaggaggccatcaccatcgtgcagcacagcagcccccccggcctgatcgtgaccagctacagcaactactgcgaggacagcttctgcaacgacaaggacagcctgagccagttctgggagttcagcgagaccaccgccagcaccgtgagcaccaccctgcactgccccacctgcgtggccctgggcacctgcttcagcgcccccagcctgccctgccccaacggcaccaccagatgctaccagggcaagctggagatcaccggcggcggcatcgagagcagcgtggaggtgaagggctgcaccgccatgatcggctgcagactgatgagcggcatcctggccgtgggccccatgttcgtgagagaggcctgcccccaccagctgctgacccagcccagaaagaccgagaacggcgccacctgcctgcccatccccgtgtggggcctgcagctgctgctgcccctgctgctgcccagcttcatccacttcagctag

SEQ ID NO: 221854 - DNA, 789 bp, Artificial Sequence
  derived and/or modified sequence
atccagaccagcagcagccagaccagccccgaggaggccatgggcacccccagaatccagcacctgctgatcctgctggtgctgggcgccagcctgctgaccagcggcctggagctgtactgccagaagggcctgagcatgaccgtggaggccgaccccgccaacatgttcaactggaccaccgaggaggtggagacctgcgacaagggcgccctgtgccaggagaccatcctgatcatcaaggccggcaccgagaccgccatcctggccaccaagggctgcatccccgagggcgaggaggccatcaccatcgtgcagcacagcagcccccccggcctgatcgtgaccagctacagcaactactgcgaggacagcttctgcaacgacaaggacagcctgagccagttctgggagttcagcgagaccaccgccagcaccgtgagcaccaccctgcactgccccacctgcgtggccctgggcacctgcttcagcgcccccagcctgccctgccccaacggcaccaccagatgctaccagggcaagctggagatcaccggcggcggcatcgagagcagcgtggaggtgaagggctgcaccgccatgatcggctgcagactgatgagcggcatcctggccgtgggccccatgttcgtgagagaggcctgcccccaccagctgctgacccagcccagaaagaccgagaacggcgccacctgcctgcccatccccgtgtggggcctgcagctgctgctgcccctgctgctgcccagcttcatccacttcagctag

SEQ ID NO: 221855 - DNA, 804 bp, Artificial Sequence
  derived and/or modified sequence
atgggagctcgtcagattcagacttcttccagtcaaacatctcctgaagaagcgatgggcactcctcggatccaacacctgcttatcctgctcgtcctgggggcgagcctcctgacctctgggctcgaactgtattgtcagaagggcttatcaatgacagtggaggccgaccctgccaacatgttcaactggaccaccgaggaggtcgaaacctgtgataagggggccctctgtcaggaaactattctcattatcaaggcgggtacagagactgccatcctggctacaaaagggtgtattccagaaggcgaagaggcgattactatcgtgcagcactcatcaccgcctggactgattgtgacgtcctactccaactattgcgaagacagtttttgcaacgacaaagatagtctatcccaattctgggaattctcggaaacaaccgcgagcaccgttagcactacgttgcattgccctacttgtgtagccctgggaacctgcttcagcgctcccagtctaccttgcccgaacggcacgaccaggtgttatcagggtaaactggaaataaccggcggggggatagagtcatctgtggaagtcaagggttgcaccgcgatgatcgggtgccgcctgatgtctggaatactcgccgtgggtccaatgttcgttcgagaggcatgtcctcatcagctgctaacgcagcctaggaaaactgagaacggcgccacgtgtctgcctattccagtgtgggggctgcagctgcttctcccgttgctgctcccctcgtttatccatttttcttag

SEQ ID NO: 221856 - DNA, 789 bp, Artificial Sequence
  derived and/or modified sequence
atccagacttcttcaagccagactagccctgaggaggctatgggcacccccaggatccagcacctcttaatcctcctggtgctgggcgcctctctgttgacctcggggctcgagttatactgccagaagggcctctctatgacagtcgaggctgatcccgccaacatgttcaattggactaccgaggaggtggagacctgtgacaagggcgctctgtgccaggagacaattctaattattaaagcagggactgagacagcaatcttggccaccaagggctgtatccctgagggggaagaagctattacgattgtacaacatagtagtccacccgggttaatagtcacctcttatagcaattactgcgaggactcattttgcaacgacaaggatagcctctcccaattctgggagttctccgaaacaactgcgagtacagtgtcaaccaccctccattgtcctacctgtgtggccctgggaacctgcttctccgcccccagcctgccctgccccaacggtacaactcgttgctaccagggaaagcttgagatcacgggcggaggcattgaatcaagcgtggaggttaaaggatgcaccgccatgataggctgcaggctgatgtctggaattcttgcagtgggccccatgtttgtcagagaggcatgcccccaccagctacttacgcaaccccgaaagaccgaaaatggtgccacctgtctgccaatcccggtgtggggacttcagctgttactacctctgcttctgccgtcgtttatccatttctcatag

SEQ ID NO: 221857 - DNA, 804 bp, Artificial Sequence
  derived and/or modified sequence
atgggggcaagacagatccaaacctctagctctcagactagcccggaggaggctatgggcaccccaagaatccaacacttgctaattctcctcgtgctgggagccagcctccttacttctggcctggagctctactgccagaagggcttaagcatgacggtcgaggctgaccctgccaatatgttcaattggacgacagaagaggtagagacttgcgacaagggggcactgtgccaggaaaccatccttatcatcaaggctgggacagaaactgccattctggcaactaaggggtgtatccccgaaggagaggaagctatcaccattgtccagcactcttctccaccaggcctcatcgtgactagctactctaactattgtgaagattctttttgcaacgacaaggattcactcagccagttctgggagttcagtgagactaccgcctcaacagtgtctactacattgcattgccctacttgtgtcgccttaggcacatgttttagcgccccctcgctgccatgcccaaatggcacgacccggtgctaccagggcaaactagagataactggaggggggatagaatcatctgtggaagtcaagggctgcactgccatgattgggtgcagattgatgtctggcatcctggctgtcgggcccatgtttgtgcgggaggcttgccctcaccagctactgacacagcctcggaagactgagaacggcgccacatgtctgcctattcccgtttggggcttgcaactgcttctccccctgctcctgccctcctttatccacttcagttag

SEQ ID NO: 221858 - DNA, 804 bp, Artificial Sequence
  derived and/or modified sequence
atgggcgcccggcagatccagaccagcagcagccagaccagccctgaggaggccatgggcaccccccgcatccagcacctgctgatcctgctggtgctgggcgccagcctgctgaccagcggcctggagctgtactgccagaagggcctgtccatgacagtggaggccgaccctgccaacatgttcaactggaccacagaggaggtggagacctgtgacaagggggccctgtgccaggagaccatcctgatcatcaaggccggcacagaaacagccatcctggccaccaagggctgcatccctgagggggaggaggccatcaccatcgtgcagcacagcagccccccaggcctgattgtgaccagctacagcaactactgtgaggacagcttctgcaatgacaaggacagcctgagccagttctgggagttcagcgagaccacagccagcacagtgtccaccaccctgcactgccccacctgtgtggccctgggcacctgcttcagcgcccccagcctgccctgccccaacggcaccacccgctgctaccagggcaagctggagatcaccggcggcggcatcgagagctctgtggaggtgaagggctgcacagccatgattggctgccgcctgatgagcggcatcctggccgtgggccccatgtttgtgcgggaggcctgcccccaccagctgctgacccagcccaggaagacagaaaatggagccacctgcctgcccatccctgtgtggggcctgcagctgctgctgcccctgctgctgcccagcttcatccacttctcctag

SEQ ID NO: 221859 - DNA, 789 bp, Artificial Sequence
  derived and/or modified sequence
atccagaccagcagcagccagaccagccctgaggaggccatgggcaccccccgcatccagcacctgctgatcctgctggtgctgggcgccagcctgctgaccagcggcctggagctgtactgccagaagggcctgtccatgacagtggaggccgaccctgccaacatgttcaactggaccacagaggaggtggagacctgtgacaagggggccctgtgccaggagaccatcctgatcatcaaggccggcacagaaacagccatcctggccaccaagggctgcatccctgagggggaggaggccatcaccatcgtgcagcacagcagccccccaggcctcatcgtgaccagctacagcaactactgtgaagattccttctgcaatgacaaggacagcctgagccagttctgggagttcagcgagaccacagccagcacagtgtccaccaccctgcactgccccacctgtgtggccctgggcacctgcttcagcgcccccagcctgccctgccccaacggcaccacccgctgctaccagggcaagctggagatcactggaggcggcatcgagagctctgtggaggtgaagggctgcacagccatgattggctgccgcctgatgagcggcatcctggccgtgggccccatgtttgtgcgggaggcctgcccccaccagctgctgacccagcccaggaagacagaaaatggagccacctgcctgcccatccctgtgtggggcctgcagctgctgctgcccctgctgctgcccagcttcatccacttctcctag

SEQ ID NO: 221860 - DNA, 804 bp, Artificial Sequence
  derived and/or modified sequence
atgggcgcccggcagatccagaccagcagcagccagaccagccccgaggaggctatgggaacaccccgtatccagcacctgttaatccttctggtgctcggtgcctcactgttgacttctggcctcgagctgtattgtcagaagggtctgtcaatgacggtggaggcggatccagcaaacatgtttaattggactaccgaagaggtggaaacctgcgataaaggcgccctttgtcaggagaccatcttaataatcaaggccggcacagagaccgctattctggcaacgaaaggctgtatccctgagggtgaagaggcaatcaccatagtgcaacattcttcccctcccggcctaattgtaacttcatatagtaattattgtgaggattcgttttgcaacgataaggattccctttcccagttttgggaatttagcgaaactactgcgtctactgtgagcacaactctgcactgtcccacgtgtgtggcacttggaacatgcttttcggcaccttccctgccatgtcccaatggcactacacggtgctaccaagggaaattagaaataaccggcggcggcatcgagtcctctgtcgaggtgaaggggtgtactgcgatgatcgggtgtcgtctcatgtccggaatcctggccgtgggacctatgtttgtgcgagaggcgtgcccacaccagctgctaacccaacctaggaagacggagaacggggccacatgtctgccaattccagtgtggggcctgcaattacttctgcctttactgttgccaagcttcattcacttcagttag

SEQ ID NO: 221861 - DNA, 789 bp, Artificial Sequence
  derived and/or modified sequence
atccagaccagcagcagccagaccagccccgaggaggccatgggcacccctcggatccaacacctgcttatcttgctcgtgcttggggcctctcttctgaccagtggcctggagttgtactgccagaaaggcctctccatgacggtggaagctgaccccgctaatatgttcaattggactacagaggaggtcgaaacttgcgacaaaggcgctctgtgccaagagacaattctaatcattaaggcaggcactgagactgccatactggctacaaagggctgcatccccgagggagaggaagctataacaatcgtgcagcattcatctccccccggcctcatcgttactagttattcaaactactgcgaggattcgttttgcaacgacaaagatagtctgtctcaattctgggagtttagcgagactacagccagcactgttagcacaacccttcattgtcctacttgcgtcgcacttgggacatgtttttcagctccctcactgccctgtccaaacggaactacaaggtgttatcagggaaagctggaaatcacaggaggtggcatcgagtcctccgtggaggttaaaggctgcacagccatgattggttgcaggctgatgtccggcatcctggccgttggacctatgtttgtcagggaggcttgtccccaccagctgttgacccagccgaggaagacagaaaacggcgccacttgcttgccaatcccagtatggggactgcaactgctcctcccactgctgctcccctcttttatccacttctcctag

SEQ ID NO: 221862 - DNA, 804 bp, Artificial Sequence
  derived and/or modified sequence
atgggcgcccggcagatccagaccagcagcagccagaccagccccgaggaagcgatggggactccacggatacagcacctgctgatcctgctagtcctcggggcgtcgctgttgacctcagggttagagctgtattgccaaaaaggcctctctatgacagttgaagccgatccagcaaacatgtttaattggaccaccgaagaggtggagacatgtgataaaggcgccctgtgtcaggaaactatcttgatcattaaagctggcaccgagactgctatcctagctactaaaggttgcatccctgaaggggaggaagctatcaccattgtccaacatagctcccctcccggccttatagtgacgtcatactccaattattgtgaggatagtttttgcaacgacaaagactctctgagtcagttctgggaattttcagaaacaactgcctcaaccgtatctactactctgcattgccccacatgcgtcgcactggggacctgtttttcagcacccagcctgccatgtccaaatgggactactcgctgttatcaggggaaacttgagattaccgggggggggatcgaatcctccgtggaagtgaaggggtgtaccgctatgatcgggtgccgcttaatgtccggtatacttgccgtggggccaatgtttgtgagagaagcctgccctcatcagctcttgacccaaccccgaaagaccgagaatggggcaacgtgtctgccaatccccgtctgggggttacaacttctcctgccattgttgctgccatctttcatacatttctcatag

SEQ ID NO: 221863 - DNA, 804 bp, Artificial Sequence
  derived and/or modified sequence
atgggtgccaggcaaatccagaccagctcgagtcaaacctcacccgaagaggctatgggcacacccaggatccagcacctgcttatcttgctggtgctgggcgctagtcttcttacatccggcttagagttatactgccagaagggcctctctatgaccgtcgaagcagaccctgcaaacatgttcaactggactaccgaagaagtggaaacctgcgacaagggcgctttgtgccaggagactatcttgattatcaaggcaggcaccgagaccgccattttggctaccaaaggatgcatcccagagggagaagaagctattacaatcgttcaacactcaagccctcccggtctgatcgtcacatcttactccaactattgtgaggactctttttgcaatgacaaagactctttgagccagttctgggagttttccgagaccaccgcctccaccgtaagcacaaccctgcactgccctacatgcgtggccctcggaacatgcttctctgccccaagtctcccatgtcccaacggcactaccagatgttatcaagggaagttggaaattactggcggaggcattgagagctcagtcgaagtgaagggatgtacagccatgatcggctgtcgactcatgtcaggaattctagccgtgggcccaatgttcgttcgggaagcctgcccccaccagttactgacacagccccgtaaaaccgaaaacggcgctacttgcctgcccattccagtgtggggcctgcaactcttgctgcctctgctgttgccatccttcatccatttctcatag

SEQ ID NO: 221864 - DNA, 789 bp, Artificial Sequence
  derived and/or modified sequence
atacagacctcgtcttcccagacaagtccagaggaagcaatgggcacccccaggatccagcacctgctcatcctcttggtgttgggtgcttccctgcttacttcagggcttgagttgtactgtcaaaagggcctgagcatgaccgtggaggcagaccctgccaacatgttcaattggacgaccgaggaggttgagacttgcgacaagggcgctttgtgccaagaaacgattttgatcatcaaggccggaactgaaaccgcaatcctcgctaccaagggatgcatcccagagggagaagaagctatcacaatcgtgcagcactcatctcctcctggtctcatcgtgactagctactccaattactgtgaagattctttttgcaacgataaagatagccttagtcaattttgggagttctctgaaaccactgcaagcactgtatccacgacactacactgcccgacctgtgtagcacttggaacctgtttttctgctccctcattaccctgcccgaatggtacgacaagatgctaccagggaaaacttgaaatcacaggcggaggtatcgagagctctgttgaagtgaaagggtgcaccgccatgattggctgccggctaatgtccggtattctggcggtcgggcctatgttcgtgagagaggcttgtccccaccaactgctgacgcagccccgaaagacagaaaatggtgccacctgcctgccaataccagtgtggggcctgcagctcctgctgccattattactgcccagttttatccatttcagttag

SEQ ID NO: 221865 - DNA, 804 bp, Artificial Sequence
  derived and/or modified sequence
atgggcgctcgccagattcagactagtagtagccagacaagccccgaagaggctatggggacacctcgcatccagcacttgctgatattactggtactcggcgcttcgctactgacatccggtctcgagctgtattgccagaaggggctcagtatgacagtggaagccgacccagcaaacatgtttaattggacaactgaagaggtggaaacatgtgataagggtgctctgtgccaggagaccatcctcattatcaaagcaggaacggagaccgcaattttagccaccaagggatgtatccccgagggagaggaggcgatcactatagtgcagcatagcagcccccctgggctaatcgttacatcttatagtaactactgcgaggattccttctgtaacgataaggatagcctttcccaattctgggagtttagtgagacaaccgcttctaccgtttctactactctgcattgtcccacctgcgtagccttgggcacctgtttcagtgccccatctctgccttgcccaaacggtactactcgctgctatcagggaaaactggagatcacagggggaggtatcgagtctagtgtggaggtgaaggggtgcactgccatgataggttgtagactgatgagcggcatactggcggtgggacccatgtttgtgagggaggcgtgcccccaccaactgcttacacagccacgcaaaaccgaaaacggcgcaacttgcctgcccatccctgtgtgggggctgcaactcctcctgcctttgctcctccccagctttattcacttctcctag

SEQ ID NO: 221866 - DNA, 1018 bp, Artificial Sequence
  derived and/or modified sequence
atgggggcgaggcagatccagaccagctcctcccagacctctccagaagaagccatgggaacccctcgtatccagcatttgctgatcctcctggtcctaggagcctccctcctgacctcgggcctagagctgtattgtcaaaagggtctgtccatgactgtggaagcagatccagccaatatgtttaactggaccacagaggaagtggagacttgtgacaaaggggcactttgccaggaaaccatactaataattaaagcagggactgagacagccattttggccacgaagggctgcatcccggaaggggaggaggccataacaattgtccagcactcttcacctcccggcctgatcgtgacctcctacagtaactactgtgaggattccttctgtaatgacaaagacagcctgtctcagttttgggagttcagtgagaccacagcttccactgtgtcaacaaccctccattgtccaacctgtgtggctttggggacctgtttcagtgctccttctcttccctgtcccaatggtacaactcgatgctatcaaggaaaacttgagatcactggaggtggcattgagtcgtctgtggaggtcaaaggctgtacagccatgattggctgcaggctgatgtctggaatcttagcagtaggacccatgtttgtgagggaagcgtgcccacatcagctgctcactcaacctcgaaagactgaaaatggggccacctgtcttcccattcctgtttgggggttacagctactgctgccattgctgctgccatcatttattcacttttcctaagaaggcacttctgggcctgggtctgaggacatcttttttgactgggagccttcttactgttgaggttcaacaagctgaggagtagatgggaatttgagggagaatacagagatactatgaacgtatttgacatttttaatacaatttctgctataatttttgtatgcagtaggcgttactaataaacatttctgctgtgatttgtgtatgtttc

SEQ ID NO: 221867 - DNA, 1159 bp, Artificial Sequence
  derived and/or modified sequence
gcgtcgtaagagaatgccaagcccggggagaaggcgttccgggcctcaactttggcgtcgtgagattcttgtgaggcgtctgcctggaagccggcagcaattttgcttctttaaagagaaaaagaaggctagggactcagattcctggattctgagatccagaccagctcctcccagacctctccagaagaagccatgggaacccctcgtatccagcatttgctgatcctcctggtcctaggagcctccctcctgacctcgggcctagagctgtattgtcaaaagggtctgtccatgactgtggaagcagatccagccaatatgtttaactggaccacagaggaagtggagacttgtgacaaaggggcactttgccaggaaaccatactaataattaaagcagggactgagacagccattttggccacgaagggctgcatcccggaaggggaggaggccataacaattgtccagcactcttcacctcccggcctgatcgtgacctcctacagtaactactgtgaggattccttctgtaatgacaaagacagcctgtctcagttttgggagttcagtgagaccacagcttccactgtgtcaacaaccctccattgtccaacctgtgtggctttggggacctgtttcagtgctccttctcttccctgtcccaatggtacaactcgatgctatcaaggaaaacttgagatcactggaggtggcattgagtcgtctgtggaggtcaaaggctgtacagccatgattggctgcaggctgatgtctggaatcttagcagtaggacccatgtttgtgagggaagcgtgcccacatcagctgctcactcaacctcgaaagactgaaaatggggccacctgtcttcccattcctgtttgggggttacagctactgctgccattgctgctgccatcatttattcacttttcctaagaaggcacttctgggcctgggtctgaggacatcttttttgactgggagccttcttactgttgaggttcaacaagctgaggagtagatgggaatttgagggagaatacagagatactatgaacgtatttgacatttttaatacaatttctgctataatttttgtatgcagtaggcgttactaataaacatttctgctgtgatttgtgtatgtttc

SEQ ID NO: 221868 - DNA, 1112 bp, Artificial Sequence
  derived and/or modified sequence
gaaggcgttccgggcctcaactttggcgtcgtgagattcttgtgaggcgtctgcctggaagccggcagcaattttgcttctttaaagagaaaaagaaggctagggactcagattcctggattctgagatccagaccagctcctcccagacctctccagaagaagccatgggaacccctcgtatccagcatttgctgatcctcctggtcctaggagcctccctcctgacctcgggcctagagctgtattgtcaaaagggtctgtccatgactgtggaagcagatccagccaatatgtttaactggaccacagaggaagtggagacttgtgacaaaggggcactttgccaggaaaccatactaataattaaagcagggactgagacagccattttggccacgaagggctgcatcccggaaggggaggaggccataacaattgtccagcactcttcacctcccggcctgatcgtgacctcctacagtaactactgtgaggattccttctgtaatgacaaagacagcctgtctcagttttgggagttcagtgagaccacagcttccactgtgtcaacaaccctccattgtccaacctgtgtggctttggggacctgtttcagtgctccttctcttccctgtcccaatggtacaactcgatgctatcaaggaaaacttgagatcactggaggtggcattgagtcgtctgtggaggtcaaaggctgtacagccatgattggctgcaggctgatgtctggaatcttagcagtaggacccatgtttgtgagggaagcgtgcccacatcagctgctcactcaacctcgaaagactgaaaatggggccacctgtcttcccattcctgtttgggggttacagctactgctgccattgctgctgccatcatttattcacttttcctaagaaggcacttctgggcctgggtctgaggacatcttttttgactgggagccttcttactgttgaggttcaacaagctgaggagtagatgggaatttgagggagaatacagagatactatgaacgtatttgacatttttaatacaatttctgctataatttttgtatgcagtaggcgttactaataaacatttctgct

SEQ ID NO: 221869 - DNA, 1446 bp, Artificial Sequence
  derived and/or modified sequence
aaccatccatcccatcagggaaatatgcaacatgcttcaaagaataagaagagaactttgggccagtagagacggggtttcaccgtgttagccaggatggtctcgatctcctgacctcgtgatccgcctgccttggcctcccaaagtgctgggattacagggcactgaatgtcaaagtgaaggaattcaatgaagcccggatcaagggcaggagcaaccgtgaccctcttaaaagagccaatgccccatgtaattagtgacgcgcgcgaatggatagacgctattcccaccgtccctacatagcatccagcgacaccacagccaagggacaggcttggcggaacctgcgggagagaagaaccctctgagcctgattgaaaggcggtgaagagacaggagagggggatcggtgggcggtcccgcctccatcttcagttcccgcatgggggcgaggcagatccagaccagctcctcccagacctctccagaagaagccatgggaacccctcgtatccagcatttgctgatcctcctggtcctaggagcctccctcctgacctcgggcctagagctgtattgtcaaaagggtctgtccatgactgtggaagcagatccagccaatatgtttaactggaccacagaggaagtggagacttgtgacaaaggggcactttgccaggaaaccatactaataattaaagcagggactgagacagccattttggccacgaagggctgcatcccggaaggggaggaggccataacaattgtccagcactcttcacctcccggcctgatcgtgacctcctacagtaactactgtgaggattccttctgtaatgacaaagacagcctgtctcagttttgggagttcagtgagaccacagcttccactgtgtcaacaaccctccattgtccaacctgtgtggctttggggacctgtttcagtgctccttctcttccctgtcccaatggtacaactcgatgctatcaaggaaaacttgagatcactggaggtggcattgagtcgtctgtggaggtcaaaggctgtacagccatgattggctgcaggctgatgtctggaatcttagcagtaggacccatgtttgtgagggaagcgtgcccacatcagctgctcactcaacctcgaaagactgaaaatggggccacctgtcttcccattcctgtttgggggttacagctactgctgccattgctgctgccatcatttattcacttttcctaagaaggcacttctgggcctgggtctgaggacatcttttttgactgggagccttcttactgttgaggttcaacaagctgaggagtagatgggaatttgagggagaatacagagatactatgaacgtatttgacatttttaatacaatttctgctataatttttgtatgcagtaggcgttactaataaacatttctgctgtga

SEQ ID NO: 221870 - protein, 118 aa, Artificial Sequence
  derived and/or modified sequence
MTDTAEAVPKFEEMFASRFTENDKEYQEYLKRPPESPPIVEEWNSRAGGNQRNRGNRLQDNRQFRGRDNRWGWPSDNRSNQWHGRSWGNNYPQHRQEPYYPQQYGHYGYNQRPPYGYY

SEQ ID NO: 221871 - DNA, 357 bp, Artificial Sequence
  derived and/or modified sequence
atgaccgacaccgccgaggccgtgcccaagttcgaggagatgttcgccagcagattcaccgagaacgacaaggagtaccaggagtacctgaagagaccccccgagagcccccccatcgtggaggagtggaacagcagagccggcggcaaccagagaaacagaggcaacagactgcaggacaacagacagttcagaggcagagacaacagatggggctggcccagcgacaacagaagcaaccagtggcacggcagaagctggggcaacaactacccccagcacagacaggagccctactacccccagcagtacggccactacggctacaaccagagacccccctacggctactactag

SEQ ID NO: 221872 - DNA, 357 bp, Artificial Sequence
  derived and/or modified sequence
atgaccgatactgccgaagcagtccctaaatttgaagaaatgtttgccagccggttcaccgaaaacgacaaagagtatcaggaatacctgaagaggccccctgagtcacccccaatcgtagaagaatggaacagtcgggccggaggtaatcaacggaatcgcgggaaccggctgcaggataataggcagttccgagggcgggataatagatggggttggccaagcgacaacaggtccaatcagtggcacggaaggagctggggcaacaactaccctcaacatcgccaagagccttactatcctcagcagtacggtcattatggctataatcagcgtccaccatacggttactactag

SEQ ID NO: 221873 - DNA, 1568 bp, Artificial Sequence
  derived and/or modified sequence
gtcaggtggttgtcggattttagaggaaggcgctcggttacattggagaactggagtggtctggagttccacggtgtagtggaccagaggccacctctcctgggcttctcagtgtctcgccggcggggttcggcctgagctggattgacatagcccttggcggatttaaacaacctaaacattaagcagtacagctgcctcaaacctttgggattttcagaatgactgacactgccgaagctgttccaaagtttgaagagatgtttgctagtagattcacagaaaatgacaaggagtatcaggaatacctgaaacgccctcctgagtctcctccaattgttgaggaatggaatagcagagctggtgggaaccaaagaaacagaggcaatcggttgcaagacaacagacagttcagaggcagggacaacagatgggggtggccaagtgacaatcgatccaatcagtggcatggacgatcctggggtaacaactacccgcaacacagacaagaaccttactatccccagcaatatggacattatggttacaaccagcggcctccttacggttactactgatagaaatgttggcagcttttagtaaaagcatttactctgttaccatgagaaaagtttgggtgtcttctgttggtcatagttttacatctgattttacagaatggattattgattttttggaagttgagactttaaaaaaaatagatcttacttgcgaaatgcgatggttgctgggaatacctgaaactgtggattatattgcttgacttctacctcagaatcttctttgtttcatgacttaatagtgctttaagtttggtatattatttgacctctaggaattctttgttttacacagaaataaaaattttaaaatagaaaatgcttttactttgtaaggtaagagagtatccatatgcttagatgtgctcgtttctaaaattctagaggttgatataatcagctcatgaatgcacagctatgctttttgtgatagattgtacataacatcagcagttgaaaggtaaaacaattgcttttttttttttttgcatttgttaagtgactatggtactttgtgattccttaatctatagatgagtcagctccacacttgagtctctttttagagggaaatcagtaataaagctgtaaaataaggaaggaatcattgtcagtttgtgtcttgatctggtggtggttgggataagggtacacatcattttatacaaacactaaagctttttgctaacaacatagcaggtcaaaattcacacataagaaagtttaactctgtactgttcacactttttaatcctgtaaataatgctgcattttgatggttcttacttttttggtatttaatgtgggctgattttacaatgttatattcacttccagatgcatacctctgctgctttctctcctataaatagtgatgctataaacttcctttcacagagatcattctatttcaaatcactttaatgattattacaatgatttcattcaaataaaaattttaaaatatttaagcatcttcactcccaa

SEQ ID NO: 221874 - DNA, 357 bp, Artificial Sequence
  derived and/or modified sequence
atgacagacacagctgaggccgtgcccaagtttgaggagatgtttgccagccgcttcacagaaaatgacaaggagtaccaggagtacctgaagaggcctcctgagagcccccccatcgtggaggagtggaacagcagagctgggggcaaccagaggaacagaggcaaccggctgcaggacaaccggcagttccggggccgggacaaccgctggggctggcccagcgacaacagaagcaaccagtggcacggccgctcctggggcaacaactacccccagcaccggcaggagccctactacccccagcagtatggccactacggctacaaccagaggcctccctacggctactactag

SEQ ID NO: 221875 - DNA, 357 bp, Artificial Sequence
  derived and/or modified sequence
atgaccgacaccgccgaggccgtgcccaagttcgaggagatgttcgcatccagattcacggagaatgacaaagaataccaggagtatctaaagcggcccccagaatctcccccgattgttgaagaatggaactcgcgagcaggtggcaaccagcggaaccgcggtaaccgtctgcaggataatcggcagtttcgaggccgggacaatcgttggggttggccgtcagacaaccggtccaaccaatggcacgggaggtcatggggtaataactaccctcagcacagacaagagccgtactaccctcaacagtacggacattacgggtacaatcagcgtccaccgtatggatattactag

SEQ ID NO: 221876 - DNA, 357 bp, Artificial Sequence
  derived and/or modified sequence
atgacggacaccgccgaggcagtgcctaagttcgaggagatgttcgcttcaaggttcaccgaaaatgataaagaatatcaggagtatttgaaaaggcccccagaatctccacctatcgtcgaggaatggaactcccgtgccggtgggaaccaaagaaatagagggaatagactgcaagacaaccgccagtttcgagggagggataataggtgggggtggccgtccgacaataggagcaaccagtggcacggaaggtcgtgggggaataactaccctcagcaccgccaggaaccatattatccacagcagtacggccattatggttataaccaacgcccaccgtatgggtactactag

SEQ ID NO: 221877 - protein, 306 aa, Artificial Sequence
  derived and/or modified sequence
MSTWKARLTKRLKSPSRSMHPFPCSALLACFGNTRESASFNQSGVADTHSTVRVQPVAKAGRQPRHPSAEGAPEKRQDSSTHAERNGSANRNSSHRTAAQPAETPEDVPGSLDDGADCEAVVFHASIPRPSIIDTPKEEEFREEPKCLELEQKMTSDSPPEDIDHKDSYLITRSIMAEPDYIEDDNPELIRPQKLINPVKTSRNHQDLHRELLMNQKRGLAPQNKPELQKVMEKRKRDQVIKQKEEEAQKKKSDLEIELLKRQQKLEQLELEKQKLQEEQENAPEFVKVKGNLRRTGQEVAQAQES

SEQ ID NO: 221878 - protein, 131 aa, Artificial Sequence
  derived and/or modified sequence
MAEPDYIEDDNPELIRPQKLINPVKTSRNHQDLHRELLMNQKRGLAPQNKPELQKVMEKRKRDQVIKQKEEEAQKKKSDLEIELLKRQQKLEQLELEKQKLQEEQENAPEFVKVKGNLRRTGQEVAQAQES

SEQ ID NO: 221879 - protein, 90 aa, Artificial Sequence
  derived and/or modified sequence
MAEPDYIEDDNPELIRPQKLINPVKTSRNHQDLHRELLMNQKRGLAPQNKPELQKVMEKRKRDQVIKQKEEEAQKKKSDLEIELLKRQQK

SEQ ID NO: 221880 - protein, 128 aa, Artificial Sequence
  derived and/or modified sequence
MAEPDYIEDDNPELIRPQKLINPVKTSRNHQDLHRELLMNQKRGLAPQNKPELQKVMEKRKRDQVIKQKEEEAQKKKSDLEIELLKRQQKLEQLELEKQKLQEEQENAPEFVKVKGNLRRTGQEVAQA

SEQ ID NO: 221881 - protein, 67 aa, Artificial Sequence
  derived and/or modified sequence
MAEPDYIEDDNPELIRPQKLINPVKTSRNHQDLHRELLMNQKRGLAPQNKPELQKVMEKRKRDQVIK

SEQ ID NO: 221882 - protein, 101 aa, Artificial Sequence
  derived and/or modified sequence
MAEPDYIEDDNPELIRPQKLINPVKTSRNHQDLHRELLMNQKRGLAPQNKPELQKVMEKRKRDQVIKQKEEEAQKKKSDLEIELLKRQQKLEQLELEKQKL

SEQ ID NO: 221883 - protein, 84 aa, Artificial Sequence
  derived and/or modified sequence
MAEPDYIEDDNPELIRPQKLINPVKTSRNHQDLHRELLMNQKRGLAPQNKPELQKVMEKRKRDQVIKQKEEEAQKKKSDLEIEL

SEQ ID NO: 221884 - protein, 93 aa, Artificial Sequence
  derived and/or modified sequence
MAEPDYIEDDNPELIRPQKLINPVKTSRNHQDLHRELLMNQKRGLAPQNKPELQKVMEKRKRDQVIKQKEEEAQKKKSDLEIELLKRQQKLEQ

SEQ ID NO: 221885 - protein, 126 aa, Artificial Sequence
  derived and/or modified sequence
MAEPDYIEDDNPELIRPQKLINPVKTSRNHQDLHRELLMNQKRGLAPQNKPELQKVMEKRKRDQVIKQKEEEAQKKKSDLEIELLKRQQKLEQLELEKQKLQEEQENAPEFVKVKGNLRRTGQEVA

SEQ ID NO: 221886 - protein, 125 aa, Artificial Sequence
  derived and/or modified sequence
MAEPDYIEDDNPELIRPQKLINPVKTSRNHQDLHRELLMNQKRGLAPQNKPELQKVMEKRKRDQVIKQKEEEAQKKKSDLEIELLKRQQKLEQLELEKQKLQEEQENAPEFVKVKGNLRRTGQEV

SEQ ID NO: 221887 - DNA, 921 bp, Artificial Sequence
  derived and/or modified sequence
atgagcacctggaaggccagactgaccaagagactgaagagccccagcagaagcatgcaccccttcccctgcagcgccctgctggcctgcttcggcaacaccagagagagcgccagcttcaaccagagcggcgtggccgacacccacagcaccgtgagagtgcagcccgtggccaaggccggcagacagcccagacaccccagcgccgagggcgcccccgagaagagacaggacagcagcacccacgccgagagaaacggcagcgccaacagaaacagcagccacagaaccgccgcccagcccgccgagacccccgaggacgtgcccggcagcctggacgacggcgccgactgcgaggccgtggtgttccacgccagcatccccagacccagcatcatcgacacccccaaggaggaggagttcagagaggagcccaagtgcctggagctggagcagaagatgaccagcgacagcccccccgaggacatcgaccacaaggacagctacctgatcaccagaagcatcatggccgagcccgactacatcgaggacgacaaccccgagctgatcagaccccagaagctgatcaaccccgtgaagaccagcagaaaccaccaggacctgcacagagagctgctgatgaaccagaagagaggcctggccccccagaacaagcccgagctgcagaaggtgatggagaagagaaagagagaccaggtgatcaagcagaaggaggaggaggcccagaagaagaagagcgacctggagatcgagctgctgaagagacagcagaagctggagcagctggagctggagaagcagaagctgcaggaggagcaggagaacgcccccgagttcgtgaaggtgaagggcaacctgagaagaaccggccaggaggtggcccaggcccaggagagctag

SEQ ID NO: 221888 - DNA, 921 bp, Artificial Sequence
  derived and/or modified sequence
atgtctacctggaaggctcggctgacaaagcgcttaaagtcgccaagtcgttctatgcaccccttcccctgttcagccctcctagcatgctttggaaacacccgcgagtccgcttcgtttaaccagagcggcgtcgctgatactcacagcacggtcagagttcagcccgtggcaaaggccggtaggcagccacgacatcctagtgccgagggcgctcccgagaagcgtcaagatagctccacccatgcagagcgaaatgggagtgcaaaccggaactcgtctcacagaacagcggcccaacctgcggagacccccgaggacgtgccaggttcccttgatgacggcgctgattgcgaggccgtggtgttccatgcatcaatcccccggcccagtattatcgacaccccaaaagaggaggagtttcgtgaagaacctaaatgcctggagctagaacagaagatgactagcgacagtccccccgaggacatcgatcacaaggatagttacctaatcaccagatccatcatggctgaacccgactacattgaagatgacaacccggagctgatcaggccccagaagttaataaatcctgtcaagacaagccggaaccaccaggatcttcaccgcgagctactgatgaaccagaagcgagggttagcccctcagaacaagccagaattgcaaaaggtgatggagaagcgtaagagagaccaggttatcaagcaaaaagaagaggaagcccagaagaagaaaagcgatctagaaatcgagttgctcaagaggcagcagaaactggagcagctcgaactcgaaaaacagaaactgcaggaggaacaagagaatgctcccgagttcgtaaaggtaaaagggaacttgcgccgtacaggccaagaggttgcccaggcccaggagtcgtag

SEQ ID NO: 221889 - DNA, 3785 bp, Artificial Sequence
  derived and/or modified sequence
acagaaggaagagcgcgaaattgcccaggatggacactttcaaaggggccccagcggctaagtgactctcagggaaggtggccttgccatcccaacttctatttaggggcaaccactagcaagttcttctcttcgggcaattggaaagagttcctataagcaaagtggaggtgatgtggacccctggaaaatttccttgccccgtttgaactttgcaatgattcactgcaagtcatgtccacgtggaaagcaagactcaccaaaagactgaagtctccctctagaagcatgcatccatttccgtgctcagctctgctcgcctgttttgggaatacgagggagagtgcttccttcaatcagtccggcgtggctgatactcattccaccgtccgtgtgcagcctgtggccaaagcaggcagacagccaagacacccaagcgcagaaggagctccagagaaaaggcaagattcgagcacccatgcagagagaaatggcagtgcgaatcggaattcaagtcaccgcactgcggcccagcccgcggagacgcctgaagatgtgcccgggtccctggatgatggggcggactgtgaagcagtggtgtttcacgcttccatccccagaccatcaattattgacacgcccaaggaagaagaatttcgagaagaacctaaatgcctcgagctggagcagaaaatgacatcagacagcccacctgaggatattgaccataaggactcatatctcattacaagaagcatcatggccgagccagactacatagaagatgacaatcctgaactcattaggcctcagaaactgatcaatcctgtaaaaacctcccggaaccatcaagatcttcacagagaacttcttatgaatcaaaaaaggggtcttgctcctcagaacaaaccagaattgcagaaggtgatggaaaaaagaaaacgagaccaagtaataaagcagaaggaagaagaagcacagaagaagaaatctgacttggaaatagagctattaaaacggcagcagaagttggagcagcttgaacttgagaagcagaaattgcaagaagagcaagaaaatgcccccgagtttgtgaaggtgaaaggcaatctcaggagaacaggccaagaagtcgcccaagcccaggagtcctaggctgaggctgcaccaagacctcgtgtgtcaccccacagagctgtctgtgggtgccttctcaatctcagggcaaaagcccctggagaatatttcagccagcagagaattttgacttgcagtaggatttggtttgattttcctacgatctgggtggatgccttgcctgtgacagttgcagttcctattcgccaaatgaagggcagtgccccgcacgtaagttggaatgatggacctgtgttcagagacttaacagaaccaacaagcaaaacaagtgagaacaggaaaaaggaagaggacactggaatcaattcttgagagttgcactacttggtttttcttccattccaagtttcgtgggacccagagccttttttcttttaaaagctaaaaaacaagtgtttaattcctctttttgttatctgttagataattgagatcacctagaaatgcgtttaatctgttcactcactgtaaattttgaggacccagaattgtcttgtttaatttatactttcacccctgttgcagttaacaccagagaaggaacgtgaatgtcgagcacagccactacccttgttggcacttaatttagaaatagggtgagaagtttaaaagcccatcttgattttattttcattccttttggttctctgtgtaataatagcaggctacatagtgacattccagttccaagaaggtacatcctgtccattcattaattgctttgattactaggagggtttctgttcagttttgtttttaaatgtcttgctgatctagttctttcagatggaataaccttccagtcccttagagagtggaactagtccatataacccagcttcagtagcaaaagtagaagccgccacatcttttcatttctccaagaggagagtggggaaggttcccatgaccagctgggcagtcaggatttctctaggcattctaatgtgaaataagtgtagactgctgtcaaggaggcttcatcagaagatgtatagcatttgaatgtctaatgataatgcatatcattagaatccaagctttgaaaatttctgattaatgctcatgtatttctttatctttgtttttccttgtgaagaaagactttcaccactgtctgagtgatgatgctgttgataaggatgatgtcgatgactactatattgcatctctcaggaacagctgatgggaagggaggggctgctgagttcccttgttctagctagcagcacgctcctcagagagggggccgagttacagacagcagccgcattctcatgcaaaattagttttaaactgctagtgtgggcatcggtaccttttgcctgggtgataccgaagaattgttgaggatttagtatgctccgtagagacagttcagccagtcatttctgcattggagagacttctcatactttctttgaagactcatagaaagctggatctagagcttttgaatccttaattagcacagtagaaattagctttctatgggaatgctttagtgttagcagttgacaattaggcccatattcaatctgaatgggaacaaaagtaaatgcaatgataatatactgctagttagagaaacatgttagttgattatacctgaaatggattatttatctcatcagcaagtattatttgaataaaatgagaaatgcttaagaaaaattgttgctctacagtaatttggtttcgaagaatggaatggtaactattttttcccatcgttcttttgagagaaggaagtgtgatgactgatgatcttgaaaagcccatttctgattgcacgttgactggaattctttctttgtgtctgtggactagcgatgctgtttgtaaaatgaagattcgggactggctcatatctttttatctaactagatgtcagatcttgaaatctgtattctcgaagcaattctgccacttgatcgtattcacaggggccctggtaggctcctttagaaggaccatttctgttcctagagcttaactagaattcattcttcactgaaaaaaaaaaaagttacttaagaaagcatttctttcctaatctcactcaaatctgcagaattatttgtaattagtaatacaaaatctggccaaaaggagacttgtaaatagcgtaaagtggtgtcttatgctaaacggtggaatgtataggcagagaagctctttgaagttgtcagatgagctgggctcacaagcctgattcaaacaggctgtcggtctcctctcaccccttaatactgtgcagcccaaactcctaggactcttgaacatctgagcagttttgtgctttgagccactttttgacaaaaatggctccatttttccacagcgtggttttcttaaaatagtttaatgttttatagtctcatagtagtagtgttgctttctaagctataacagtcgactttattcttctactctgaaaaatcttgacttgtttgagtgtatataatatatataaagggagccttaatggattggttttcataatttaatattttttgtatttgctcttgtataattgtttttaacggaaagtattaaagaattgagggtggaattcttagaaccaaagttattcttaataaaaatcaccacatgcttggaccatg

SEQ ID NO: 221890 - DNA, 921 bp, Artificial Sequence
  derived and/or modified sequence
atgagcacctggaaggcccggctgaccaagaggctgaagagccccagccgctccatgcaccccttcccctgcagcgccctgctggcctgctttggaaacacccgggagagcgccagcttcaaccagagcggcgtggccgacacccacagcacagtgcgggtgcagcctgtggccaaggccggccggcagcccaggcaccccagcgctgagggcgcccctgagaagaggcaggacagcagcacccatgctgagagaaatggcagcgccaacagaaacagcagccacaggacagctgcccagcctgctgagaccccagaagatgtgcccggcagcctggatgatggagctgactgtgaggccgtggtgttccacgccagcatcccccggcccagcatcatcgacacccccaaggaggaggagttccgggaggagcccaagtgcctggagctggagcagaagatgaccagtgacagccccccagaagatattgaccacaaggacagctacctgatcaccaggagcatcatggccgagccagactacattgaagatgacaaccctgagctgatccggccccagaagctgatcaaccctgtgaagaccagcaggaaccaccaggacctgcaccgggagctgctgatgaaccagaagaggggcctggccccccagaacaagccagagctgcagaaggtgatggagaagaggaagagggaccaggtgatcaagcagaaggaggaggaggcccagaagaagaagagtgacctggagattgagctgctgaagaggcagcagaagctggagcagctggagctggagaagcagaagctgcaggaggagcaggagaatgcccctgagtttgtgaaggtgaagggcaacctgcggaggacaggccaggaggtggcccaggcccaggagagctag

SEQ ID NO: 221891 - DNA, 921 bp, Artificial Sequence
  derived and/or modified sequence
atgagcacctggaaggcccggctgaccaagcggctgaagagcccctcacggtccatgcatccctttccctgctcagccttgctcgcctgctttgggaacacaagggagagcgcatctttcaaccagagcggcgttgcagatacgcattcaacggtccgagtacaaccagtggcaaaagctggcaggcagccccgccacccatcagcagaaggggcccccgaaaagagacaggactctagcacacacgccgaacgaaacggaagcgctaaccggaattctagtcatcggacagctgcacagccagccgagacacctgaggacgttccaggtagcctcgacgacggagcagactgcgaagcggtagtctttcatgccagcatcccaagaccttccattatcgacacacccaaggaggaagagttccgggaagaacccaagtgcttggagctggagcaaaaaatgacgtctgatagcccccccgaggatatcgatcacaaagacagctatctgattaccagatcgatcatggctgaacctgactacattgaagacgataatccagaactgatcaggccacagaaactgataaatcccgtgaagacatcacggaatcatcaggatcttcacagggaactcttgatgaaccagaagagggggcttgcccctcaaaacaaacccgagttacagaaagtgatggagaagagaaagcgagaccaggtgattaaacagaaggaggaggaggcccagaaaaagaaaagtgacttagaaatcgagctcctgaagaggcagcagaagttggagcagttggaactggaaaaacagaaactgcaggaagagcaggaaaacgcccctgagttcgttaaggttaaagggaacctcagacgcaccgggcaggaagttgctcaagcccaggagtcttag

SEQ ID NO: 221892 - DNA, 921 bp, Artificial Sequence
  derived and/or modified sequence
atgtctacttggaaagcacgacttactaaacgtctgaagtccccctcccgtagcatgcacccgtttccctgttcagcgctgctcgcatgtttcgggaacacccgcgaatccgcgtcatttaatcagtccggggtggctgatacacatagtactgttcgcgtgcagcctgttgcaaaagcgggacgccagcccagacacccaagcgccgagggcgcacctgaaaaacgtcaggattcatccacccacgcagagagaaacggctccgctaacaggaacagttctcaccgaactgccgctcagccggctgaaactcctgaggatgtgcctggaagtttagatgacggcgcagattgcgaggctgtcgtttttcatgcaagtataccacgcccaagtatcattgatacgcctaaggaagaagagttcagggaagaacccaaatgcctagaacttgagcagaagatgacttctgattcacctccggaagatattgatcacaaggatagctacttaatcactcgctctatcatggctgagcccgactatatagaagatgacaaccctgaactcatcaggccacagaagctcatcaatcccgtgaagaccagccgcaatcaccaggacctccatagagagcttctgatgaaccaaaaacgcggacttgctccccagaacaagccggagttgcagaaggttatggagaagcgcaagagagatcaggttattaagcagaaggaggaggaggcacagaaaaaaaagtccgacctggaaatcgagctgttgaagcgacagcagaaactagaacagctcgagctggagaaacagaaactccaggaagagcaggaaaatgcaccggagttcgtcaaagtgaagggaaatctccggagaacaggtcaagaagtagcgcaagcacaggagtcctag

SEQ ID NO: 221893 - protein, 669 aa, Artificial Sequence
  derived and/or modified sequence
MAVYRAALGASLAAARLLPLGRCSPSPAPRSTLSGAAMEPAPRWLAGLRFDNRALRALPVEAPPPGPEGAPSAPRPVPGACFTRVQPTPLRQPRLVALSEPALALLGLGAPPAREAEAEAALFFSGNALLPGAEPAAHCYCGHQFGQFAGQLGDGAAMYLGEVCTATGERWELQLKGAGPTPFSRQADGRKVLRSSIREFLCSEAMFHLGVPTTRAGACVTSESTVVRDVFYDGNPKYEQCTVVLRVASTFIRFGSFEIFKSADEHTGRAGPSVGRNDIRVQLLDYVISSFYPEIQAAHASDSVQRNAAFFREVTRRTARMVAEWQCVGFCHGVLNTDNMSILGLTIDYGPFGFLDRYDPDHVCNASDNTGRYAYSKQPEVCRWNLRKLAEALQPELPLELGEAILAEEFDAEFQRHYLQKMRRKLGLVQVELEEDGALVSKLLETMHLTGADFTNTFYLLSSFPVELESPGLAEFLARLMEQCASLEELRLAFRPQMDPRQLSMMLMLAQSNPQLFALMGTRAGIARELERVEQQSRLEQLSAAELQSRNQGHWADWLQAYRARLDKDLEGAGDAAAWQAEHVRVMHANNPKYVLRNYIAQNAIEAAERGDFSEVRRVLKLLETPYHCEAGAATDAEATEADGADGRQRSYSSKPPLWAAELCVTCSS

SEQ ID NO: 221894 - DNA, 2010 bp, Artificial Sequence
  derived and/or modified sequence
atggccgtgtacagagccgccctgggcgccagcctggccgccgccagactgctgcccctgggcagatgcagccccagccccgcccccagaagcaccctgagcggcgccgccatggagcccgcccccagatggctggccggcctgagattcgacaacagagccctgagagccctgcccgtggaggcccccccccccggccccgagggcgcccccagcgcccccagacccgtgcccggcgcctgcttcaccagagtgcagcccacccccctgagacagcccagactggtggccctgagcgagcccgccctggccctgctgggcctgggcgccccccccgccagagaggccgaggccgaggccgccctgttcttcagcggcaacgccctgctgcccggcgccgagcccgccgcccactgctactgcggccaccagttcggccagttcgccggccagctgggcgacggcgccgccatgtacctgggcgaggtgtgcaccgccaccggcgagagatgggagctgcagctgaagggcgccggccccacccccttcagcagacaggccgacggcagaaaggtgctgagaagcagcatcagagagttcctgtgcagcgaggccatgttccacctgggcgtgcccaccaccagagccggcgcctgcgtgaccagcgagagcaccgtggtgagagacgtgttctacgacggcaaccccaagtacgagcagtgcaccgtggtgctgagagtggccagcaccttcatcagattcggcagcttcgagatcttcaagagcgccgacgagcacaccggcagagccggccccagcgtgggcagaaacgacatcagagtgcagctgctggactacgtgatcagcagcttctaccccgagatccaggccgcccacgccagcgacagcgtgcagagaaacgccgccttcttcagagaggtgaccagaagaaccgccagaatggtggccgagtggcagtgcgtgggcttctgccacggcgtgctgaacaccgacaacatgagcatcctgggcctgaccatcgactacggccccttcggcttcctggacagatacgaccccgaccacgtgtgcaacgccagcgacaacaccggcagatacgcctacagcaagcagcccgaggtgtgcagatggaacctgagaaagctggccgaggccctgcagcccgagctgcccctggagctgggcgaggccatcctggccgaggagttcgacgccgagttccagagacactacctgcagaagatgagaagaaagctgggcctggtgcaggtggagctggaggaggacggcgccctggtgagcaagctgctggagaccatgcacctgaccggcgccgacttcaccaacaccttctacctgctgagcagcttccccgtggagctggagagccccggcctggccgagttcctggccagactgatggagcagtgcgccagcctggaggagctgagactggccttcagaccccagatggaccccagacagctgagcatgatgctgatgctggcccagagcaacccccagctgttcgccctgatgggcaccagagccggcatcgccagagagctggagagagtggagcagcagagcagactggagcagctgagcgccgccgagctgcagagcagaaaccagggccactgggccgactggctgcaggcctacagagccagactggacaaggacctggagggcgccggcgacgccgccgcctggcaggccgagcacgtgagagtgatgcacgccaacaaccccaagtacgtgctgagaaactacatcgcccagaacgccatcgaggccgccgagagaggcgacttcagcgaggtgagaagagtgctgaagctgctggagaccccctaccactgcgaggccggcgccgccaccgacgccgaggccaccgaggccgacggcgccgacggcagacagagaagctacagcagcaagccccccctgtgggccgccgagctgtgcgtgacctgaagcagctag

SEQ ID NO: 221895 - DNA, 2010 bp, Artificial Sequence
  derived and/or modified sequence
atggcagtgtaccgcgccgccctcggcgccagcctagccgccgcccgcctcctaccactgggtcgatgctcaccttcgccagcgcctcgaagtactctgagcggtgcagctatggaaccagctccgcggtggcttgcaggcttgagattcgacaacagggctttgcgagctttgcctgtggaagctccgccacccggcccagagggtgccccgtccgccccacggcccgtgccaggcgcctgtttcacgcgcgtgcagcctacgcctctaaggcagccgcgacttgtggcactctccgagcctgcactggcccttcttggcctgggggctccacctgctcgcgaagcagaagcggaggcagctctgttcttcagcggcaacgcgctgctgccaggagccgagccagccgcccattgttattgcggccaccagttcggccaatttgcgggccagcttggagacggagccgctatgtacttaggggaagtgtgtacagccacaggagagcgctgggaactgcagctgaagggcgcaggacccaccccattttcaagacaagccgacggacgtaaggtattgcgctccagcattcgcgagtttctatgctctgaagccatgtttcatctgggtgttcctacaactagggctggtgcctgtgtaacttctgagagtacagtggtgagggatgtgttctacgacggcaatcccaagtatgagcaatgcaccgtcgttcttcgtgtcgccagcaccttcatccggttcggctccttcgagatctttaagtcagctgatgagcacacaggacgcgccggccccagcgtggggaggaacgacataagagtacagctgctggattatgttataagttcattttatccagaaatccaggcagcgcacgcctccgattccgtgcagagaaacgctgctttctttagggaggtgacacgccgaacagcccgcatggttgcagagtggcaatgtgtgggcttttgtcacggtgtgcttaatactgataacatgtccatacttggtctgaccatcgattatggccctttcggcttcctggaccgctatgatcctgatcacgtctgcaatgccagcgacaataccggcagatatgcttatagtaaacagccggaggtgtgcagatggaacctacgaaagctggcggaagctctgcaaccagagctccccctggagctgggggaagccattctggctgaggagtttgatgctgaatttcagcgacactacctgcagaagatgagacgtaagttaggccttgttcaagtggagctggaggaagacggtgcgcttgtttccaagctgctcgagacaatgcatttgaccggagctgatttcactaataccttctacctgctgtcctccttcccagtagagctggagagcccaggtctggctgaattcctggctcgactgatggaacaatgtgcttccctggaggagttacgtctggcatttcggccccaaatggaccctcgtcaactgtccatgatgttgatgcttgcccagagtaatcctcaattgtttgcactgatgggcactcgtgctggaatagcacgagaacttgagagggtggaacagcaatccagactcgagcagctgtccgctgcagaacttcaaagccggaatcagggccattgggcggattggcttcaggcctaccgcgctcgactagataaggatctggaaggggccggggacgcagcagcctggcaagccgagcatgtccgggtgatgcatgccaataatccaaaatatgttctccggaattacatagctcagaacgctattgaagccgctgagagaggggacttttccgaagtgagacgggtcctaaagctcttggagacaccctaccattgtgaagccggggccgccactgacgccgaagccacagaagctgacggcgccgacggtcggcagagatcatatagctcaaaacctccattgtgggccgccgaactgtgcgtgacatgatcctcatag

SEQ ID NO: 221896 - DNA, 2004 bp, Artificial Sequence
  derived and/or modified sequence
atggctgtgtaccgggccgccctgggcgccagcctggccgccgcccggctgctgcccctgggccgctgcagccccagccctgcccccaggagcaccctgagcggggccgccatggagcccgccccccgctggctggccggcctgcgctttgacaacagagccctgcgggccctgcctgtggaggcccctcctcctggccctgagggcgcccccagcgcccccaggcctgtgcctggggcctgcttcaccagggtgcagcccacccccctgcggcagccccggctggtggccctgtctgagcccgccctggccctgctgggcctgggcgcccccccagcccgggaggccgaggccgaggccgccctcttcttctctggaaatgccctgctgcctggagctgagcctgctgcccactgctactgcggccaccagtttggccagtttgctggccagctgggagatggagctgccatgtacctgggggaggtgtgcacagccactggagagcgctgggagctgcagctgaagggggccggccccacccccttcagccggcaggctgatggcaggaaggtgctgcggagcagcatccgggagttcctgtgcagcgaggccatgttccacctgggcgtgcccaccacccgggccggggcctgtgtgaccagcgagagcacagtggtgagagatgtgttctatgatggcaaccccaagtatgagcagtgcaccgtggtgctgcgggtggccagcaccttcatccgcttcggcagctttgagatcttcaagtctgcagatgagcacacaggccgggccggccccagcgtgggcagaaatgacatccgggtgcagctgctggactatgtgatcagcagcttctacccagagatccaggccgcccacgccagtgacagcgtgcagagaaatgctgccttcttccgggaggtgaccaggagaacagccaggatggtggccgagtggcagtgtgtgggcttctgccacggcgtgctgaacacagacaacatgagcatcctgggcctgaccattgattatggccccttcggcttcctggacagatatgaccctgaccacgtgtgcaatgccagtgacaacacaggccgctatgcctacagcaagcagcctgaggtgtgccgctggaacctgaggaagctggccgaggccctgcagcctgagctgcccctggagctgggggaggccatcctggccgaggagtttgatgctgagttccagaggcactacctgcagaagatgaggaggaagctgggcctggtgcaggtggagctggaggaggatggagccctggtgtccaagctgctggagaccatgcacctgaccggggctgacttcaccaacaccttctacctgctgagcagcttccctgtggagctggagagccctggcctggccgagttcctggcccggctgatggagcagtgtgccagcctggaggagctgcggctggccttccggccccagatggacccccggcagctgtccatgatgctgatgctggcccagagcaacccccagctgtttgccctgatgggcacccgggccggcatcgcccgggagctggagcgggtggagcagcagagccggctggagcagctgtctgctgctgagctgcagagcaggaaccagggccactgggccgactggctgcaggcctaccgggcccggctggacaaggacctggagggcgctggagatgctgctgcctggcaggccgagcacgtgcgggtgatgcacgccaacaaccccaagtatgtgctgaggaactacatcgcccagaatgccattgaagctgctgagcggggggacttcagcgaggtgagaagagtgctgaagctgctggagaccccctaccactgtgaggccggggccgccacagatgctgaggccacagaagcagatggagcagatggccggcagaggagctacagcagcaagccacccctgtgggccgctgagctgtgtgtgaccagctag

SEQ ID NO: 221897 - DNA, 2010 bp, Artificial Sequence
  derived and/or modified sequence
atggccgtgtaccgggccgccctgggcgccagcctggccgccgccaggctcctccccctgggccggtgttctccgtcgcctgcaccaaggagtaccctgtctggcgccgctatggaaccagcccccagatggctggccggcctacgcttcgacaacagggccctccgtgccctcccagtggaggcacccccccccgggcctgagggtgcccccagcgcgcctcgtcctgtgcccggcgcttgctttaccagagttcaacctacacccttgcggcagccaaggcttgttgccctgagcgaacccgctttggcacttctggggcttggcgccccccccgcacgcgaagccgaagccgaggccgctctattcttcagtgggaatgccctgttgccaggggccgaaccggcagcgcactgctactgcggacaccagttcggacagtttgcgggacagctgggggacggggccgccatgtacctcggtgaggtttgcacagctacaggggagcgatgggaactgcaactaaagggagctgggcctaccccatttagtaggcaggccgatggaaggaaagtgctccggtcatccatacgggagtttttgtgttcagaagcgatgttccaccttggcgtacctacaacacgcgccggcgcttgtgtcacatccgagtccacggttgtcagggatgtcttttatgatggtaatcccaaatacgagcagtgtactgtagtattacgggtggctagcacttttattaggtttggcagctttgaaattttcaaaagtgcggatgagcatacaggaagagccggaccttcagtgggaagaaacgacatacgggtccagctgttggattatgtgatctctagtttctatccggagatacaggctgcacatgcatccgacagcgtgcagagaaatgctgccttcttccgtgaagtgacccggagaaccgcccgcatggtggccgaatggcagtgtgtaggcttctgccacggggtgctgaatacagacaatatgtccatcttagggctgaccatagattatggaccgttcggattcctcgaccggtacgatcccgatcacgtgtgcaacgcttctgacaacacaggccgctacgcctatagtaagcagcctgaggtatgccggtggaatttgagaaagctggccgaagctctacagcccgagctaccactggaattaggcgaggctatactggcagaggagttcgatgctgagtttcagcgccactatttgcagaagatgcgccgcaaactgggcctggtccaggtggaactggaggaggacggggcccttgtgtcaaagctactagaaaccatgcacttaaccggggccgatttcactaacactttctatttgctgtctagcttcccggtcgagttagaatcacccggtctggccgagtttctggctcgcctgatggaacagtgtgcatccttggaagagttacgcctggcttttcgcccacagatggatcctcggcaactgtctatgatgctgatgctcgcccagagcaacccgcagctgtttgcactgatggggactcgcgcaggcatagctagagagctggagcgggtggaacagcagtcccgattagagcaactgagtgccgccgaactgcagtctaggaaccaaggacactgggcggactggctgcaggcttacagggcccgtctcgacaaagacctcgagggggccggcgatgccgccgcttggcaggcagagcacgtgcgtgtgatgcatgctaataatcctaaatacgtccttcggaactacattgcgcagaatgccatcgaggctgccgagaggggcgatttctccgaggtcaggcgagtgttgaagctcctggagacgccctatcactgtgaggccggcgctgctacagacgcagaagctacggaagccgacggagccgatgggagacagcgttcctactctagcaaacccccattgtgggctgccgagctctgcgtgacatgaagctcatag

SEQ ID NO: 221898 - DNA, 2010 bp, Artificial Sequence
  derived and/or modified sequence
atggcagtgtacagggccgcactgggggcttccctagcagccgcacgcctgctccccctcggcagatgttcccctagccccgcacctcgctctaccctctcaggcgctgccatggagcccgctcctcgttggcttgccggtttacgtttcgacaacagagccctgcgtgcactgccagttgaggccccaccacccggaccggaaggagcaccaagcgcgcctaggcctgttcctggcgcatgcttcaccagggtccagccaactccactccggcagcccagactcgtcgccctgagtgagcccgcactcgcactgcttggtctgggagcgcctccagctagggaggcagaagccgaagcagcactctttttcagtgggaatgcactgcttcccggagctgaacccgctgcgcactgctattgcggtcaccagtttgggcagttcgccggtcagctcggggatggcgctgccatgtacctgggtgaggtctgcaccgccaccggggaacggtgggagttacagcttaagggggctggtccaaccccttttagccgacaggcggacggaagaaaggtcctgaggtcttcaattcgcgagttcctttgtagcgaagcaatgttccatctgggcgtcccaactacacgagctggagcctgcgtgacatccgagtccacagttgtgcgggatgtgttctatgacggaaacccgaagtatgagcaatgcaccgttgtgttgcgggtggcctctacatttatacggtttggttcatttgagatcttcaaaagtgcagacgaacatacagggagggcagggccatcagttggacgcaatgatatccgagtgcaacttctcgattacgttatttcaagcttttatcccgagattcaggccgctcatgcgtccgactctgtgcagaggaatgccgcattcttcagagaagtgactcgtcgtactgcaaggatggtggctgaatggcagtgtgtgggattttgccacggcgtgctgaacactgataatatgagtattctaggcctgacaatcgattacgggccttttggatttcttgaccggtacgacccggatcacgtctgcaatgccagcgacaacacgggcaggtatgcctacagcaagcagcccgaagtgtgcagatggaatctgcgcaagctcgcagaggctctgcagccggagctcccattggagttgggggaagcaatactggcagaggaatttgatgccgagttccaacggcattatcttcagaaaatgcgcagaaagctcggcttggtccaggtcgagctcgaagaagacggcgctctggtgtccaagctattagagaccatgcacctgaccggagccgactttactaataccttctatctcctgtcttctttccccgtggaattagaatccccaggccttgccgagttcctcgcaaggctgatggagcagtgtgcaagcctggaagaattgaggctggcttttaggccacaaatggaccctcgtcagctgagtatgatgctgatgttggcgcagtctaacccacagttgttcgcccttatgggaacgagagcaggtattgctagggaattagagcgggttgagcagcagtcacggctggaacagttaagtgcggctgaactgcagtccaggaaccagggccactgggcagattggctacaggcgtatcgagcccgactcgataaagaccttgagggcgcaggcgatgccgctgcttggcaggccgagcatgtccgagttatgcacgctaacaatcctaaatacgtgctccgtaactacattgctcaaaatgcaatcgaggccgcagaacgcggagacttttccgaggtgagaagagtacttaaactccttgagacaccttatcactgcgaagctggtgccgcaacggacgctgaggctacagaagcagatggagctgatggtcgccaaagatcttactcctccaagcctcccctgtgggcagccgagttatgtgtgacatgatccagctag

SEQ ID NO: 221899 - DNA, 2315 bp, Artificial Sequence
  derived and/or modified sequence
gcgcggggcggggcttccgggcggggcaggctggcttccggcgggagcggggccgcggatggccgtatacagggcagcgctcggggcttcgctcgcggctgcccgactcttgcccctcggtcgctgttccccgtcgccggcgccccgctctacgttgtcgggcgccgccatggagcccgcgcctcgctggctggcggggctgcgcttcgacaaccgcgccctgcgcgccctgcccgtggaggcgccgccgcccggtcccgagggcgccccgtccgcgccgcggcccgtgcccggggcctgcttcacccgcgtgcagcccaccccgctgcggcagccgcgcctcgtggcgctgtcagagcccgcgctggcgttgctgggcctgggcgcgccgcccgcgcgcgaggccgaggccgaggccgcgctgttcttcagcggcaacgcgctcctgccgggcgccgagcccgccgcgcactgctactgcggccaccaattcggccagttcgccgggcagctgggcgacggcgccgccatgtacctgggcgaggtgtgcacggcgaccggcgagcgctgggagctgcagctcaagggcgccgggcccacgcccttctccagacaggccgacggtcgcaaggtcctacggtcaagcatccgggagtttctatgcagcgaagccatgttccacctgggagtccccaccacacgggccggcgcctgcgtcacgtccgagtccacggtggtgcgcgacgtgttctatgatggtaatcccaaatatgaacaatgcacggttgtgttgcgtgtagcttccactttcataaggtttggatcctttgagatttttaagtctgcagatgagcacacagggcgtgcaggccccagcgtggggaggaacgacattcgagtgcagctgctcgactatgtcatcagctccttttaccccgagatccaggctgctcatgccagcgacagcgtgcagagaaatgctgccttcttccgggaggtgacgcggcgcacggcgcggatggtggccgagtggcagtgtgtgggcttctgccacggcgtgctcaacaccgacaacatgagcatcctggggctcaccatcgactacgggccctttggcttcctggacaggtacgaccccgaccacgtgtgcaatgcctccgacaacaccggccgctacgcgtacagcaagcagcccgaggtgtgcaggtggaacctgcggaagctggccgaggccctgcagccggaactgcccctggagctgggggaggccatcctggccgaggagtttgacgccgagttccaaaggcactacctgcagaagatgcgcaggaagctgggcctcgtgcaggtggagctggaggaagacggggcgctggtgtccaagctcctggagaccatgcatctgaccggtgccgacttcacaaacaccttctacttgctgagctccttcccagtggagctagagtcgccaggcctggcggaattcctggccaggctgatggagcagtgtgcctccctggaggagctgaggctggccttccggccccagatggatccccggcagctatccatgatgctgatgctggcgcagtcaaacccgcagctgttcgcgcttatgggcacccgggcaggcatcgccagggagctggagcgtgtggagcagcagtctcggctggagcagctgagtgcggcagagctgcagagcaggaaccagggccactgggctgactggctacaggcgtacagagcccggctggacaaggacctggaaggcgctggggacgctgccgcctggcaggctgagcacgtgcgcgtgatgcacgccaacaacccgaagtacgtgctgaggaactacatcgcgcagaatgccatcgaggctgccgagcgcggggacttctcagaggtgcggcgggtgctgaaactactggagaccccttaccactgcgaggcgggggccgccacagacgccgaggccacggaagccgacggggcggacggcaggcagcgctcctacagcagtaagcccccgctctgggcagcagaactgtgcgtgacatgatcttcgtaacggcctcggcacgctccacacccctggagtctcccgaggcccccatgtgctgctgagtggccaagatgatgccaggctgccctatacactgggggattctgccctggcccatgcacacccgtctttccatgatggcagagacatccagtcaggacctgacccgtctctgtctgaggccggctcagcagtgcagcctggtccctgggggctggacccaggctcctaaataaaccagcaactccctcga

SEQ ID NO: 221900 - protein, 270 aa, Artificial Sequence
  derived and/or modified sequence
MLRQLLLAALCLAGPPAPARACQLPSEWRPLSEGCRAELAETIVYARVLALHPEAPGLYNHLPWQYHAGQGGLFYSAEVEMLCDQAWGSMLEVPAGSRLNLTGLGYFSCHSHTVVQDYSYFFFLRMDENYNLLPHGVNFQDAIFPDTQENRRMFSSLFQFSNCSQGQQLATFSSDWEIQEDSRLMCSSVQKALFEEEDHVKKLQQKVATLEKRNRQLRERVKKVKRSLRQARKKGRHLELANQKLSEKLAAGALPHINARGPVRPPYLRG

SEQ ID NO: 221901 - DNA, 813 bp, Artificial Sequence
  derived and/or modified sequence
atgctccggcagttgctactggcagccctgtgtttagctggacctcctgcccctgccagagcctgccagctgcccagcgaatggcggccattatccgaggggtgtcgggcagagctggccgagactatcgtgtatgccagggtgttggctctgcacccagaggcgcctggcttatataaccacctgccttggcaatatcacgcaggccagggcggtctcttctattctgccgaggtcgaaatgctgtgtgaccaagcttggggcagcatgctcgaggttccggctggctctagactgaacttgactgggttaggatacttctcatgccattcccacactgtggtgcaggattacagctacttcttctttctgcgcatggatgagaactataacctgttgccccacggagtcaacttccaggacgcgattttcccagacacccaggaaaacagacggatgttctccagcctttttcagttcagcaattgcagccaggggcagcagcttgccacattttcatccgattgggagatacaagaggacagcaggctcatgtgttcttccgtccagaaggctcttttcgaagaagaagatcacgtgaagaaactccaacagaaggtggccactctggaaaaaaggaatcgccagctgagggaacgcgtcaagaaggttaagagatctctgagacaagccagaaagaagggacgacatctggagctagcgaatcagaagctctctgaaaagttggccgcaggcgcattgccacatattaatgctcgcggtccggtgagaccaccctacctgcgaggctag

SEQ ID NO: 221902 - DNA, 813 bp, Artificial Sequence
  derived and/or modified sequence
atgttaaggcagctcctcttagccgctctctgtctcgccgggcctcctgctcctgctcgagcttgtcaactgccctcagagtggcgccccctgagcgagggatgccgcgctgagcttgccgaaaccattgtgtacgcacgtgttctcgcgctgcaccccgaggctcccggcctgtacaaccacttaccctggcagtaccatgccggtcaaggcggattgttttactctgccgaagtcgaaatgctatgtgatcaggcttggggttcaatgctcgaagttcctgctgggtccagactgaatcttacgggtctggggtatttctcatgccattcccatacagtggtgcaggattatagttacttttttttcctcagaatggacgaaaattacaacctcctccctcatggcgtcaatttccaagacgcgatctttccagacacccaggaaaaccggcgtatgttcagctctctgttccagttctccaattgttcgcaaggtcaacaactcgccacattctcttctgactgggagattcaggaagattctaggcttatgtgttcatctgtccaaaaggccctcttcgaggaggaggatcacgttaagaagctccagcaaaaagtggccacactggaaaagcgcaaccggcagctgcgagaaagggtgaagaaagtcaaacgcagcctgaggcaggcaagaaagaagggcaggcatctagaacttgccaatcagaagctgtctgagaaactcgccgcgggagccctgccccatattaacgcccgggggccagtgagaccaccatacctccgagggtag

SEQ ID NO: 221903 - DNA, 813 bp, Artificial Sequence
  derived and/or modified sequence
atgttaaggcagctcctcttagccgctctctgtctcgccgggcctcctgctcctgctcgagcttgtcaactgccctcagagtggcgccccctgagcgagggatgccgcgctgagcttgccgaaaccattgtgtacgcacgtgttctcgcgctgcaccccgaggctcccggcctgtacaaccacttaccctggcagtaccatgccggtcaaggcggattgttttactctgccgaagtcgaaatgctatgtgatcaggcttggggttcaatgctcgaagttcctgctgggtccagactgaatctgacaggactgggatacttttcttgccactcccatactgttgtgcaagactatagttattttttctttttgcgtatggacgaaaactacaatctactgcctcatggggtgaattttcaggatgccatttttcccgatactcaggagaatagacggatgttcagtagcctatttcaattcagtaattgcagccaaggacaacagctcgcaacattcagctctgattgggagatccaggaggacagccggctgatgtgctcatccgtgcaaaaggcactgttcgaggaggaggatcacgtaaagaagctacaacaaaaagtcgctacattggagaagcggaataggcagttacgtgaacgggtcaaaaaagtgaagcggagtctacgacaggcccggaaaaaggggagacaccttgagttggctaatcaaaaactgtcagaaaagcttgccgcaggcgccttgccccacatcaatgctcggggtcccgtccgtccaccatatcttagaggttag

SEQ ID NO: 221904 - DNA, 813 bp, Artificial Sequence
  derived and/or modified sequence
atgctgagacagctgctgctggccgccctgtgcctggccggcccccccgcccccgccagagcctgccagctgcccagcgagtggagacccctgagcgagggctgcagagccgagctggccgagaccatcgtgtacgccagagtgctggccctgcaccccgaggcccccggcctgtacaaccacctgccctggcagtaccacgccggccagggcggcctgttctacagcgccgaggtggagatgctgtgcgaccaggcctggggcagcatgctggaggtgcccgccggcagcagactgaacctgaccggcctgggctacttcagctgccacagccacaccgtggtgcaggactacagctacttcttcttcctgagaatggacgagaactacaacctgctgccccacggcgtgaacttccaggacgccatcttccccgacacccaggagaacagaagaatgttcagcagcctgttccagttcagcaactgcagccagggccagcagctggccaccttcagcagcgactgggagatccaggaggacagcagactgatgtgcagcagcgtgcagaaggccctgttcgaggaggaggaccacgtgaagaagctgcagcagaaggtggccaccctggagaagagaaacagacagctgagagagagagtgaagaaggtgaagagaagcctgagacaggccagaaagaagggcagacacctggagctggccaaccagaagctgagcgagaagctggccgccggcgccctgccccacatcaacgccagaggccccgtgagacccccctacctgagaggctag

SEQ ID NO: 221905 - DNA, 813 bp, Artificial Sequence
  derived and/or modified sequence
atgctgaggcaattgctgctcgcagctctctgtttagccggccccccagcacctgctcgtgcttgtcagctgcccagtgagtggcgaccccttagcgaaggctgccgcgccgagctcgctgagactatcgtatacgcacgcgtgctcgcacttcacccagaggctccgggtctctacaaccacctaccctggcagtatcacgctggccagggcgggttattctactccgccgaggtcgagatgttatgcgatcaagcgtggggatctatgctggaagttcccgctggttcacgtcttaatctgacgggtctgggatacttctcatgccattcacatacagtggtgcaggattactcgtatttcttcttcctcaggatggatgagaactataacctcttgcctcatggcgtgaactttcaggacgccatcttcccggatacacaggagaatcgccgcatgttctcctccctgtttcagttttccaattgcagtcagggccagcaacttgcgaccttcagcagcgactgggagatccaggaggattcccgccttatgtgttctagcgtccagaaggctctgtttgaagaagaggatcacgtgaaaaagctccagcaaaaagtcgccaccctggagaagcgaaatcgtcagttacgcgaacgggtcaagaaggtcaagagaagccttagacaggcccgtaagaaaggacggcacctggagttagcaaaccagaagctgtctgagaagcttgcggcaggagcgctgccccacatcaacgccagagggccggtgcgaccaccgtacttgcgcggctag

SEQ ID NO: 221906 - DNA, 813 bp, Artificial Sequence
  derived and/or modified sequence
atgctgcggcagctgctgctggccgccctgtgcctggccggccccccagccccagcccgggcctgccagctgcccagcgagtggaggcccctgtctgagggctgcagagctgagctggccgagaccatcgtgtatgcccgggtgctggccctgcaccctgaggcccctggcctgtacaaccacctgccctggcagtaccacgccggccagggcggcctcttctacagcgctgaggtggagatgctgtgtgaccaggcctggggctccatgctggaggtgcctgctggcagccggctgaacctgaccggcctgggctacttcagctgccacagccacacagtggtgcaggactacagctacttcttcttcctgaggatggatgagaactacaacctgctgccccatggagtgaacttccaggatgccatcttcccagacacccaggagaacagaaggatgttcagcagcctcttccagttcagcaactgcagccagggccagcagctggccaccttcagcagtgactgggagatccaggaggacagccggctgatgtgcagctctgtgcagaaggccctgtttgaggaggaggaccacgtgaagaagctgcagcagaaggtggccaccctggagaagaggaaccggcagctgcgggagcgggtgaagaaggtgaagaggagcctgcggcaggccaggaagaagggccgccacctggagctggccaaccagaagctgtctgagaagctggccgccggggccctgccccacatcaatgcccggggccctgtgcggcccccctacctgcggggctag

SEQ ID NO: 221907 - DNA, 2729 bp, Artificial Sequence
  derived and/or modified sequence
cggagacagcggtgcgctcagctcccgggagcggcccgagcagccgagcgcccagggctgcccttcccgggccggcgggctccccgggctccccgccgccgccccgtgcgccccgggagggcccggcatgctgcgccagctgctgctcgccgcgctctgcctggcgggtcccccagcgcccgcgcgcgcctgccagctgccctccgagtggaggcccctgagcgagggctgccgcgccgagctggccgagaccatcgtgtacgccagggtgctggcgctgcaccccgaggcgcccggcctctacaaccacctgccctggcagtaccacgccggccaggggggcctcttctactcggccgaggtcgagatgctgtgcgaccaggcgtggggcagcatgctggaggtgcccgccggctccaggctcaacctcaccggcctgggctacttctcgtgccactcccacaccgtggtccaggactactcctatttcttcttcctcaggatggatgaaaattataacctcttgcctcacggagtcaatttccaagatgccatcttcccagacactcaagagaacagaaggatgttttctagccttttccagttttcaaactgttcgcaagggcagcagctggcgactttctccagtgactgggaaatccaggaagacagtaggctcatgtgctcctcggtgcagaaggccttgtttgaggaggaggaccacgtcaagaaactgcagcagaaagtggccaccctggagaagcgcaaccggcagctccgggagcgagtgaagaaggtcaagaggtccttgcggcaggcgcgtaagaagggccgccacctggagctggcgaaccagaaactcagtgagaagctggcggcgggcgcgctgccgcacatcaatgcccgggggcccgtgcgccccccctacctgcgggggtaacgggcctgggggctgccaggtgtgcagggccaatcctgacggtaattgagaatgagtgaggtttcgtacatgcagctatttcaagggttgtaagagtttttgtttttaatcacgcatttggtagagtctaaatggataaaatgcaaggcttgctttccccttgggtgctggcctcaatgtcagaccccacgcgctgccccttcctggcctgaccccagacgcagtgcctggcagtccagaggcagtgggatccctgagtgctgaatgctcgcctgcagagcagcccagaaagagccctgactggggagagaacattttagaatctctagtgtaaaagacatcaacgtgcttagcctttatttcagaaaaaaatcagggtggttcccagctccccagtccaggacaaccattagtcctgatgagtgagctgacgctggtgctggaacctgctggcacctcactggccacatctttggaaggggatggtggccttgcatccaagatgcctgaaaatcagcacgtgcagggcctccctatccagccagcattttccttccagctgaggcaggtgaagacttcataagctcatcacaggggagggaattaggagcagggcagcaggtaattaaacaagataaattatacctgatttccaacaccagctacaaagagttgaagatgatacctatgggtcgcgttaacacagggggcaactgccttgatcggcctgccatgggtcatcagactgcttcctaaattgagagaaactgagcaatctctcagccactgctatagtctaacttcttgtttgctgagtaattgtttctaatgtctctgaactcaaagtgaggtgctccaagacgctgtgaacttctgcaaagacacctccttacctactgggatcacgtgacctgacctcactcccagccaggctcccaaagggctcattccagccattccaatctcttcttctttatgcaaacacttttcccccacaacaagccttgtttgttccgataggaatacgtgtacgtcagtgcacttgtccttacgtcagttccttacaccaccaaagcacttcacctttctggaaataaaacttttaagacactactataagtaaaaatgagagtattcactagacttattgctcaggcacatttgagtgggtcccagctgtgtgattaagaagtcaactgggtggccttttctgggttatcttctgatcatggcctttcaacccaacaagggcccttccctgctcttccaccagtaaaggctcctggcctctcatcaggatctgccccccagagaccccccccagacactgcagggcctggtgatgctgtcctctgtaccggaaatggcaggcactgtcagatttccactcttctgcctttaggaaggctgggtgcttcttgctctgacagccagtctggggagatgactcttacgttgcttgagtcttggtggcaggctgctgtccacgggggagaagtctctgctctggactggacagaagagagacttttaccctggggcactcacacggccaagcttctgccaccacttcattagctgtattctccatagtatggtgaaatagcaggtgcgtcttctagtttattcctcctggggacatttcctcaaagcagttttgcgcccccgcaagggaatggtcagcctaagggtaatgtacagcccgtgcttggagaaccatggaagctacacccctacaggtgcatactgttctgcttttccaataaatacgagcggcgatttcaaccac

SEQ ID NO: 221908 - DNA, 813 bp, Artificial Sequence
  derived and/or modified sequence
atgctgcggcagctgctgctggccgccctgtgcctggccggccccccggcacccgcgagagcatgtcagttgccgagcgagtggcgtcccctttctgagggctgccgtgctgagttggcggagaccatagtctacgctagagttctggcgctgcaccctgaagccccagggctgtataaccacctgccttggcagtatcatgctgggcaaggaggcttattctactctgccgaagtcgagatgttgtgcgaccaggcatggggatccatgctggaggtgcccgccggaagtaggctgaacctcactggcctggggtattttagctgtcatagccacaccgttgtccaggactactcctacttctttttccttcgcatggacgaaaattacaacctgctacctcacggcgtcaacttccaggacgctatcttccccgacactcaagagaatcgcagaatgttttctagtttgtttcaattcagcaactgcagtcaggggcaacagcttgctacctttagctcagactgggagattcaagaggacagtcgtcttatgtgttcatcagtgcagaaggccttattcgaggaagaggaccatgtgaagaagttacagcagaaggtggctacccttgaaaaaagaaacaggcagctgagggagcgggtcaaaaaagtgaagaggagtcttcgccaagcccgcaaaaagggacgccacctggagctcgccaatcaaaaattatccgagaaacttgctgcgggggccctgccgcacatcaacgcccggggtcctgtgcggcctccctacctgcgaggttag

SEQ ID NO: 221909 - RNA, 813 nt, Artificial Sequence
  derived and/or modified sequence
auguuaaggcagcuccucuuagccgcucucugucucgccgggccuccugcuccugcucgagcuugucaacugcccucagaguggcgcccccugagcgagggaugccgcgcugagcuugccgaaaccauuguguacgcacguguucucgcgcugcaccccgaggcucccggccuguacaaccacuuacccuggcaguaccaugccggucaaggcggauuguuuuacucugccgaagucgaaaugcuaugugaucaggcuugggguucaaugcucgaaguuccugcuggguccagacugaaucuuacgggucugggguauuucucaugccauucccauacaguggugcaggauuauaguuacuuuuuuuuccucagaauggacgaaaauuacaaccuccucccucauggcgucaauuuccaagacgcgaucuuuccagacacccaggaaaaccggcguauguucagcucucuguuccaguucuccaauuguucgcaaggucaacaacucgccacauucucuucugacugggagauucaggaagauucuaggcuuauguguucaucuguccaaaaggcccucuucgaggaggaggaucacguuaagaagcuccagcaaaaaguggccacacuggaaaagcgcaaccggcagcugcgagaaagggugaagaaagucaaacgcagccugaggcaggcaagaaagaagggcaggcaucuagaacuugccaaucagaagcugucugagaaacucgccgcgggagcccugccccauauuaacgcccgggggccagugagaccaccauaccuccgaggguag

SEQ ID NO: 221910 - RNA, 813 nt, Artificial Sequence
  derived and/or modified sequence
auguuaaggcagcuccucuuagccgcucucugucucgccgggccuccugcuccugcucgagcuugucaacugcccucagaguggcgcccccugagcgagggaugccgcgcugagcuugccgaaaccauuguguacgcacguguucucgcgcugcaccccgaggcucccggccuguacaaccacuuacccuggcaguaccaugccggucaaggcggauuguuuuacucugccgaagucgaaaugcuaugugaucaggcuugggguucaaugcucgaaguuccugcuggguccagacugaaucugacaggacugggauacuuuucuugccacucccauacuguugugcaagacuauaguuauuuuuucuuuuugcguauggacgaaaacuacaaucuacugccucauggggugaauuuucaggaugccauuuuucccgauacucaggagaauagacggauguucaguagccuauuucaauucaguaauugcagccaaggacaacagcucgcaacauucagcucugauugggagauccaggaggacagccggcugaugugcucauccgugcaaaaggcacuguucgaggaggaggaucacguaaagaagcuacaacaaaaagucgcuacauuggagaagcggaauaggcaguuacgugaacgggucaaaaaagugaagcggagucuacgacaggcccggaaaaaggggagacaccuugaguuggcuaaucaaaaacugucagaaaagcuugccgcaggcgccuugccccacaucaaugcucggggucccguccguccaccauaucuuagagguuag

SEQ ID NO: 221911 - protein, 250 aa, Artificial Sequence
  derived and/or modified sequence
MNSMTSAVPVANSVLVVAPHNGYPVTPGIMSHVPLYPNSQPQVHLVPGNPPSLVSNVNGQPVQKALKEGKTLGAIQIIIGLAHIGLGSIMATVLVGEYLSISFYGGFPFWGGLWFIISGSLSVAAENQPYSYCLLSGSLGLNIVSAICSAVGVILFITDLSIPHPYAYPDYYPYAWGVNPGMAISGVLLVFCLLEFGIACASSHFGCQLVCCQSSNVSVIYPNIYAANPVITPEPVTSPPSYSSEIQANK

SEQ ID NO: 221912 - DNA, 753 bp, Artificial Sequence
  derived and/or modified sequence
atgaactctatgaccagtgccgtccctgtggcaaacagcgtgctagtggttgcaccacataatggctatcctgtaaccccagggatcatgtcacatgtgcccctgtaccccaactctcaaccgcaagtccacctggtgcccggcaatcctccctccttggtcagtaacgtgaacggccagccggtgcagaaggcactgaaggagggaaaaacactcggcgccatccagattataattgggctggctcatattggattgggatctatcatggctaccgtcctagtcggcgaatatctgagtatatcattctatggtggcttcccattttggggcggcctgtggtttataatttccggctccctctccgttgccgccgagaaccagccatacagttattgcctcctctcgggatctttaggcctgaacatcgtttccgcgatctgttctgcagtgggcgttattctgttcatcacggacctttctattccccacccctacgcctaccctgattattacccttacgcctggggagtcaatcctggaatggccataagcggagtgctcctagtgttttgtcttttagagttcggaatcgcttgtgcaagcagccatttcggatgccaactggtgtgttgccagtcctcaaatgtttctgttatatacccaaatatctacgccgccaatccagtgatcacacccgagcccgtgacttctcctccatcatactcctcagagatacaagccaataagtag

SEQ ID NO: 221913 - DNA, 753 bp, Artificial Sequence
  derived and/or modified sequence
atgaacagcatgaccagcgctgtgcctgtggccaacagcgtgctggtggtggccccccacaacggctaccctgtgaccccaggcatcatgagccacgtgcccctgtaccccaacagccagccccaggtgcacctggtgcccggcaacccccccagcctggtgtccaatgtgaatggccagcctgtgcagaaggccctgaaggagggcaagaccctgggcgccatccagatcatcatcggcctggcccacatcggcctgggcagcatcatggccaccgtgctggtgggggagtacctgagcatctccttctacggcggcttccccttctggggcggcctgtggttcatcatcagcggcagcctgtctgtggccgctgagaaccagccctacagctactgcctgctgagcggcagcctgggcctgaacatcgtgtctgccatctgcagcgctgtgggcgtcatcctcttcatcacagacctgagcatcccccacccctatgcctacccagactactacccctatgcctggggcgtgaaccctggcatggccatctctggagtgctgctggtgttctgcctgctggagtttggcatcgcctgtgccagcagccacttcggctgccagctggtgtgctgccagagcagcaatgtgtctgtcatctaccccaacatctatgctgccaaccctgtgatcaccccagagcctgtgaccagccccccatcctacagcagcgagatccaggccaacaagtag

SEQ ID NO: 221914 - DNA, 1353 bp, Artificial Sequence
  derived and/or modified sequence
aaacaggaaataaatacgaatgaaactgagctctaagcagcatgtaacctggcctgcatccaggaaatagaggacttcggatccttctaaccctaccacccaactggccccagtacattcattctctcaggaaaaaaaacaaggtccccacagcaaagaaaaggaataggatcaagagatacgtggctgctggcagagcaagcatgaattcgatgacttcagcagttccggtggccaattctgtgttggtggtggcaccccacaatggttatcctgtgaccccaggaattatgtctcacgtgcccctgtatccaaacagccagccgcaagtccacctagttcctgggaacccacctagtttggtgtcgaatgtgaatgggcagcctgtgcagaaagctctgaaagaaggcaaaaccttgggggccatccagatcatcattggcctggctcacatcggcctcggctccatcatggcgacggttctcgtaggggaatacctgtctatttcattctacggaggctttcccttctggggaggcttgtggtttatcatttcaggatctctctccgtggcagcagaaaatcagccatattcttattgcctgctgtctggcagtttgggcttgaacatcgtcagtgcaatctgctctgcagttggagtcatactcttcatcacagatctaagtattccccacccatatgcctaccccgactattatccttacgcctggggtgtgaaccctggaatggcgatttctggcgtgctgctggtcttctgcctcctggagtttggcatcgcatgcgcatcttcccactttggctgccagttggtctgctgtcaatcaagcaatgtgagtgtcatctatccaaacatctatgcagcaaacccagtgatcaccccagaaccggtgacctcaccaccaagttattccagtgagatccaagcaaataagtaaggctacagattctggaagcatctttcactgggaccaaaagaagtcctcctccctttctgggcttccataacccaggtcgttcctgttctgacagctgaggaaacgtctctcccactgtttgtactctcaccttcattcttcaattcagtctaggaaaccatgctgtttctctatcaagaagaagacagagattttaaacagatgttaaccaagagggactccctagggcacatgcatcagcacatatgtgggcatccagcctctggggccttggcacacacacattcgtgtgctctgctgcatgtgagcttgtgggttagaggaacaaatatctagacattcaatcttcactctttcaattgtgcattcatttaataaatagatactgagcattcaa

SEQ ID NO: 221915 - DNA, 753 bp, Artificial Sequence
  derived and/or modified sequence
atgaacagcatgaccagcgccgtgcccgtggccaacagcgtgctggttgttgcaccccataacggctatcccgtgacaccaggaataatgtcccatgtgcccctctatcccaatagtcaaccccaggttcacctggtgcccggtaacccacccagccttgtcagcaacgtgaatgggcagccagtccagaaagcacttaaggagggcaagacgctgggtgccattcagattatcataggtctggcgcacatcggcctcgggagcataatggccaccgttttggtgggggagtacctctccataagtttttacggcggcttccctttctggggtgggctgtggtttatcatctctggtagcctgtcggtcgcagctgagaaccaaccctacagctactgtcttttaagtggtagcctcggtttaaacatcgtgtcagcgatctgtagcgctgtcggagtgattttattcataacagacctgtcaattccccatccttacgcgtacccagactattacccatacgcatggggggtcaatcccggcatggctatctcaggagttttgctggtattctgtctactagaattcggcatagcatgtgccagtagccatttcggttgccaacttgtctgctgccagtcctctaatgtgagtgtcatctaccctaatatctacgccgcaaacccggtcatcaccccagagccggttacatccccaccctcctatagctctgagatccaagcaaataaatag

SEQ ID NO: 221916 - DNA, 753 bp, Artificial Sequence
  derived and/or modified sequence
atgaactctatgacttcagcagtacctgttgctaattccgtcctggtcgttgcccctcacaacgggtatcctgtcactcctggcatcatgtctcatgtaccactgtaccctaattcccaaccccaggtgcatcttgtccctggaaatccaccatccctggtgtcaaatgtgaacgggcagcccgtccagaaagccctgaaagagggcaaaacccttggcgcaattcagattattattggcttggctcacatcgggttgggctccattatggccacagtgctggtcggggagtacttgtccatatctttttacgggggattccctttctgggggggactgtggtttatcatctccggctctttgagtgtggccgctgagaatcagccatacagctactgcctgctgtccggaagcctcgggctcaatatcgtttccgccatctgctctgctgtgggagtgatcctgttcattacagatttgtcgatcccacacccctatgcttaccctgactactacccctacgcttggggtgtcaatcccggaatggcaatcagcggggtgcttctcgtcttctgcctcctggaattcggcatcgcgtgcgcaagctcgcactttggatgccagctcgtgtgctgtcagagcagcaacgtgtcagtgatttacccaaatatctacgctgccaatcccgtgattactccagaaccagtgacaagtccccctagctatagcagtgagatccaggctaacaaatag

SEQ ID NO: 221917 - DNA, 753 bp, Artificial Sequence
  derived and/or modified sequence
atgaacagcatgaccagcgccgtgcccgtggccaacagcgtgctggtggtggccccccacaacggctaccccgtgacccccggcatcatgagccacgtgcccctgtaccccaacagccagccccaggtgcacctggtgcccggcaacccccccagcctggtgagcaacgtgaacggccagcccgtgcagaaggccctgaaggagggcaagaccctgggcgccatccagatcatcatcggcctggcccacatcggcctgggcagcatcatggccaccgtgctggtgggcgagtacctgagcatcagcttctacggcggcttccccttctggggcggcctgtggttcatcatcagcggcagcctgagcgtggccgccgagaaccagccctacagctactgcctgctgagcggcagcctgggcctgaacatcgtgagcgccatctgcagcgccgtgggcgtgatcctgttcatcaccgacctgagcatcccccacccctacgcctaccccgactactacccctacgcctggggcgtgaaccccggcatggccatcagcggcgtgctgctggtgttctgcctgctggagttcggcatcgcctgcgccagcagccacttcggctgccagctggtgtgctgccagagcagcaacgtgagcgtgatctaccccaacatctacgccgccaaccccgtgatcacccccgagcccgtgaccagcccccccagctacagcagcgagatccaggccaacaagtag

SEQ ID NO: 221918 - protein, 332 aa, Artificial Sequence
  derived and/or modified sequence
MYRPRARAAPEGRVRGCAVPSTVLLLLAYLAYLALGTGVFWTLEGRAAQDSSRSFQRDKWELLQNFTCLDRPALDSLIRDVVQAYKNGASLLSNTTSMGRWELVGSFFFSVSTITTIGYGNLSPNTMAARLFCIFFALVGIPLNLVVLNRLGHLMQQGVNHWASRLGGTWQDPDKARWLAGSGALLSGLLLFLLLPPLLFSHMEGWSYTEGFYFAFITLSTVGFGDYVIGMNPSQRYPLWYKNMVSLWILFGMAWLALIIKLILSQLETPGRVCSCCHHSSKEDFKSQSWRQGPDREPESHSPQQGCYPEGPMGIIQHLEPSAHAAGCGKDS

SEQ ID NO: 221919 - DNA, 999 bp, Artificial Sequence
  derived and/or modified sequence
atgtaccgccctcgagccagagctgccccggagggcagggtgcgtggctgtgctgtgccgtccacggtcctgttgctgctcgcgtacctggcctatttagccctggggacaggagttttctggaccctcgaagggagagccgcccaggatagtagccgatcttttcagagagacaagtgggagttgctacaaaatttcacctgcctcgaccgtccagcgctggattccttgatacgggacgtggtccaagcttacaaaaacggagcttccctactatccaataccacaagcatggggcgctgggaactagtgggaagtttcttcttttccgtaagtacaatcactaccatcgggtatggcaaccttagccccaacaccatggccgctcgtctcttttgtatttttttcgctctggtgggaattccccttaatctggtggtgttaaacagactcggccacctcatgcagcagggggtgaaccattgggcttctaggctgggtggcacctggcaggatcccgataaggctcgatggttggccggctccggggccctgctcagcggattgttgttgttcctcctccttcctcccctactcttttcccacatggagggctggtcctatactgagggtttttattttgcattcatcaccctcagcacggtcggattcggcgattatgttatcgggatgaatccgagccaacgatacccgctgtggtataagaacatggtctccctgtggattctctttggcatggcctggttagcactaatcattaaattaatcctgagccaactggagacgcctggtcgcgtgtgttcttgctgtcatcacagctctaaggaggattttaaatcccagagctggagacagggccccgatcgagaaccagagtcccactcccctcaacaggggtgttaccctgaagggccaatggggatcattcagcaccttgagccctccgcccatgctgctggctgcgggaaagacagttag

SEQ ID NO: 221920 - DNA, 999 bp, Artificial Sequence
  derived and/or modified sequence
atgtaccggccccgggcccgggccgcccctgagggccgggtgcggggctgtgctgtgcccagcacagtgctgctgctgctggcctacctggcctacctggccctgggcactggagtcttctggaccctggagggccgggccgcccaggacagcagccgctccttccagagggacaagtgggagctgctgcagaacttcacctgcctggacaggcctgccctggacagcctcatcagagatgtggtgcaggcctacaagaatggagccagcctgctgagcaacaccacctccatgggccgctgggagctggtgggcagcttcttcttctctgtgtccaccatcaccaccatcggctacggcaacctgagccccaacaccatggccgcccggctcttctgcatcttctttgccctggtgggcatccccctgaacctggtggtgctgaaccggctgggccacctgatgcagcagggcgtgaaccactgggccagccggctgggcggcacctggcaggaccctgacaaggcccgctggctggccggcagcggggccctgctgagcggcctgctgctcttcctgctgctgccccccctgctcttcagccacatggagggctggagctacacagagggcttctactttgccttcatcaccctgagcacagtgggctttggagactatgtgattggcatgaaccccagccagcgctaccccctgtggtacaagaacatggtgtccctgtggatcctgtttggcatggcctggctggccctgatcatcaagctgatcctgagccagctggagaccccaggccgggtgtgcagctgctgccaccacagcagcaaagaagacttcaagagccagagctggaggcagggccctgaccgggagcctgagagccacagcccccagcagggctgctacccagagggccccatgggcatcatccagcacctggagcccagcgcccatgctgctggctgtgggaaggacagctag

SEQ ID NO: 221921 - DNA, 999 bp, Artificial Sequence
  derived and/or modified sequence
atgtaccggccccgggcccgggccgcccccgagggccgggtgcggggttgcgccgtgccttcaaccgtcctgctcctgctcgcgtacctcgcatacctagccctgggtaccggagtgttctggactctggagggtagagctgcacaggatagctctcgatcgttccagcgagacaaatgggaattgctacagaactttacatgccttgacagacctgctctcgactctttgatcagagacgtggttcaagcctataaaaatggagccagcctgctgtctaacactaccagcatgggaagatgggagttagtaggatccttcttctttagcgtaagcacaatcacaacaatcgggtacgggaaccttagccccaacaccatggcggcccgccttttctgcatcttcttcgccttagtggggatccccttgaatctggtggtgctgaaccgcctgggacacttaatgcaacagggagtgaatcactgggccagcaggctgggaggtacatggcaggaccccgacaaagccagatggctcgcagggagtggtgctttgttgtccggattgctgctttttctgctcctgcctcctctgctgttttcacatatggaggggtggtcttacacggaaggtttctacttcgcattcatcacgctgtcaacggtagggttcggggattatgtgattgggatgaaccccagccaacgctaccccctctggtacaaaaatatggtgagcttatggatcctctttgggatggcttggctggctctgattatcaagttaattctgagccagctggaaacccccggacgcgtatgcagttgctgtcaccattcttctaaggaggatttcaaaagccaatcatggcgacagggacccgatagagaacccgaaagccattctcctcagcagggatgctatccagagggcccgatggggatcatacagcatttagagcctagcgcccatgcagccggctgcggaaaggattcatag

SEQ ID NO: 221922 - DNA, 1658 bp, Artificial Sequence
  derived and/or modified sequence
acacatttgaggcggggccagatgcccacagttcagagcctctttttgtcccggggattggatcccagggctgggtggggccaggctgtcccattccccaacactcctcctccccggcgaaaccgggcaccagcaggcgtttgcgagaggagatacgagctggacgcctggcccttccctcccaccgggtcctagtccaccgctcccggcgccggctccccgcctctcccgctatgtaccgaccgcgagcccgggcggctcccgagggcagggtccggggctgcgcggtgcccagcaccgtgctcctgctgctcgcctacctggcttacctggcgctgggcaccggcgtgttctggacgctggagggccgcgcggcgcaggactccagccgcagcttccagcgcgacaagtgggagctgttgcagaacttcacgtgtctggaccgcccggcgctggactcgctgatccgggatgtcgtccaagcatacaaaaacggagccagcctcctcagcaacaccaccagcatggggcgctgggagctcgtgggctccttcttcttttctgtgtccaccatcaccaccattggctatggcaacctgagccccaacacgatggctgcccgcctcttctgcatcttctttgcccttgtggggatcccactcaacctcgtggtgctcaaccgactggggcatctcatgcagcagggagtaaaccactgggccagcaggctggggggcacctggcaggatcctgacaaggcgcggtggctggcgggctctggcgccctcctctcgggcctcctgctcttcctgctgctgccaccgctgctcttctcccacatggagggctggagctacacagagggcttctacttcgccttcatcaccctcagcaccgtgggcttcggcgactacgtgattggaatgaacccctcccagaggtacccactgtggtacaagaacatggtgtccctgtggatcctctttgggatggcatggctggccttgatcatcaaactcatcctctcccagctggagacgccagggagggtatgttcctgctgccaccacagctctaaggaagacttcaagtcccaaagctggagacagggacctgaccgggagccagagtcccactccccacagcaaggatgctatccagagggacccatgggaatcatacagcatctggaaccttctgctcacgctgcaggctgtggcaaggacagctagttatactccattctttggtcgtcgtcctcggtagcaagacccctgattttaagctttgcacatgtccacccaaactaaagactacattttccatccaccctagaggctgggtgcagctatatgattaattctgcccaatagggtatacagagacatgtcctgggtgacatgggatgtgactttcgggtgtcggggcagcatgcccttctcccccacttccttactttagcgggctgcaatgccgccgatatgatggctgggagctctggcagccatacggcaccatgaagtagcggcaatgtttgagcggcacaataagataggaagagtctggatctctgatgatcacagagccatcctaacaaacggaatatcacccgacctcctttatgtgagagagaaataaacatcttatgtaaaatacca

SEQ ID NO: 221923 - DNA, 999 bp, Artificial Sequence
  derived and/or modified sequence
atgtaccggcctagggctagagcagctcccgagggccgagtgcggggttgtgccgtgccatcaacagtcctcttgctgctggcctatttggcgtacctggcccttggaaccggggttttttggacgttagaaggaagggcggctcaagacagctcacggtcttttcaacgggacaaatgggaactcctacagaattttacttgtctagatcggcctgccctggattccctcatccgcgatgttgtgcaagcttacaaaaacggagcctcactgttgtctaacaccacatctatggggaggtgggaactggtgggaagcttctttttttctgtgagtacaatcaccaccatcgggtatggtaatcttagccctaatactatggctgcacgcctgttttgcatattctttgccctggtggggattcctttaaatttggtggtgcttaatcgtctgggacatctaatgcagcagggcgtgaaccactgggcctcgaggctcgggggaacttggcaagacccagacaaagccaggtggctcgcagggagcggtgccctgttgagcggcctccttttgtttctgctgctgcccccactattgtttagccatatggagggttggtcctatactgaagggttttatttcgcctttatcactctgtctacggtaggcttcggggattacgttattggcatgaatccgagccagcgctaccctctctggtacaagaatatggtcagcctgtggatcctgttcggcatggcctggttggccttgatcatcaagttgattctgtcccagctggagacacccggtagagtgtgcagttgctgccatcatagctccaaggaggatttcaagtctcagagctggagacaggggcctgaccgagaaccagaatcccactcacctcagcagggctgttatcctgaggggccaatgggcataatccagcacctggagccatctgcccatgccgcaggttgcggtaaggattcttag

SEQ ID NO: 221924 - DNA, 999 bp, Artificial Sequence
  derived and/or modified sequence
atgtacagacccagagccagagccgcccccgagggcagagtgagaggctgcgccgtgcccagcaccgtgctgctgctgctggcctacctggcctacctggccctgggcaccggcgtgttctggaccctggagggcagagccgcccaggacagcagcagaagcttccagagagacaagtgggagctgctgcagaacttcacctgcctggacagacccgccctggacagcctgatcagagacgtggtgcaggcctacaagaacggcgccagcctgctgagcaacaccaccagcatgggcagatgggagctggtgggcagcttcttcttcagcgtgagcaccatcaccaccatcggctacggcaacctgagccccaacaccatggccgccagactgttctgcatcttcttcgccctggtgggcatccccctgaacctggtggtgctgaacagactgggccacctgatgcagcagggcgtgaaccactgggccagcagactgggcggcacctggcaggaccccgacaaggccagatggctggccggcagcggcgccctgctgagcggcctgctgctgttcctgctgctgccccccctgctgttcagccacatggagggctggagctacaccgagggcttctacttcgccttcatcaccctgagcaccgtgggcttcggcgactacgtgatcggcatgaaccccagccagagataccccctgtggtacaagaacatggtgagcctgtggatcctgttcggcatggcctggctggccctgatcatcaagctgatcctgagccagctggagacccccggcagagtgtgcagctgctgccaccacagcagcaaggaggacttcaagagccagagctggagacagggccccgacagagagcccgagagccacagcccccagcagggctgctaccccgagggccccatgggcatcatccagcacctggagcccagcgcccacgccgccggctgcggcaaggacagctag

SEQ ID NO: 221925 - protein, 500 aa, Artificial Sequence
  derived and/or modified sequence
MKCTAREWLRVTTVLFMARAIPAMVVPNATLLEKLLEKYMDEDGEWWIAKQRGKRAITDNDMQSILDLHNKLRSQVYPTASNMEYMTWDVELERSAESWAESCLWEHGPASLLPSIGQNLGAHWGRYRPPTFHVQSWYDEVKDFSYPYEHECNPYCPFRCSGPVCTHYTQVVWATSNRIGCAINLCHNMNIWGQIWPKAVYLVCNYSPKGNWWGHAPYKHGRPCSACPPSFGGGCRENLCYKEGSDRYYPPREEETNEIERQQSQVHDTHVRTRSDDSSRNEVISAQQMSQIVSCEVRLRDQCKGTTCNRYECPAGCLDSKAKVIGSVHYEMQSSICRAAIHYGIIDNDGGWVDITRQGRKHYFIKSNRNGIQTIGKYQSANSFTVSKVTVQAVTCETTVEQLCPFHKPASHCPRVYCPRNCMQANPHYARVIGTRVYSDLSSICRAAVHAGVVRNHGGYVDVMPVDKRKTYIASFQNGIFSESLQNPPGGKAFRVFAVV

SEQ ID NO: 221926 - protein, 105 aa, Artificial Sequence
  derived and/or modified sequence
MKCTAREWLRVTTVLFMARAIPAMVVPNATLLEKLLEKYMDEDGEWWIAKQRGKRAITDNDMQSILDLHNKLRSQVYPTASNMEYMTWDVELERSAESWAESCLW

SEQ ID NO: 221927 - protein, 312 aa, Artificial Sequence
  derived and/or modified sequence
MNIWGQIWPKAVYLVCNYSPKGNWWGHAPYKHGRPCSACPPSFGGGCRENLCYKEGSDRYYPPREEETNEIERQQSQVHDTHVRTRSDDSSRNEVISAQQMSQIVSCEVRLRDQCKGTTCNRYECPAGCLDSKAKVIGSVHYEMQSSICRAAIHYGIIDNDGGWVDITRQGRKHYFIKSNRNGIQTIGKYQSANSFTVSKVTVQAVTCETTVEQLCPFHKPASHCPRVYCPRNCMQANPHYARVIGTRVYSDLSSICRAAVHAGVVRNHGGYVDVMPVDKRKTYIASFQNGIFSESLQNPPGGKAFRVFAVV

SEQ ID NO: 221928 - DNA, 1503 bp, Artificial Sequence
  derived and/or modified sequence
atgaagtgtaccgctagagaatggctgcgggttacaacggtgctgtttatggccagggcaatcccagccatggtcgtccccaacgcaacactcctggagaaattgctggaaaaatatatggatgaagatggtgagtggtggattgcgaaacagcggggtaagcgagctattactgataatgatatgcagtcaatcttagacctccataacaagctccgatctcaagtgtatcccaccgcctccaacatggagtacatgacttgggatgtggagctagaacgctcagccgaatcttgggccgagagctgtctgtgggagcatggccctgcctcccttctgccttcaattggacagaatctgggggctcattggggtagatacaggccaccaacgttccatgtgcagtcctggtacgacgaagtgaaagattttagctatccctatgaacacgagtgtaacccgtactgtccatttcggtgcagcggcccagtgtgtacccattacacccaagtggtgtgggctacaagcaaccggatcggatgtgccataaacctttgtcacaacatgaacatttggggccagatttggccaaaggctgtttacctcgtgtgcaactactcccccaagggtaactggtggggacacgccccatataaacacggaaggccatgctccgcttgcccacccagctttggtggagggtgtagagagaatctttgctacaaggagggctctgaccgttattaccctccaagggaagaggagaccaatgagattgagcgccaacagtcccaggtccatgatacccacgtgaggaccagaagcgatgacagcagcagaaacgaggttattagtgcacaacagatgagccaaatcgtttcttgcgaggtccgactgcgtgaccagtgcaaagggacaacatgtaataggtacgagtgccctgcaggttgtttggacagtaaggccaaagtgatagggagcgtgcactacgagatgcagagtagcatctgtagagcagcaatccactacggaataatagacaacgatggcggatgggtcgacatcacccgccaaggcaggaaacattactttatcaagtccaaccgcaatgggatccagaccatcggaaaataccaaagcgccaatagcttcaccgtgtcaaaggttacagtgcaggcggtgacgtgtgagactaccgtggaacaactttgcccgtttcacaaacccgcttcccattgcccacgagtgtattgcccaaggaactgtatgcaagctaatccccactacgctcgtgtgattggtaccagagtctattcagacctatcctccatctgccgggcagctgtacacgcaggggtggtccgcaaccacggaggatacgtggacgttatgccagtcgacaagaggaaaacatacatagcgtccttccagaatggcatcttctctgagtctctacagaaccctccaggaggaaaggcgtttcgagtgtttgccgttgtgtag

SEQ ID NO: 221929 - DNA, 318 bp, Artificial Sequence
  derived and/or modified sequence
atgaaatgcaccgccagagagtggctgagggtaaccaccgttttattcatggccagggccattcctgcaatggtcgttcctaacgcaacattgttggaaaagctcctggagaagtacatggacgaagatggggaatggtggattgctaagcaaagaggaaagcgcgctatcaccgataacgacatgcagagtattttagacttgcataacaaactcagaagtcaggtgtatcctaccgcctccaatatggaatatatgacttgggacgttgagctggagagaagcgccgaatcgtgggcagaatcctgtttgtggtag

SEQ ID NO: 221930 - DNA, 1503 bp, Artificial Sequence
  derived and/or modified sequence
atgaagtgcacggcgagagagtggttgcgagtgaccacagtgctgtttatggcccgcgctattcccgccatggtggtaccgaacgccaccctactcgaaaagttgttggagaaatacatggatgaagatggcgagtggtggatcgcaaaacagcgcggaaaaagggctattacggacaacgacatgcagtccatactagacctacacaataagctaaggtcgcaggtgtatcctaccgcatccaatatggagtatatgacatgggacgtggaactagaaaggagcgcagaaagttgggctgaatcatgcctctgggagcacgggcctgcctcactgttaccttctatcggccaaaaccttggggctcattggggccgttatagacctccaacctttcatgtccaaagctggtatgatgaggtgaaggatttctcttacccatacgaacatgaatgcaacccttactgccctttccgctgctccggtcctgtatgtacccattatacacaggtcgtctgggccacctctaacagaataggctgcgccatcaacctgtgtcacaacatgaatatttggggccagatctggccgaaggccgtgtacctcgtgtgcaattactcacccaagggcaattggtggggccacgctccttacaaacacggacgcccttgttccgcctgtccgccttcattcggcggtggatgtcgcgagaatctctgctacaaggagggctccgacagatattacccaccaagggaagaagaaacaaatgagatagaacggcagcagagccaggtgcacgacacccatgttaggacacgctcagacgacagttcaaggaatgaggtgatctcggcccagcagatgtctcagatcgtaagttgcgaggtgcgacttcgggatcagtgtaaaggcactacatgcaaccgttatgaatgcccagcaggctgcttagattcaaaggctaaggtgataggaagtgtgcactatgagatgcagtccagtatttgccgggcagccatccactatggcattattgacaacgacggtggctgggtagacattactcgtcaggggaggaaacattatttcatcaagtcaaacagaaatgggattcaaactataggtaagtatcagtcagccaatagctttaccgtgagtaaggtcacagtgcaggccgttacatgcgagacaacagttgaacaactttgcccattccataagccggcctcccactgccctagagtgtattgcccacgaaactgcatgcaagctaatcctcattatgctcgcgtaatagggactagggtctactcggacctcagtagtatctgtcgcgccgcggtccacgctggcgtcgttagaaaccacgggggatacgttgatgtcatgccagtggacaagcggaagacttacattgcctcatttcaaaacgggatcttcagcgagtcattgcaaaacccaccaggtggaaaggcttttcgggtgttcgccgtagtgtag

SEQ ID NO: 221931 - DNA, 318 bp, Artificial Sequence
  derived and/or modified sequence
atgaagtgcacagctagagagtggctgagggtgacaacagtgctgtttatggcaagagccattcccgcgatggtggtgcccaacgcaaccctgttagaaaaactgcttgaaaaatacatggatgaggacggagagtggtggatagcaaagcagagggggaaacgcgccattacagataatgacatgcagagcattctcgatctacacaacaagcttcgttcacaggtatacccaacagcatcgaatatggagtatatgacatgggacgtagaattggaacggtccgctgagtcctgggccgagtcgtgtctttggtag

SEQ ID NO: 221932 - DNA, 1503 bp, Artificial Sequence
  derived and/or modified sequence
atgaagtgtacagctagggaatggcttcgcgttacaacagtgctttttatggcccgcgccatacccgccatggttgtccccaacgccaccctcctggagaaactgctggagaaatatatggatgaagacggtgagtggtggattgctaagcagaggggaaaaagagctatcaccgacaatgacatgcagagtatcctagaccttcacaacaagttgagatcacaggtgtatccaacagccagcaatatggaatatatgacgtgggacgtcgagctagaacgcagcgctgaatcttgggcagaatcatgcctctgggagcacgggcctgcctcactgttaccttctatcggccaaaaccttggggctcattggggccgttatagacctccaacctttcatgtccaaagctggtatgatgaggtgaaggatttctcttacccatacgaacatgaatgcaacccttactgccctttccgctgctccggtcctgtatgtacccattatacacaggtcgtctgggccacctctaacagaataggctgcgccatcaacctgtgtcacaacatgaatatttggggccagatctggccgaaggccgtgtacttggtctgcaactatagtcctaaggggaattggtggggccatgccccttataagcacggaaggccttgttccgcatgccctccttcctttggaggcggttgtcgtgagaatttgtgttataaagagggcagtgacagatactacccaccccgtgaagaagaaaccaatgaaatcgagaggcagcagtcacaggtacacgacacacacgtgaggacccgtagtgacgatagctcccgaaatgaagtcatttcagcccagcaaatgtcccagattgtgtcttgcgaagtacggctgcgggaccagtgtaaaggtactacctgtaacagatacgagtgtccggccggatgcctggactcaaaagctaaggtaatcggctctgtccactacgagatgcagtcttctatatgtcgcgccgctatccactacgggatcattgacaacgatgggggttgggttgatattacacgccagggcaggaaacattattttattaaatcaaatcgcaacggcatacaaaccataggtaagtatcagagcgccaattcatttactgtttccaaggtcacagtgcaagccgtaacttgtgaaacaaccgtagagcagttatgcccttttcataaaccggctagtcattgcccgagagtatactgcccccggaattgtatgcaggcaaatccccactacgccagagtgatcggtaccagagtatattcagacctctcatccatttgcagggctgccgtccacgcgggtgtggtcagaaatcacggtgggtatgtggatgtaatgcccgtagataagcgcaagacttacatcgcctctttccagaacggtattttttccgaatccctgcagaatccaccaggcggcaaggcattcagagtgtttgccgtggtatag

SEQ ID NO: 221933 - DNA, 318 bp, Artificial Sequence
  derived and/or modified sequence
atgaagtgtacagcacgagaatggctgcgcgtaacaacggtgctgtttatggcccgagctatacccgccatggtagttcccaacgcgactcttttagaaaaactactggagaagtacatggacgaggatggagagtggtggatcgccaagcagagaggcaaaagagcaataaccgataacgacatgcagagtattttagatctccataataaactgcggagtcaagtataccctaccgccagtaacatggaatatatgacttgggacgtggaactcgaaagatcagctgagtcatgggccgagtcgtgtctttggtag

SEQ ID NO: 221934 - DNA, 553 bp, Artificial Sequence
  derived and/or modified sequence
agaaacgctggggcgcccaccctggcagactaacgaagcagctcccttcccaccccaactgcaggtctaattttggacgctttgcctgccatttcttccaggttgagggagccgcagaggcggaggccggccgtccggtttggctcacctctcccaggaaacttcacactggagagccaaaaggagtggaagagcctgtcttggagattttcctggggaaatcctgaggtcattcattatgaagtgtaccgcgcgggagtggctcagagtaaccacagtgctgttcatggctagagcaattccagccatggtggttcccaatgccactttattggagaaacttttggaaaaatacatggatgaggatggtgagtggtggatagccaaacaacgagggaaaagggccatcacagacaatgacatgcagagtattttggaccttcataataaattacgaagtcaggtgtatccaacagcctctaatatggagtatatgacatgggatgtagagctggaaagatctgcagaatcctgggctgaaagttgcttgtgg

SEQ ID NO: 221935 - DNA, 2100 bp, Artificial Sequence
  derived and/or modified sequence
agaacgctggacaatccagtaaaggtgctgctggtaataaaacatgaaactatatcttatgcttggtcaagacgtgtcaaatctgtatctgaaatagtgaatgaatgagatcagatgttgtccagagaaggaaaatcaaatgataaaagtgttgagagaggggcagctcttgaaggaagatggaataagaacatggaaactcctgtgtggaaagaaaaggccaagaggtctgctaaatcaagagtactgtgaataaacatgggatgtagagctggaaagatctgcagaatcctgggctgaaagttgcttgtgggaacatggacctgcaagcttgcttccatcaattggacagaatttgggagcacactggggaagatataggcccccgacgtttcatgtacaatcgtggtatgatgaagtgaaagactttagctacccatatgaacatgaatgcaacccatattgtccattcaggtgttctggccctgtatgtacacattatacacaggtcgtgtgggcaactagtaacagaatcggttgtgccattaatttgtgtcataacatgaacatctgggggcagatatggcccaaagctgtctacctggtgtgcaattactccccaaagggaaactggtggggccatgccccttacaaacatgggcggccctgttctgcttgcccacctagttttggagggggctgtagagaaaatctgtgctacaaagaagggtcagacaggtattatccccctcgagaagaggaaacaaatgaaatagaacgacagcagtcacaagtccatgacacccatgtccggacaagatcagatgatagtagcagaaatgaagtcataagcgcacagcaaatgtcccaaattgtttcttgtgaagtaagattaagagatcagtgcaaaggaacaacctgcaataggtacgaatgtcctgctggctgtttggatagtaaagctaaagttattggcagtgtacattatgaaatgcaatccagcatctgtagagctgcaattcattatggtataatagacaatgatggtggctgggtagatatcactagacaaggaagaaagcattatttcatcaagtccaatagaaatggtattcaaacaattggcaaatatcagtctgctaattccttcacagtctctaaagtaacagttcaggctgtgacttgtgaaacaactgtggaacagctctgtccatttcataagcctgcttcacattgcccaagagtatactgtcctcgtaactgtatgcaagcaaatccacattatgctcgtgtaattggaactcgagtttattctgatctgtccagtatctgcagagcagcagtacatgctggagtggttcgaaatcacggtggttatgttgatgtaatgcctgtggacaaaagaaagacctacattgcttcttttcagaatggaatcttctcagaaagtttacagaatcctccaggaggaaaggcattcagagtgtttgctgttgtgtgaaactgaatacttggaagaggaccataaagactattccaaatgcaatatttctgaattttgtataaaactgtaacattactgtacagagtacatcaactattttcagcccaaaaaggtgccaaatgcatataaatcttgataaacaaagtctataaaataaaacatgggacattagctttgggaaaagtaatgaaaatataatggttttagaaatcctgtgttaaatattgctatattttcttagcagttatttctacagttaattacatagtcatgattgttctacgtttcatatattatatggtgctttgtatatgccactaataaaatgaatctaaacattgaatgtgaatggccctcagaaaatcatctagtgcatttaaaaataatcgactctaaaactgaaagaaaccttatcacattttccccagttcaatgctatgccattaccaactccaaataatctcaaataattttccacttaataactgtaaagtttttttctgttaatttaggcatatagaatattaaattctgatattgcacttcttattttatataaaataatcctttaatatccaaatgaatctgttaaaatg

SEQ ID NO: 221936 - DNA, 4287 bp, Artificial Sequence
  derived and/or modified sequence
ggcgcctggttctgcgcgtactggctgtacggagcaggagcaagaggtcgccgccagcctccgccgccgagcctcgttcgtgtccccgcccctcgctcctgcagctactgctcagaaacgctggggcgcccaccctggcagactaacgaagcagctcccttcccaccccaactgcaggtctaattttggacgctttgcctgccatttcttccaggttgagggagccgcagaggcggaggctcgcgtattcctgcagtcagcacccacgtcgcccccggacgctcggtgctcaggcccttcgcgagcggggctctccgtctgcggtcccttgtgaaggctctgggcggctgcagaggccggccgtccggtttggctcacctctcccaggaaacttcacactggagagccaaaaggagtggaagagcctgtcttggagattttcctggggaaatcctgaggtcattcattatgaagtgtaccgcgcgggagtggctcagagtaaccacagtgctgttcatggctagagcaattccagccatggtggttcccaatgccactttattggagaaacttttggaaaaatacatggatgaggatggtgagtggtggatagccaaacaacgagggaaaagggccatcacagacaatgacatgcagagtattttggaccttcataataaattacgaagtcaggtgtatccaacagcctctaatatggagtatatgacatgggatgtagagctggaaagatctgcagaatcctgggctgaaagttgcttgtgggaacatggacctgcaagcttgcttccatcaattggacagaatttgggagcacactggggaagatataggcccccgacgtttcatgtacaatcgtggtatgatgaagtgaaagactttagctacccatatgaacatgaatgcaacccatattgtccattcaggtgttctggccctgtatgtacacattatacacaggtcgtgtgggcaactagtaacagaatcggttgtgccattaatttgtgtcataacatgaacatctgggggcagatatggcccaaagctgtctacctggtgtgcaattactccccaaagggaaactggtggggccatgccccttacaaacatgggcggccctgttctgcttgcccacctagttttggagggggctgtagagaaaatctgtgctacaaagaagggtcagacaggtattatccccctcgagaagaggaaacaaatgaaatagaacgacagcagtcacaagtccatgacacccatgtccggacaagatcagatgatagtagcagaaatgaagtcataagcgcacagcaaatgtcccaaattgtttcttgtgaagtaagattaagagatcagtgcaaaggaacaacctgcaataggtacgaatgtcctgctggctgtttggatagtaaagctaaagttattggcagtgtacattatgaaatgcaatccagcatctgtagagctgcaattcattatggtataatagacaatgatggtggctgggtagatatcactagacaaggaagaaagcattatttcatcaagtccaatagaaatggtattcaaacaattggcaaatatcagtctgctaattccttcacagtctctaaagtaacagttcaggctgtgacttgtgaaacaactgtggaacagctctgtccatttcataagcctgcttcacattgcccaagagtatactgtcctcgtaactgtatgcaagcaaatccacattatgctcgtgtaattggaactcgagtttattctgatctgtccagtatctgcagagcagcagtacatgctggagtggttcgaaatcacggtggttatgttgatgtaatgcctgtggacaaaagaaagacctacattgcttcttttcagaatggaatcttctcagaaagtttacagaatcctccaggaggaaaggcattcagagtgtttgctgttgtgtgaaactgaatacttggaagaggaccataaagactattccaaatgcaatatttctgaattttgtataaaactgtaacattactgtacagagtacatcaactattttcagcccaaaaaggtgccaaatgcatataaatcttgataaacaaagtctataaaataaaacatgggacattagctttgggaaaagtaatgaaaatataatggttttagaaatcctgtgttaaatattgctatattttcttagcagttatttctacagttaattacatagtcatgattgttctacgtttcatatattatatggtgctttgtatatgccactaataaaatgaatctaaacattgaatgtgaatggccctcagaaaatcatctagtgcatttaaaaataatcgactctaaaactgaaagaaaccttatcacattttccccagttcaatgctatgccattaccaactccaaataatctcaaataattttccacttaataactgtaaagtttttttctgttaatttaggcatatagaatattaaattctgatattgcacttcttattttatataaaataatcctttaatatccaaatgaatctgttaaaatgtttgattccttgggaatggccttaaaaataaatgtaataaagtcagagtggtggtatgaaaacattcctagtgatcatgtagtaaatgtagggttaagcatggacagccagagctttctatgtactgttaaaattgaggtcacatattttcttttgtatcctggcaaatactcctgcaggccaggaagtataatagcaaaaagttgaacaaagatgaactaatgtattacattaccattgccactgatttttttttaaatggtaaatgaccttgtatataaatattgccatatcatggtacctataatggtgatatatttgtttctatgaaaaatgtattgtgctttgatactaaaaatctgtaaaatgttagttttggtaattttttttctgctggtggatttacatattaaattttttctgctggtggataaacattaaaattaatcatgtttcaaagttttattttcagttccttttgcatgcctattttgatttagaaatcactttaagataaatgaacaaaattattgtaagtcttctaaacttggtttattgacgttagtataaataacatacaataccagatgtctacaaaatcgacctgattatttaggtatttgtatgtgaaagagaaacacatatttagaaacacagcaagggagattttgaataaagagagagatgaatttataaagtaggaaaaaaagaatctgaaagatacaaagtgattataaaagaattgacaggacaataaatacttcaaatacttttaggaagtaaatgagtaggagtttaggagggataaacgagataaattccatgcaatgatcaaggaaagcaagagagcagataatacaaaagaaaaagaagaaggttcacataaatagcttctggagtgcaaattataaagacatcaacatttttgatcatataataagtactggcttacagctaagtggttccaaatactggtaattaaaacaatgatgtatacgttaaagattgcaaaacttaaaagcagatttttatgggaacttttttcgaaaggatacatgaccaccttcttaaatagtatgactttacatagactctttttctggtccttactgctcctcccacaacagggaagcccgatcagttctgtcagtataaggttttcttctatttgcccttagtttagatctccatcatcaattccacttactattgtaataccttcagctggagcctgtgtctttctccattcctttttaatacattcgtatttcccagccccagaacccttgaaattaactcttccatgagttttcattgctgaagaaaaaccaaacattcttgtaaaaacatttaagaacttccatagtcttgttcatattgtttacctatcttctacacaaggcgtgtccttgggtaagttatttaacttcaatttaccttacctgtaaaatggaacaaataatatctccttaagattgctctacgaattaattgacacattatgtgtgatgtacttaaaggaataataaatgcataatatgaggtcagtggacgccattttctgttataatcatttttgttatctaatttggggaaactattcatctgtcatatactattgatcctttggcacttaaataaatgtgaaatcctccaggaattttcctgtgattctccttgtaagaattaaatgctctctaatatgatatccctttaa

SEQ ID NO: 221937 - DNA, 1503 bp, Artificial Sequence
  derived and/or modified sequence
atgaagtgcaccgccagagagtggctgagagtgaccaccgtgctgttcatggccagagccatccccgccatggtggtgcccaacgccaccctgctggagaagctgctggagaagtacatggacgaggacggcgagtggtggatcgccaagcagagaggcaagagagccatcaccgacaacgacatgcagagcatcctggacctgcacaacaagctgagaagccaggtgtaccccaccgccagcaacatggagtacatgacctgggacgtggagctggagagaagcgccgagagctgggccgagagctgcctgtgggagcacggccccgccagcctgctgcccagcatcggccagaacctgggcgcccactggggcagatacagaccccccaccttccacgtgcagagctggtacgacgaggtgaaggacttcagctacccctacgagcacgagtgcaacccctactgccccttcagatgcagcggccccgtgtgcacccactacacccaggtggtgtgggccaccagcaacagaatcggctgcgccatcaacctgtgccacaacatgaacatctggggccagatctggcccaaggccgtgtacctggtgtgcaactacagccccaagggcaactggtggggccacgccccctacaagcacggcagaccctgcagcgcctgcccccccagcttcggcggcggctgcagagagaacctgtgctacaaggagggcagcgacagatactacccccccagagaggaggagaccaacgagatcgagagacagcagagccaggtgcacgacacccacgtgagaaccagaagcgacgacagcagcagaaacgaggtgatcagcgcccagcagatgagccagatcgtgagctgcgaggtgagactgagagaccagtgcaagggcaccacctgcaacagatacgagtgccccgccggctgcctggacagcaaggccaaggtgatcggcagcgtgcactacgagatgcagagcagcatctgcagagccgccatccactacggcatcatcgacaacgacggcggctgggtggacatcaccagacagggcagaaagcactacttcatcaagagcaacagaaacggcatccagaccatcggcaagtaccagagcgccaacagcttcaccgtgagcaaggtgaccgtgcaggccgtgacctgcgagaccaccgtggagcagctgtgccccttccacaagcccgccagccactgccccagagtgtactgccccagaaactgcatgcaggccaacccccactacgccagagtgatcggcaccagagtgtacagcgacctgagcagcatctgcagagccgccgtgcacgccggcgtggtgagaaaccacggcggctacgtggacgtgatgcccgtggacaagagaaagacctacatcgccagcttccagaacggcatcttcagcgagagcctgcagaacccccccggcggcaaggccttcagagtgttcgccgtggtgtag

SEQ ID NO: 221938 - DNA, 318 bp, Artificial Sequence
  derived and/or modified sequence
atgaagtgcaccgccagagagtggctgagagtgaccaccgtgctgttcatggccagagccatccccgccatggtggtgcccaacgccaccctgctggagaagctgctggagaagtacatggacgaggacggcgagtggtggatcgccaagcagagaggcaagagagccatcaccgacaacgacatgcagagcatcctggacctgcacaacaagctgagaagccaggtgtaccccaccgccagcaacatggagtacatgacctgggacgtggagctggagagaagcgccgagagctgggccgagagctgcctgtggtag

SEQ ID NO: 221939 - DNA, 1503 bp, Artificial Sequence
  derived and/or modified sequence
atgaaatgcacagcacgagagtggctccgtgtaaccacggtgttattcatggcccgtgcgattcctgcaatggtcgtgcctaatgccaccctcctagagaagcttctggagaagtacatggatgaagacggtgaatggtggattgccaagcagagggggaaacgcgccattacagacaatgatatgcagtccatcctcgacctgcacaataagctgcgatcacaggtgtaccccacagcctccaatatggagtacatgacctgggacgtggaattggagcggtccgctgaaagttgggctgagtcttgcctgtgggagcacggtcccgcatcattgttaccctctatcggccagaacctgggggcccactggggacggtacaggccgcctaccttccacgtgcagtcatggtatgatgaagtgaaggacttctcttacccgtacgagcacgagtgcaatccttactgccccttccgctgtagcgggcctgtctgcacacattacacgcaggttgtgtgggctacatccaacagaatcgggtgtgctatcaatctctgtcacaatatgaacatctgggggcaaatttggccaaaagctgtctatctggtatgcaactatagccccaaaggcaactggtgggggcacgcgccgtataaacacggtagaccttgcagtgcttgtccaccttctttcggcggcggttgccgcgagaatctttgctataaagaggggtcggaccgttactacccaccacgtgaagaagagactaatgaaatcgagcggcagcagtcacaggtgcatgatacccacgtcagaaccagatcagatgattcttcgcggaatgaagtgattagtgcacaacagatgtcccagatcgtgtcgtgcgaagttagactgagagatcagtgcaaggggacaacttgtaaccggtatgagtgtcccgcaggctgtctcgattcgaaagccaaggtcatcggatctgttcattatgagatgcagtcctccatttgcagggctgctatccattacggaataattgataatgacggcggatgggtcgacatcaccagacagggccggaagcattacttcatcaaaagtaatcggaacggaatccagacgatcgggaagtaccagagtgctaactcattcactgtaagtaaggttactgtacaggccgttacatgtgaaaccaccgtggaacagctgtgccccttccataagcctgcttctcactgtcctagggtgtattgtccaagaaactgtatgcaagcgaatcctcattatgctcgcgtaattggaacccgcgtgtatagcgacctgagcagtatctgccgggccgcggttcacgcaggggtggtgagaaaccacggggggtatgtcgacgttatgcccgttgacaaacggaagacatacatcgccagcttccagaacggcatttttagtgaatccctacagaaccctcccggcgggaaggcttttagggtttttgcagtagtgtag

SEQ ID NO: 221940 - DNA, 318 bp, Artificial Sequence
  derived and/or modified sequence
atgaagtgtaccgctcgtgaatggttgcgtgtgacgaccgtcctcttcatggctagagccatccctgctatggtggtccccaacgctacacttctggagaaactgttggagaagtatatggacgaggacggtgagtggtggatcgctaaacagcgtggtaagcgcgccattacagacaatgacatgcagagcattttagatcttcataataagctgcgttcccaggtgtatccaacagcttcgaatatggaatatatgacgtgggatgtcgaattggaacgttcagctgagtcctgggctgaatcatgtctgtggtag

SEQ ID NO: 221941 - DNA, 1503 bp, Artificial Sequence
  derived and/or modified sequence
atgaagtgcacagcccgggagtggctgcgggtgaccaccgtgctcttcatggcccgggccatcccagccatggtggtgcccaatgccaccctgctggagaagctgctggagaagtacatggatgaagatggagagtggtggatcgccaagcagaggggcaagagggccatcacagacaatgacatgcagagcatcctggacctgcacaacaagctgcggagccaggtgtaccccacagccagcaacatggagtacatgacctgggatgtggagctggagaggtctgctgagagctgggccgagagctgcctgtgggagcacggccctgccagcctgctgcccagcatcggccagaacctgggcgcccactggggccgctacagaccacccaccttccacgtgcagagctggtatgatgaggtgaaggacttctcctacccctatgaacatgagtgcaacccctactgccccttccgctgcagcggccctgtgtgcacccactacacccaggtggtgtgggccaccagcaacagaattggctgtgccatcaacctgtgccacaacatgaacatctggggccagatctggcccaaggctgtgtacctggtgtgcaactacagccccaagggcaactggtggggccacgccccctacaagcacggccggccctgcagcgcctgcccccccagctttggaggcggctgccgggagaacctgtgctacaaggagggcagtgaccgctactacccaccccgggaggaggagaccaatgaaattgagcggcagcagagccaggtgcatgacacccacgtgaggaccaggagtgatgacagcagcagaaatgaagtcatcagcgcccagcagatgagccagatcgtgtcctgtgaggtgcggctgcgggaccagtgcaagggcaccacctgcaacagatatgagtgcccagctggctgcctggacagcaaggccaaggtgattggctctgtgcactatgagatgcagagcagcatctgcagagctgccatccactacggcatcatcgacaatgatggcggctgggtggacatcacccggcagggcaggaagcactacttcatcaagagcaacagaaatggcatccagaccatcggcaagtaccagagcgccaacagcttcaccgtgtccaaggtgacagtgcaggccgtgacctgtgagaccaccgtggagcagctgtgccccttccacaagccagccagccactgcccccgggtgtactgccccaggaactgcatgcaggccaacccccactacgcccgggtgattggcaccagggtgtacagcgacctgagcagcatctgcagagctgctgtgcatgctggggtggtgagaaatcatggaggctacgtggatgtgatgcctgtggacaagaggaagacctacatcgccagcttccagaatggcatcttcagcgagagcctgcagaaccccccaggcggcaaggccttccgggtgtttgctgtggtgtag

SEQ ID NO: 221942 - DNA, 318 bp, Artificial Sequence
  derived and/or modified sequence
atgaagtgcacagcccgggagtggctgcgggtgaccaccgtgctcttcatggcccgggccatcccagccatggtggtgcccaatgccaccctgctggagaagctgctggagaagtacatggatgaagatggagagtggtggatcgccaagcagaggggcaagagggccatcacagacaatgacatgcagagcatcctggacctgcacaacaagctgcggagccaggtgtaccccacagccagcaacatggagtacatgacctgggatgtggagctggagaggtctgctgagagctgggccgagagctgcctgtggtag

SEQ ID NO: 221943 - DNA, 1503 bp, Artificial Sequence
  derived and/or modified sequence
atgaagtgcaccgcccgggagtggctgcgggtgaccaccgtgctgtttatggcgcgggcgatccccgccatggtggtgccaaacgctacgctgctcgagaagctgctggagaagtatatggacgaggacggcgagtggtggatcgctaaacagaggggcaaacgagccatcacagacaacgatatgcagagtattctggacttacataataaactgcggtcccaggtctatccaacagccagcaacatggaatacatgacttgggatgttgaactggaaagatctgccgagtcctgggcggaatcgtgcctctgggaacacggccctgcctccctgctgccctcaatcgggcagaacctaggcgcacattggggccggtaccggcctcctacttttcatgtccaaagctggtatgacgaagtcaaagatttctcttatccatatgaacacgagtgtaacccgtattgtcccttccggtgtagcggtccagtctgcacacactacactcaggtggtgtgggccacatcaaaccggattggctgtgccatcaatctgtgtcataacatgaatatttggggacagatttggcctaaagcagtgtacctggtatgtaactatagcccaaagggcaattggtggggccacgctccctataagcacggacgcccatgctccgcttgtccccctagtttcggcggggggtgcagggagaacctgtgttacaaggagggctccgaccgttactatccacctcgcgaggaagagaccaacgagatcgagagacaacaatctcaagtgcacgacactcacgttcgaactaggagcgatgattcgagtcgaaacgaggtgatcagcgcccagcagatgagccagattgtgtcatgtgaggtgagattgcgcgaccagtgcaagggaaccacatgcaatcgatacgagtgccctgctggctgtttggatagcaaggccaaggtcattggctctgtgcactatgaaatgcagtcttcgatttgtagagctgcaatccactacggaatcatcgacaatgatggcggctgggtagacatcacccggcaaggtcggaagcactacttcataaagtctaaccgcaatggaattcaaactattgggaaataccaatccgccaacagcttcaccgtctcaaaagtgactgtgcaggccgtgacctgtgagacaactgtagagcagttgtgtcccttccacaagcccgccagccactgcccaagagtgtactgcccacggaattgcatgcaggcaaatccacattatgccagagtgataggcaccagggtttactccgatctgtcttcaatttgtagggccgcggtccacgccggtgtggtccgcaaccacggtggctatgttgacgtgatgcccgtggataaaagaaagacttacattgcgtcttttcaaaatggtatcttctctgaatcattgcaaaatcctcctggggggaaggccttccgcgtgttcgctgtagtgtag

SEQ ID NO: 221944 - DNA, 318 bp, Artificial Sequence
  derived and/or modified sequence
atgaagtgcaccgcccgggagtggctgcgggtgaccaccgtgctgtttatggcgcgagcaatccctgcgatggtggtaccaaacgctacacttctggaaaagcttctggaaaagtatatggatgaagacggcgagtggtggatagcgaagcagagaggaaagagagctataaccgataacgacatgcaaagtatactcgatctccataacaagctccggagtcaggtttatcccacggcatcgaacatggagtacatgacctgggatgtggaactggaaagatcagctgaaagctgggcagaatcctgcttgtggtag

SEQ ID NO: 221945 - RNA, 1503 nt, Artificial Sequence
  derived and/or modified sequence
augaagugcacggcgagagagugguugcgagugaccacagugcuguuuauggcccgcgcuauucccgccauggugguaccgaacgccacccuacucgaaaaguuguuggagaaauacauggaugaagauggcgagugguggaucgcaaaacagcgcggaaaaagggcuauuacggacaacgacaugcaguccauacuagaccuacacaauaagcuaaggucgcagguguauccuaccgcauccaauauggaguauaugacaugggacguggaacuagaaaggagcgcagaaaguugggcugaaucaugccucugggagcacgggccugccucacuguuaccuucuaucggccaaaaccuuggggcucauuggggccguuauagaccuccaaccuuucauguccaaagcugguaugaugaggugaaggauuucucuuacccauacgaacaugaaugcaacccuuacugcccuuuccgcugcuccgguccuguauguacccauuauacacaggucgucugggccaccucuaacagaauaggcugcgccaucaaccugugucacaacaugaauauuuggggccagaucuggccgaaggccguguaccucgugugcaauuacucacccaagggcaauugguggggccacgcuccuuacaaacacggacgcccuuguuccgccuguccgccuucauucggcgguggaugucgcgagaaucucugcuacaaggagggcuccgacagauauuacccaccaagggaagaagaaacaaaugagauagaacggcagcagagccaggugcacgacacccauguuaggacacgcucagacgacaguucaaggaaugaggugaucucggcccagcagaugucucagaucguaaguugcgaggugcgacuucgggaucaguguaaaggcacuacaugcaaccguuaugaaugcccagcaggcugcuuagauucaaaggcuaaggugauaggaagugugcacuaugagaugcaguccaguauuugccgggcagccauccacuauggcauuauugacaacgacgguggcuggguagacauuacucgucaggggaggaaacauuauuucaucaagucaaacagaaaugggauucaaacuauagguaaguaucagucagccaauagcuuuaccgugaguaaggucacagugcaggccguuacaugcgagacaacaguugaacaacuuugcccauuccauaagccggccucccacugcccuagaguguauugcccacgaaacugcaugcaagcuaauccucauuaugcucgcguaauagggacuagggucuacucggaccucaguaguaucugucgcgccgcgguccacgcuggcgucguuagaaaccacgggggauacguugaugucaugccaguggacaagcggaagacuuacauugccucauuucaaaacgggaucuucagcgagucauugcaaaacccaccagguggaaaggcuuuucggguguucgccguaguguag

SEQ ID NO: 221946 - RNA, 318 nt, Artificial Sequence
  derived and/or modified sequence
augaagugcacagcuagagaguggcugagggugacaacagugcuguuuauggcaagagccauucccgcgaugguggugcccaacgcaacccuguuagaaaaacugcuugaaaaauacauggaugaggacggagagugguggauagcaaagcagagggggaaacgcgccauuacagauaaugacaugcagagcauucucgaucuacacaacaagcuucguucacagguauacccaacagcaucgaauauggaguauaugacaugggacguagaauuggaacgguccgcugaguccugggccgagucgugucuuugguag

SEQ ID NO: 221947 - RNA, 1503 nt, Artificial Sequence
  derived and/or modified sequence
augaaguguacagcuagggaauggcuucgcguuacaacagugcuuuuuauggcccgcgccauacccgccaugguuguccccaacgccacccuccuggagaaacugcuggagaaauauauggaugaagacggugagugguggauugcuaagcagaggggaaaaagagcuaucaccgacaaugacaugcagaguauccuagaccuucacaacaaguugagaucacagguguauccaacagccagcaauauggaauauaugacgugggacgucgagcuagaacgcagcgcugaaucuugggcagaaucaugccucugggagcacgggccugccucacuguuaccuucuaucggccaaaaccuuggggcucauuggggccguuauagaccuccaaccuuucauguccaaagcugguaugaugaggugaaggauuucucuuacccauacgaacaugaaugcaacccuuacugcccuuuccgcugcuccgguccuguauguacccauuauacacaggucgucugggccaccucuaacagaauaggcugcgccaucaaccugugucacaacaugaauauuuggggccagaucuggccgaaggccguguacuuggucugcaacuauaguccuaaggggaauugguggggccaugccccuuauaagcacggaaggccuuguuccgcaugcccuccuuccuuuggaggcgguugucgugagaauuuguguuauaaagagggcagugacagauacuacccaccccgugaagaagaaaccaaugaaaucgagaggcagcagucacagguacacgacacacacgugaggacccguagugacgauagcucccgaaaugaagucauuucagcccagcaaaugucccagauugugucuugcgaaguacggcugcgggaccaguguaaagguacuaccuguaacagauacgaguguccggccggaugccuggacucaaaagcuaagguaaucggcucuguccacuacgagaugcagucuucuauaugucgcgccgcuauccacuacgggaucauugacaacgauggggguuggguugauauuacacgccagggcaggaaacauuauuuuauuaaaucaaaucgcaacggcauacaaaccauagguaaguaucagagcgccaauucauuuacuguuuccaaggucacagugcaagccguaacuugugaaacaaccguagagcaguuaugcccuuuucauaaaccggcuagucauugcccgagaguauacugcccccggaauuguaugcaggcaaauccccacuacgccagagugaucgguaccagaguauauucagaccucucauccauuugcagggcugccguccacgcggguguggucagaaaucacgguggguauguggauguaaugcccguagauaagcgcaagacuuacaucgccucuuuccagaacgguauuuuuuccgaaucccugcagaauccaccaggcggcaaggcauucagaguguuugccgugguauag

SEQ ID NO: 221948 - RNA, 318 nt, Artificial Sequence
  derived and/or modified sequence
augaaguguacagcacgagaauggcugcgcguaacaacggugcuguuuauggcccgagcuauacccgccaugguaguucccaacgcgacucuuuuagaaaaacuacuggagaaguacauggacgaggauggagagugguggaucgccaagcagagaggcaaaagagcaauaaccgauaacgacaugcagaguauuuuagaucuccauaauaaacugcggagucaaguauacccuaccgccaguaacauggaauauaugacuugggacguggaacucgaaagaucagcugagucaugggccgagucgugucuuugguag

SEQ ID NO: 221949 - protein, 330 aa, Artificial Sequence
  derived and/or modified sequence
MAAVDSFYLLYREIARSCNCYMEALALVGAWYTARKSITVICDFYSLIRLHFIPRLGSRADLIKQYGRWAVVSGATDGIGKAYAEELASRGLNIILISRNEEKLQVVAKDIADTYKVETDIIVADFSSGREIYLPIREALKDKDVGILVNNVGVFYPYPQYFTQLSEDKLWDIINVNIAAASLMVHVVLPGMVERKKGAIVTISSGSCCKPTPQLAAFSASKAYLDHFSRALQYEYASKGIFVQSLIPFYVATSMTAPSNFLHRCSWLVPSPKVYAHHAVSTLGISKRTTGYWSHSIQFLFAQYMPEWLWVWGANILNRSLRKEALSCTA

SEQ ID NO: 221950 - DNA, 3661 bp, Artificial Sequence
  derived and/or modified sequence
gtacgcgggtcacgtgagggcgcggcgcggcagcagctccggcggccgagacgggggcggcggccgcgcgggtctggcgggaccggtttggaagactttgccggcctgcagattggccttaagagaaggacggagccacatactgctgacggcccagaactggcagagagaaggttgccatggctgctgttgacagtttctacctcttgtacagggaaatcgccaggtcttgcaattgctatatggaagctctagctttggttggagcctggtatacggccagaaaaagcatcactgtcatctgtgacttttacagcctgatcaggctgcattttatcccccgcctggggagcagagcagacttgatcaagcagtatggaagatgggccgttgtcagcggtgcaacagatgggattggaaaagcctacgctgaagagttagcaagccgaggtctcaatataatcctgattagtcggaacgaggagaagttgcaggttgttgctaaagacatagccgacacgtacaaagtggaaactgatattatagttgcggacttcagcagcggtcgtgagatctaccttccaattcgagaagccctgaaggacaaagacgttggcatcttggtaaataacgtgggtgtgttttatccctacccgcagtatttcactcagctgtccgaggacaagctctgggacatcataaatgtgaacattgccgccgctagtttgatggtccatgttgtgttaccgggaatggtggagagaaagaaaggtgccatcgtcacgatctcttctggctcctgctgcaaacccactcctcagctggctgcattttctgcttctaaggcttatttagaccacttcagcagagccttgcaatatgaatatgcctctaaaggaatctttgtacagagtctaatccctttctatgtagccaccagcatgacagcacccagcaactttctgcacaggtgctcgtggttggtgccttcgccaaaagtctatgcacatcatgctgtttctactcttgggatttccaaaaggaccacaggatattggtcccattctattcagtttctttttgcacagtatatgcctgaatggctctgggtgtggggagcaaatattctcaaccgttcactacgtaaggaagccttatcctgcacagcctgagtctggatggccacttgagaagttttgccaactcctgggaacctcgatattctgacatttggaaaaacacatttaatttatctcctgtgtttcattgctgattattcagcatactgttgattcgtcatttgcaaaacacacataataccgtcagagtgctgtgaaaaaccttaagggtgtgtggatggcacaggatcaataatgcctgaggctgattgacgacatctacatttcagtgctttttccctaagctgtttgaaagttacgcttttctgttgttctagagccacagcagtctaatattgaaatataatatgatttgtcaggtcttataatttcagatgttgttttttaagggaaattgaccatttcactagaggagttgtgctggtttttaaatgtgcatcaagaaagactactgaaaagtattattttgtaactaagattgctggtactattaggaaaaatctgtgtgtattgtatagctctagctgtttgactatctgtaatgaaaatgctgcacttcaactggtatttcattagagaaccgtgtgtgtgcgtgtgtgtggtgcctttgagcaactttatttatggttaccatatttttaaaaagattttttgtcagggtgacttaacatggactcttatagggtattaaaacaatctagattattccttttcatcctaaataagcctaccaaatttcatgctgttggtttgccatgaatgatattacttcctacattatatttgtgttttttcaaatctgctatggaatgaacttattcctagatttggatatgtaagagaaacctgcagtcatcttttgatttataaggcaattcttgtggataaatagtgatttctcagcctctgacccattttataactgaaatttagccctttagagcttgttatatctggttttcctacgtttttctatgtaatattattccattccagtagcattattgatagaaatagtaagtatttatggaatagtaaaatatggacaaattacgtgtgtgacatatctgtcaatataagttagaagcttattcttggtttgtgtaatgaatttatgtattgtagtgaatacctttactggtgtgaagataattatgcacaaaccctcacaatacgcgttaacattgaaacctgtgaaatgtccttagtttgggtcatataaagccaaccatttttgaggaccatgtacctagtgctttgaaaactctaagtcactatatgaatatgacaatatgtgcacatttaaaattcagagctcggcattgtgatactgatgcagaagctagtagattggttaaaagtctggacttctgtggcatttttttcgtgacgtgataatctatcataagcagacctaagcacagttttatgaacacaattttgcccatgacattgcctacaggatttccagatgtgacttgcactcagaagatcagtggtcaacttcagaagctcttccacgcttagatcatgtcttcagaacttagatgtgaaaatctacacactgggagatgctgtgagccccaaggttttgatggagtttgcttggaatcctcttgacttcatgccacattgacgtgaactttgatgtataataagcagcagcaacttcatgtgaaaatatggtcaggtagttatatgtaaggttacgtggtccagtaatgtcttagattgataaattaggtatggaatccatcagtgttacgtgatgagaataggtgaacacaccttgtcagtgatgatgtaaacttctctccttggcaggacatgggcaaacatgctgattggtgcaaatgtggtgccgagctgtccatagctgcagtgaaagatgaagagcaagaccttctctaggttttctagctttcattaaatgtatttttttccccagagctaatttgaaagttgattggaccactgtggatggggtgtcattaagaatgtgggaaataggggccgagtgcggtggctcacacctgtaatcccagcagtttggaaggccagggcaggtggatcgcttgatcccaggaggtcgagaccagcctggggaacacatcctgtctctacaaaaaatacaaaaattagccaggcagggtggtgcatgcctgtagtcccagctacttgggaggctgaggcaggagaattttttgagcccaggatgcagaggttgaagtgagccaagatcgtgccactgcactccagccttgagacagagcgagaccctgtctcaaaaaaaaaaaaagaacgtgggaaatatgaacctttgaaagttaatctgtgaattgaaagtttaacaataaaagtagttgtttgtttcctttggaagagttttgttccagatgtttgtaatttggttgtttgtaatttggaatgagagaatttttttttcttaggagtgattgcaagaaattaacatgaacaacagtggtcataactgattaaaagctgacacgtcagtaacaaaa

SEQ ID NO: 221951 - DNA, 993 bp, Artificial Sequence
  derived and/or modified sequence
atggccgccgtggacagcttctacctgctgtacagagagatcgccagaagctgcaactgctacatggaggccctggccctggtgggcgcctggtacaccgccagaaagagcatcaccgtgatctgcgacttctacagcctgatcagactgcacttcatccccagactgggcagcagagccgacctgatcaagcagtacggcagatgggccgtggtgagcggcgccaccgacggcatcggcaaggcctacgccgaggagctggccagcagaggcctgaacatcatcctgatcagcagaaacgaggagaagctgcaggtggtggccaaggacatcgccgacacctacaaggtggagaccgacatcatcgtggccgacttcagcagcggcagagagatctacctgcccatcagagaggccctgaaggacaaggacgtgggcatcctggtgaacaacgtgggcgtgttctacccctacccccagtacttcacccagctgagcgaggacaagctgtgggacatcatcaacgtgaacatcgccgccgccagcctgatggtgcacgtggtgctgcccggcatggtggagagaaagaagggcgccatcgtgaccatcagcagcggcagctgctgcaagcccaccccccagctggccgccttcagcgccagcaaggcctacctggaccacttcagcagagccctgcagtacgagtacgccagcaagggcatcttcgtgcagagcctgatccccttctacgtggccaccagcatgaccgcccccagcaacttcctgcacagatgcagctggctggtgcccagccccaaggtgtacgcccaccacgccgtgagcaccctgggcatcagcaagagaaccaccggctactggagccacagcatccagttcctgttcgcccagtacatgcccgagtggctgtgggtgtggggcgccaacatcctgaacagaagcctgagaaaggaggccctgagctgcaccgcctag

SEQ ID NO: 221952 - DNA, 993 bp, Artificial Sequence
  derived and/or modified sequence
atggccgctgtcgacagtttttatcttttgtatagagagatagctagatcctgcaattgctacatggaggccctcgccctggtgggcgcctggtacaccgctagaaagagcataactgtgatctgtgacttctattccttgattaggctgcactttattcccagactaggtagccgcgcagatctcattaaacagtacggacgctgggctgtggtttccggagcaactgacggaattggtaaggcttatgccgaggaactggcaagtaggggactgaatattattctgatctcacgcaatgaagaaaagctacaagttgtggcaaaagacatcgccgacacatacaaagtggagactgatattattgtggccgacttctcttctggtcgcgagatctacttgccaatcagggaggcattaaaagacaaggatgtaggaatcctggtcaacaatgtgggcgtgttttacccctatccccagtactttactcagctgtccgaggacaagttgtgggacatcatcaatgtgaacatagctgcggcatccctgatggttcatgtggtgctgcccggtatggtggagcgaaaaaagggcgccatagttaccatctcatctgggagttgctgtaagccaacaccccagcttgctgccttcagcgccagtaaagcgtatctcgatcactttagtcgagcgctgcagtacgagtatgcatcgaaggggatttttgtccagagcctgatcccattctatgtagccacttcaatgaccgcaccttcaaacttcttacacagatgtagttggttggttccgtctccaaaggtctatgcccatcacgctgtcagcacattgggcatttcaaagagaaccacagggtattggagtcactctatccagttcttgtttgcacagtatatgcctgaatggttatgggtgtggggagcgaatatcttgaaccgctctctgagaaaagaagcactctcctgtacagcctag

SEQ ID NO: 221953 - DNA, 993 bp, Artificial Sequence
  derived and/or modified sequence
atggctgctgtggacagcttctacctgctgtaccgggagatcgcccggagctgcaactgctacatggaggccctggccctggtgggcgcctggtacacagccaggaagagcatcaccgtcatctgtgacttctacagcctcatccggctgcacttcatcccccggctgggcagcagagctgacctgatcaagcagtatggccgctgggccgtggtgtctggggccacagatggcatcggcaaggcctatgcagaggagctggccagccggggcctgaacatcatcctgatcagcagaaatgaggagaagctgcaggtggtggccaaggacattgctgacacctacaaggtggagacagacatcatcgtggccgacttcagcagcggccgggagatctacctgcccatccgggaggccctgaaggacaaggatgtgggcatcctggtgaacaacgtgggcgtcttctacccctacccccagtacttcacccagctgtctgaggacaagctgtgggacatcatcaacgtgaacattgctgctgccagcctgatggtgcacgtggtgctgcccggcatggtggagaggaagaagggggccatcgtgaccatcagcagcggcagctgctgcaagcccaccccccagctggccgccttcagcgccagcaaggcctacctggaccacttcagccgggccctgcagtatgaatatgccagcaagggcatctttgtgcagagcctcatccccttctacgtggccacctccatgacagcccccagcaacttcctgcaccgctgctcctggctggtgcccagccccaaggtgtatgcccaccacgctgtgtccaccctgggcatcagcaagaggaccaccggctactggagccacagcatccagttcctgtttgcccagtacatgcctgagtggctgtgggtgtggggcgccaacatcctgaacagaagcctgaggaaggaggccctgagctgcacagcctag

SEQ ID NO: 221954 - DNA, 993 bp, Artificial Sequence
  derived and/or modified sequence
atggccgccgtggacagcttctacctgctgtaccgggagatcgcccggagctgcaattgttacatggaggccctggctctcgtaggggcctggtacaccgctcggaagtcaattacggtcatttgcgatttttactccctgatcagactccacttcataccgcgcttgggatcccgggccgacctgatcaagcagtatggacgctgggcagtggtgtccggagcaactgatgggattggcaaagcctatgccgaagagctcgcttcacgcggactgaacatcattctgatttcccggaatgaagagaagctgcaggtggtggctaaggacatcgcggacacttacaaggtcgagactgacattattgtggctgatttctcgtcgggccgcgagatctacctgccaatacgggaagcattgaaagataaggacgtcggtatccttgtgaacaacgtcggtgtcttctacccttacccccaatacttcacccaactgtctgaggataagctgtgggacatcatcaatgtcaatattgcagctgcatcactcatggtgcacgttgtgcttccaggcatggtggagaggaaaaagggtgccattgttactatctccagcggctcttgctgcaagcccacacctcagttggccgcttttagcgcttcaaaagcatatcttgatcacttttcaagggccctacagtatgagtatgcgtccaagggtatatttgtgcaaagcttaatacccttttacgtggccacttctatgaccgccccctccaacttcctgcacaggtgcagttggctagttcctagcccaaaggtgtacgcccatcatgccgtatcaaccctaggcatctctaaaaggacaacaggatactggtcacattctattcagttcctgtttgctcagtacatgccagagtggctgtgggtgtggggggcgaatatactcaatagaagcctgaggaaggaagctctcagttgtacagcttag

SEQ ID NO: 221955 - DNA, 993 bp, Artificial Sequence
  derived and/or modified sequence
atggccgcagtggactctttttatcttttataccgcgaaatagccagatcgtgcaattgctatatggaagcactggccctggtgggggcatggtatactgcccgtaagtccatcacagtgatctgtgacttttacagtctgattcggctgcattttatccctcgactgggcagcagggctgacctgatcaaacagtacgggaggtgggccgttgtttctggggcaactgacgggattggcaaggcatacgcagaggagctggctagccgcggactgaatatcattctgatttccaggaacgaagagaagctgcaggtggttgctaaagacatcgctgatacttataaggtggaaacagatatcattgttgctgatttcagctccgggagggagatctacctcccaatcagggaggccctcaaggataaggacgttggtatccttgtgaataatgtgggagtgttttatccctatccacagtacttcacccagctcagtgaggataagctgtgggacataatcaatgttaacattgccgctgcatctctgatggtgcatgtcgttttgccaggtatggttgagagaaaaaagggagctattgtgacgataagttcagggtcctgttgcaaaccgacacctcagctcgcagcattcagcgcaagtaaagcctacctagaccattttagccgcgctttgcagtacgaatacgctagcaagggcatctttgtacagtctcttatccctttttatgtggccacttccatgacagcgccaagtaatttcctccacagatgttcttggcttgtgccatcacctaaggtgtacgcccaccacgccgtgagcacattgggtattagcaaacggaccacagggtattggagccactctatacagtttctgttcgctcagtacatgccggagtggttatgggtctggggagccaatatcctgaaccgcagcctgaggaaagaggctctctcctgcacagcctag

SEQ ID NO: 221956 - protein, 1246 aa, Artificial Sequence
  derived and/or modified sequence
MVPAGDQDRAPHRGKPAQAGARTSRASRALRSWRRSQAARATVTHPRGGHDRGSHGGYREGHRGCRRDPQWASAGPPPLSFTEEVKFELRALKDWDFKMSVPDYMQCAEDHQTLLVVVQPVGIVSEENFFRIYKRICSVSQISVRDSQRVLYIRYRHHYPPENNEWGDFQTHRKVVGLITITDCFSAKDWPQTFEKFHVQKEIYGSTLYDSRLFVFGLQGEIVEQPRTDVAFYPNYEDCQTVEKRIEDFIESLFIVLESKRLDRATDKSGDKIPLLCVPFEKKDFVGLDTDSRHYKKRCQGRMRKHVGDLCLQAGMLQDSLVHYHMSVELLRSVNDFLWLGAALEGLCSASVIYHYPGGTGGKSGARRFQGSTLPAEAANRHRPGAQEVLIDPGALTTNGINPDTSTEIGRAKNCLSPEDIIDKYKEAISYYSKYKNAGVIELEACIKAVRVLAIQKRSMEASEFLQNAVYINLRQLSEEEKIQRYSILSELYELIGFHRKSAFFKRVAAMQCVAPSIAEPGWRACYKLLLETLPGYSLSLDPKDFSRGTHRGWAAVQMRLLHELVYASRRMGNPALSVRHLSFLLQTMLDFLSDQEKKDVAQSLENYTSKCPGTMEPIALPGGLTLPPVPFTKLPIVRHVKLLNLPASLRPHKMKSLLGQNVSTKSPFIYSPIIAHNRGEERNKKIDFQWVQGDVCEVQLMVYNPMPFELRVENMGLLTSGVEFESLPAALSLPAESGLYPVTLVGVPQTTGTITVNGYHTTVFGVFSDCLLDNLPGIKTSGSTVEVIPALPRLQISTSLPRSAHSLQPSSGDEISTNVSVQLYNGESQQLIIKLENIGMEPLEKLEVTSKVLTTKEKLYGDFLSWKLEETLAQFPLQPGKVATFTINIKVKLDFSCQENLLQDLSDDGISVSGFPLSSPFRQVVRPRVEGKPVNPPESNKAGDYSHVKTLEAVLNFKYSGGPGHTEGYYRNLSLGLHVEVEPSVFFTRVSTLPATSTRQCHLLLDVFNSTEHELTVSTRSSEALILHAGECQRMAIQVDKFNFESFPESPGEKGQFANPKQLEEERREARGLEIHSKLGICWRIPSLKRSGEASVEGLLNQLVLEHLQLAPLQWDVLVDGQPCDREAVAACQVGDPVRLEVRLTNRSPRSVGPFALTVVPFQDHQNGVHNYDLHDTVSFVGSSTFYLDAVQPSGQSACLGALLFLYTGDFFLHIRFHEDSTSKELPPSWFCLPSVHVCALEAQA

SEQ ID NO: 221957 - DNA, 3741 bp, Artificial Sequence
  derived and/or modified sequence
atggtgcccgccggcgaccaggacagagccccccacagaggcaagcccgcccaggccggcgccagaaccagcagagccagcagagccctgagaagctggagaagaagccaggccgccagagccaccgtgacccaccccagaggcggccacgacagaggcagccacggcggctacagagagggccacagaggctgcagaagagacccccagtgggccagcgccggccccccccccctgagcttcaccgaggaggtgaagttcgagctgagagccctgaaggactgggacttcaagatgagcgtgcccgactacatgcagtgcgccgaggaccaccagaccctgctggtggtggtgcagcccgtgggcatcgtgagcgaggagaacttcttcagaatctacaagagaatctgcagcgtgagccagatcagcgtgagagacagccagagagtgctgtacatcagatacagacaccactacccccccgagaacaacgagtggggcgacttccagacccacagaaaggtggtgggcctgatcaccatcaccgactgcttcagcgccaaggactggccccagaccttcgagaagttccacgtgcagaaggagatctacggcagcaccctgtacgacagcagactgttcgtgttcggcctgcagggcgagatcgtggagcagcccagaaccgacgtggccttctaccccaactacgaggactgccagaccgtggagaagagaatcgaggacttcatcgagagcctgttcatcgtgctggagagcaagagactggacagagccaccgacaagagcggcgacaagatccccctgctgtgcgtgcccttcgagaagaaggacttcgtgggcctggacaccgacagcagacactacaagaagagatgccagggcagaatgagaaagcacgtgggcgacctgtgcctgcaggccggcatgctgcaggacagcctggtgcactaccacatgagcgtggagctgctgagaagcgtgaacgacttcctgtggctgggcgccgccctggagggcctgtgcagcgccagcgtgatctaccactaccccggcggcaccggcggcaagagcggcgccagaagattccagggcagcaccctgcccgccgaggccgccaacagacacagacccggcgcccaggaggtgctgatcgaccccggcgccctgaccaccaacggcatcaaccccgacaccagcaccgagatcggcagagccaagaactgcctgagccccgaggacatcatcgacaagtacaaggaggccatcagctactacagcaagtacaagaacgccggcgtgatcgagctggaggcctgcatcaaggccgtgagagtgctggccatccagaagagaagcatggaggccagcgagttcctgcagaacgccgtgtacatcaacctgagacagctgagcgaggaggagaagatccagagatacagcatcctgagcgagctgtacgagctgatcggcttccacagaaagagcgccttcttcaagagagtggccgccatgcagtgcgtggcccccagcatcgccgagcccggctggagagcctgctacaagctgctgctggagaccctgcccggctacagcctgagcctggaccccaaggacttcagcagaggcacccacagaggctgggccgccgtgcagatgagactgctgcacgagctggtgtacgccagcagaagaatgggcaaccccgccctgagcgtgagacacctgagcttcctgctgcagaccatgctggacttcctgagcgaccaggagaagaaggacgtggcccagagcctggagaactacaccagcaagtgccccggcaccatggagcccatcgccctgcccggcggcctgaccctgccccccgtgcccttcaccaagctgcccatcgtgagacacgtgaagctgctgaacctgcccgccagcctgagaccccacaagatgaagagcctgctgggccagaacgtgagcaccaagagccccttcatctacagccccatcatcgcccacaacagaggcgaggagagaaacaagaagatcgacttccagtgggtgcagggcgacgtgtgcgaggtgcagctgatggtgtacaaccccatgcccttcgagctgagagtggagaacatgggcctgctgaccagcggcgtggagttcgagagcctgcccgccgccctgagcctgcccgccgagagcggcctgtaccccgtgaccctggtgggcgtgccccagaccaccggcaccatcaccgtgaacggctaccacaccaccgtgttcggcgtgttcagcgactgcctgctggacaacctgcccggcatcaagaccagcggcagcaccgtggaggtgatccccgccctgcccagactgcagatcagcaccagcctgcccagaagcgcccacagcctgcagcccagcagcggcgacgagatcagcaccaacgtgagcgtgcagctgtacaacggcgagagccagcagctgatcatcaagctggagaacatcggcatggagcccctggagaagctggaggtgaccagcaaggtgctgaccaccaaggagaagctgtacggcgacttcctgagctggaagctggaggagaccctggcccagttccccctgcagcccggcaaggtggccaccttcaccatcaacatcaaggtgaagctggacttcagctgccaggagaacctgctgcaggacctgagcgacgacggcatcagcgtgagcggcttccccctgagcagccccttcagacaggtggtgagacccagagtggagggcaagcccgtgaacccccccgagagcaacaaggccggcgactacagccacgtgaagaccctggaggccgtgctgaacttcaagtacagcggcggccccggccacaccgagggctactacagaaacctgagcctgggcctgcacgtggaggtggagcccagcgtgttcttcaccagagtgagcaccctgcccgccaccagcaccagacagtgccacctgctgctggacgtgttcaacagcaccgagcacgagctgaccgtgagcaccagaagcagcgaggccctgatcctgcacgccggcgagtgccagagaatggccatccaggtggacaagttcaacttcgagagcttccccgagagccccggcgagaagggccagttcgccaaccccaagcagctggaggaggagagaagagaggccagaggcctggagatccacagcaagctgggcatctgctggagaatccccagcctgaagagaagcggcgaggccagcgtggagggcctgctgaaccagctggtgctggagcacctgcagctggcccccctgcagtgggacgtgctggtggacggccagccctgcgacagagaggccgtggccgcctgccaggtgggcgaccccgtgagactggaggtgagactgaccaacagaagccccagaagcgtgggccccttcgccctgaccgtggtgcccttccaggaccaccagaacggcgtgcacaactacgacctgcacgacaccgtgagcttcgtgggcagcagcaccttctacctggacgccgtgcagcccagcggccagagcgcctgcctgggcgccctgctgttcctgtacaccggcgacttcttcctgcacatcagattccacgaggacagcaccagcaaggagctgccccccagctggttctgcctgcccagcgtgcacgtgtgcgccctggaggcccaggcctag

SEQ ID NO: 221958 - DNA, 3741 bp, Artificial Sequence
  derived and/or modified sequence
atggtgccagccggagatcaagaccgggctcctcacagagggaagcccgctcaggctggagctagaaccagccgcgcctcgagggcattgcggtcatggcgcagatctcaggctgcgagggccacagtgacccatcctagagggggccacgataggggctctcatggggggtacagggaggggcatcggggctgtagacgggaccctcagtgggcaagcgccggaccgcctccactttcttttaccgaagaggtcaagtttgagctgcgagcacttaaggactgggatttcaagatgtctgtccctgattacatgcagtgtgccgaagatcaccaaacgctgctagtcgtcgtgcaacccgttgggatcgtcagtgaagagaactttttccggatttacaagcggatctgcagcgtgtctcagatatcagtccgtgactcccagagggtgttgtatatcaggtacaggcatcactaccccccagagaataacgaatggggggattttcagacccacagaaaggtcgtaggcttgattacaatcaccgattgcttcagcgccaaggactggccacagacctttgagaaatttcacgttcagaaagagatctacgggagcaccctgtatgactcccggctgtttgtgtttggactccagggcgaaatcgtcgagcagccacgcaccgacgtcgcattttatcctaattacgaggactgtcaaaccgtggaaaagcgcattgaggacttcatagaatcgctatttatcgttcttgagagtaaacgtctagaccgagcgacagataagtccggtgataagatccctctgttgtgtgtcccatttgaaaaaaaagatttcgtgggcttggatacggactctagacactataaaaagagatgccagggacgcatgcggaagcacgttggtgatttgtgtctccaggccggaatgctccaagactctttggttcactatcacatgtctgtggaactcctacgatctgtgaacgattttctgtggctgggggcagcacttgaaggcctgtgctcagcctccgtgatatatcactatccaggcggtacaggcggtaagagtggggcacggaggttccaggggtcgactctgcctgccgaagctgccaaccggcatcggcccggagcccaggaggtcctgatagacccgggcgctctcacaacaaacggtatcaatcctgatacgagcaccgagataggccgggcaaagaattgtcttagcccagaagacataatcgataagtataaagaagctatctcatattactcaaaatataagaatgccggcgtcatagagctcgaagcatgcatcaaggctgtgcgcgtcctagctatccaaaagcgctcaatggaggccagtgagtttttgcaaaatgcagtgtatattaacctacgtcagttgtcggaggaggaaaagattcagcggtattcaatactgagcgagctttatgagcttataggattccacagaaagtctgcttttttcaagagggtggccgcgatgcagtgtgtggctccctcaattgcagagccgggatggcgtgcatgttacaagcttctgctggagactcttcccggatatagcttgtctctcgatcctaaggatttcagtaggggcacccatcgtgggtgggccgctgtgcaaatgcgattgctgcatgagttggtatacgcttccaggcgcatggggaacccggcactgtccgtgcggcacttgagctttttacttcagacaatgttggactttctttctgaccaggaaaagaaggacgtcgcacagagcctcgaaaattacacatcaaagtgcccagggactatggagcccattgccctccccggcggtctgaccctgccaccagttccatttacaaagttgccaattgttcgtcacgtcaaactgctgaatctgcccgccagtttgaggcctcacaagatgaaaagcctgctcgggcaaaacgtaagcacaaagtctccctttatctatagccccatcatagcacataaccgaggggaagagcgcaacaaaaaaattgactttcagtgggttcagggagacgtctgtgaggtgcagctgatggtgtacaatccaatgcccttcgaattacgagtagagaacatggggttacttacaagtggagtcgaattcgaaagcctcccagctgcgctttctctcccagctgagagtggcctgtatccggtcacattggtaggcgtgcctcagactacgggtactataacagtgaacggataccacaccaccgtctttggcgttttctctgattgtctcttagataatcttccaggcatcaagacctcggggagcactgtggaagtgattccagctctcccgcggctgcaaatctccacgtccctgccccggtctgcccattctctgcagcctagcagcggcgatgaaatcagcactaacgtctctgtccaactgtacaacggagagtcgcagcagctaataattaagctggagaacatcggtatggaacccctcgaaaagctggaagttacatctaaggtcctcacaacaaaggagaagctgtacggagactttctgagctggaagcttgaagaaacccttgcacagttcccactgcagcccgggaaagtggctaccttcactatcaacatcaaggttaagcttgatttctcttgtcaggagaatttactccaggacctgagcgacgatggcatctccgtatccggattccctttgagcagcccatttcggcaagtggtcagaccacgcgttgaagggaagcccgtcaaccctccggaaagcaacaaagcgggtgactattcccacgtgaagactctggaggcagttctgaattttaaatattctggcggtccagggcatacagaaggatattaccgtaatctgtcactcggtctgcatgtcgaagttgagccatccgtattctttactagagtgtcgacactgcctgccacttctactagacagtgccacttactgctcgacgtctttaactcaaccgagcatgagctgaccgtctctacgaggagttcagaggctctgatactccacgcgggcgaatgccagcggatggcgattcaggtagataaatttaatttcgagtcattccccgaatcccctggggaaaagggacagttcgcaaatcctaaacagctggaagaggaaaggagggaggccaggggattagaaatacacagcaaactcggcatctgttggaggattccgagtttgaagcggtccggagaggcctcagttgaaggactccttaaccagctggttttagagcacctgcagctagcaccccttcagtgggacgtcctagtggatggacagccgtgcgatagagaggctgtggccgcatgccaggtcggggaccccgtacgtttggaggtgcggctcactaatagaagccctcgttccgtggggccatttgcactgacagttgttcctttccaagatcatcagaacggtgtgcacaattacgatcttcacgacacagtgtcttttgttggctcctccaccttttaccttgatgcagtgcaaccaagcggccaaagcgcctgtctcggagctctcctgtttctgtacaccggcgatttttttctgcacatcaggttccacgaggatagtacttccaaagagttgccccccagttggttttgtctacccagtgtccatgtctgtgctcttgaggcccaggcttag

SEQ ID NO: 221959 - DNA, 3741 bp, Artificial Sequence
  derived and/or modified sequence
atggtgcctgctggggaccaggaccgggccccccaccggggcaagccagcccaggccggggcccggaccagccgggccagccgggccctgcgctcctggaggaggagccaggccgcccgggccaccgtgacccacccccggggcggccatgaccggggcagccatggaggctaccgggagggccaccggggctgccggcgggacccccagtgggccagcgctggccccccacccctgtccttcacagaggaggtgaagtttgagctgcgggccctgaaggactgggacttcaagatgtctgtgcctgactacatgcagtgtgccgaggaccaccagaccctgctggtggtggtgcagcctgtgggcatcgtgtctgaggagaacttcttccgcatctacaagaggatctgcagcgtgtcccagatctctgtgcgggacagccagagggtgctgtacatccgctaccgccaccactacccacctgagaacaatgagtggggagacttccagacccacaggaaggtggtgggcctcatcaccatcacagactgcttcagcgccaaggactggccccagacctttgagaagttccacgtgcagaaggagatctacggcagcaccctgtatgacagccggctgtttgtgtttggcctgcagggcgagatcgtggagcagcccaggacagatgtggccttctaccccaactatgaggactgccagacagtggagaagagaattgaggacttcatcgagagcctcttcatcgtgctggagagcaagaggctggaccgggccacagacaagagcggggacaagatccccctgctgtgtgtgccctttgagaagaaggactttgtgggcctggacacagacagccgccactacaagaagcgctgccagggccgcatgaggaagcacgtgggggacctgtgcctgcaggccggcatgctgcaggacagcctggtgcactaccacatgtctgtggagctgctgcggtctgtgaatgacttcctgtggctgggcgccgccctggagggcctgtgcagcgccagcgtcatctaccactacccaggcggcaccggcggcaagagcggggcccggcgcttccagggcagcaccctgcctgctgaggccgccaacagacacaggcctggggcccaggaggtgctgattgatcctggggccctgaccaccaacggcatcaacccagacaccagcacagaaattggccgggccaagaactgcctgagccctgaggacatcatcgacaagtacaaggaggccatctcctactacagcaagtacaagaatgctggggtgattgagctggaggcctgcatcaaggctgtgcgggtgctggccatccagaagaggtccatggaggccagcgagttcctgcagaatgctgtgtacatcaacctgcggcagctgtctgaggaggagaagatccagcgctacagcatcctgtctgagctgtatgagctgattggcttccacaggaagagcgccttcttcaagagggtggccgccatgcagtgtgtggcccccagcattgctgagcccggctggagggcctgctacaagctgctgctggagaccctgcccggctacagcctgagcctggaccccaaggacttcagccggggcacccaccggggctgggccgctgtgcagatgaggctgctgcacgagctggtgtatgccagcaggaggatgggcaacccagccctgtctgtgcgccacctgtccttcctgctgcagaccatgctggacttcctgagtgaccaggagaagaaggatgtggcccagagcctggagaactacaccagcaaatgtcctggcaccatggagcccatcgccctgcccggcggcctgaccctgccccctgtgcccttcaccaagctgcccatcgtgcgccacgtgaagctgctgaacctgcctgccagcctgcggccccacaagatgaagagcctgctgggccagaatgtgtccaccaagagccccttcatctacagccccatcatcgcccacaacagaggagaggagaggaacaagaagattgacttccagtgggtgcagggagatgtgtgtgaggtgcagctgatggtgtacaaccccatgccctttgagctgcgggtggagaacatgggcctgctgaccagcggcgtggagtttgagagcctgcctgctgccctgagcctgcctgctgagagcggcctgtaccctgtgaccctggtgggcgtgccccagaccaccggcaccatcaccgtgaatggctaccacaccaccgtgtttggagtcttcagtgactgcctgctggacaacctgcccggcatcaagaccagcggcagcacagtggaggtgatcccagccctgccccggctgcagatcagcaccagcctgcccaggtctgcccacagcctgcagcccagcagtggagatgagatcagcaccaacgtgtctgtgcagctgtacaacggggagagccagcagctgatcatcaagctggagaacatcggcatggagcccctggagaagctggaggtgaccagcaaggtgctgaccaccaaggagaagctgtatggagacttcctgtcctggaagctggaggagaccctggcccagttccccctgcagcccgggaaggtggccaccttcaccatcaacatcaaggtgaagctggacttcagctgccaggagaacctgctgcaggacctgagtgatgatggcatctctgtgtctggcttccccctgagcagccccttccggcaggtggtgcggccccgggtggagggcaagcctgtgaaccccccagagagcaacaaggccggggactacagccacgtgaagaccctggaggccgtgctgaacttcaagtacagcggcggccctggccacacagagggctactacagaaacctgagcctgggcctgcacgtggaggtggagcccagcgtcttcttcaccagggtgtccaccctgcctgccaccagcacccggcagtgccacctgctgctggatgtgttcaacagcacagagcacgagctgactgtgtccaccaggagcagcgaggccctgatcctgcacgccggggagtgccagaggatggccatccaggtggacaagttcaactttgagagcttccctgagagccctggagagaagggccagtttgccaaccccaagcagctggaggaggagcggcgggaggcccggggcctggagatccacagcaagctgggcatctgctggaggatccccagcctgaagaggtctggagaggcctctgtggagggcctgctgaaccagctggtgctggagcacctgcagctggcccccctgcagtgggatgtgctggtggatggccagccctgtgaccgggaggccgtggccgcctgccaggtgggggaccctgtgcggctggaggtgcggctgaccaacagaagccccaggtctgtgggcccctttgccctgactgtggtgcccttccaggaccaccagaatggagtgcacaactatgacctgcatgacacagtgtcctttgtgggcagcagcaccttctacctggatgctgtgcagcccagcggccagagcgcctgcctgggcgccctgctcttcctgtacacaggagacttcttcctgcacatccgcttccacgaggacagcaccagcaaggagctgccccccagctggttctgcctgcccagcgtgcacgtgtgtgccctggaggcccaggcctag

SEQ ID NO: 221960 - DNA, 3741 bp, Artificial Sequence
  derived and/or modified sequence
atggtgcccgccggcgaccaggaccgggccccccaccggggcaagccagcacaggctggggctagaaccagtcgggcctctcgcgctctgaggtcttggaggcggtctcaggctgctcgagccactgtgacccatccacgcggtggccacgatagaggcagccacggcggataccgggagggccacagaggttgcagacgtgacccgcagtgggcttccgccggcccgccacctctttcatttaccgaagaagttaagttcgaactgcgggcattgaaggattgggattttaaaatgtccgtacccgactacatgcagtgcgccgaggaccaccagaccctgctggtggtggtccaacccgtcgggattgtctcagaggaaaactttttcaggatatacaaaagaatttgctctgtgtcacagattagcgtgcgagacagccaaagagtgctttatatccgctacagacatcactatcctcccgaaaataacgaatggggggactttcagactcaccgtaaggtggtaggactcatcacgatcacagattgctttagcgctaaagactggcctcagacctttgagaagtttcacgtccagaaagagatttacgggagtaccttatacgatagtcgcctatttgtctttggcctgcagggtgagatcgttgagcagccccgcacagatgtagcgttttaccccaactacgaagactgtcaaacagtggagaagcgcattgaggactttatcgagagcctgtttatcgttttggagtcaaaacgcttggaccgcgcgaccgacaaatctggcgacaagatccctctcctgtgtgtcccattcgagaagaaggattttgtggggttggatacagactctagacactataaaaaacggtgccagggaagaatgcgcaaacacgtgggtgacctgtgtctgcaggccgggatgctgcaggacagtctcgtgcactaccacatgtcagtggagcttttaaggtctgtgaacgattttctttggcttggagctgctctggaaggcctgtgctctgcgagcgtgatttatcactacccggggggtactggcggcaaaagcggagcacgacgttttcaggggtccaccctgccggctgaggccgccaatcgtcacaggcctggcgcccaggaggtgcttatagaccctggcgccctaaccaccaacggtattaatccagacacctccacagagatcggtagagccaaaaactgtctttcccccgaggacattattgacaagtataaggaagctatcagctattactcaaaatacaagaacgccggagtgattgagctcgaggcctgtatcaaggcagtcagggttctggcgatccagaaaagatccatggaggcctccgagttcttgcaaaatgctgtctacataaacttgcgccagcttagcgaagaggagaaaatccagcgatacagcatactgtctgaactctatgagctgatcggtttccatcgcaagtctgcctttttcaaacgggtggcggccatgcagtgtgttgcaccttctatcgccgaaccaggctggcgggcatgttacaagctcctgcttgaaactttgcccggatactctctcagcctggaccctaaagatttcagcaggggcactcatcggggttgggcagcagtgcaaatgcgattactgcacgaactcgtgtatgcatcacgcagaatgggaaacccagcactgagtgtacggcacctgagtttcctgttgcagaccatgcttgatttcctttccgatcaggagaagaaagacgttgcacagtcactggaaaactatacttctaagtgcccaggtaccatggaaccaatcgcacttccgggtggactcactctccccccggttccattcactaagctgcccatcgtgcggcacgttaaactcttgaacctgccggcttccctacgcccacacaaaatgaagagtttgctaggacaaaacgtttctacaaagagcccattcatctattcacccattatcgctcacaaccgtggagaggaacggaacaagaagattgacttccaatgggtgcaaggagacgtgtgtgaggttcagctcatggtttacaatcctatgccgttcgaattacgcgtcgagaacatgggactgctgaccagtggcgtggaattcgagagcttgccagccgcactcagcctccccgccgaatccggactatatccagttacccttgtcggggtgccacagacgactggtaccatcaccgttaacggataccatacaacggtgtttggtgtgttcagcgactgcctgctggataatctgccggggataaaaacatctggcagtacggtggaagtgattcctgcactaccccgcttacagatcagtacctcactccctcgctccgcccattcactgcagccatcttctggtgatgaaatatccacaaatgtcagcgtccagctgtacaatggcgaaagtcagcagcttataatcaaactcgagaatatcggcatggagcctcttgagaaactcgaggtcacttccaaggtgctgacgactaaagagaagctctatggcgattttctttcctggaaactggaggagacactggcccaattccctctacagccggggaaagtggctaccttcacaatcaacattaaagtcaagttagacttttcgtgccaggagaatctgctccaggatctcagcgacgacggcatatctgtcagtggctttcctctaagcagtcctttccgccaggtagtccgcccccgggttgaaggcaagcccgtgaacccaccggaaagtaacaaggccggagattattcgcatgtaaaaactctcgaagctgtactgaacttcaagtacagcggcggccccggccacaccgaaggctattatcgtaacctgtctctgggactgcacgtcgaggttgagccctccgtgtttttcactagggtgtcaacactgccagctactagcaccagacagtgtcacctgctgctggacgtgtttaattctactgagcatgagttgactgtgagcactcgttcatctgaagccctcatcctgcacgcaggggagtgccagagaatggcaatccaggtggacaaattcaacttcgagtctttccctgagagccccggcgagaagggacagttcgctaatcctaagcagttagaagaggaaagaagagaggcccggggtctggagatccacagtaagctgggcatctgctggcggattccttctctgaaacgttctggcgaggcctcagtcgagggacttctgaatcaactggtgctggagcaccttcagttggcacccctgcagtgggatgtcttggtcgatggtcagccatgcgaccgggaggcagtggcagcctgccaagttggagaccctgtcaggcttgaggtcaggctgaccaatcgttcgcccaggagcgttggcccgtttgcgctgacggtcgtgcctttccaggaccaccagaacggggtgcacaactatgaccttcatgacacagtctcatttgtcggcagttccaccttttacctggacgcagtccagccatctggacagagcgcctgcttgggggcacttctgttcctttacacaggcgacttcttcctgcacattcggtttcatgaagactccactagcaaggagcttccaccgagctggttttgtttaccttcagtgcacgtctgtgcgctggaggcccaggcatag

SEQ ID NO: 221961 - DNA, 3741 bp, Artificial Sequence
  derived and/or modified sequence
atggtgccagccggtgatcaggacagggcaccccacaggggcaagccagcccaagccggtgctaggaccagtcgtgcctcacgagcgctgagaagctggaggaggtcgcaggctgccagggccacggtcacacatcccagggggggacatgaccgaggcagccacggcggatacagggaaggccatcgcggatgcagacgcgaccctcagtgggccagtgctggaccgccacctttgtctttcacggaagaagtgaaattcgagcttcgcgcacttaaggattgggactttaaaatgtccgtaccggactacatgcagtgtgctgaggaccaccaaacgctgctggttgtggtgcagccagttgggattgtgtcagaagagaactttttccgaatttataagcgcatttgttccgtgtctcaaatatcagtccgcgatagtcagagagtcttgtacatccggtatcgccatcactaccctccggaaaataatgaatggggggattttcagacacaccgtaaagtggtcgggttgattaccattacggactgtttttcggccaaggattggcctcaaaccttcgaaaagttccatgttcaaaaggagatctatggatctaccctgtacgattccagacttttcgtatttgggcttcagggggagattgtggaacaaccacggaccgacgtcgccttttatccaaactacgaggactgccagactgtggagaagcggatcgaggacttcattgaaagtctgttcattgttctggaatccaaacgtcttgatcgggcaaccgataaaagcggggacaaaatccctctgttgtgcgtgcccttcgagaaaaaggatttcgtgggcttggataccgattcccggcactataaaaaacggtgccagggaaggatgcggaaacacgtgggtgatctgtgcctgcaggctggcatgctccaggactccttagtgcattaccacatgtcagtagagctcctgcgctcagtgaatgactttctctggttaggggctgccctggaggggttgtgctccgcctcggtcatttatcactacccaggaggaacaggtggaaaatccggagctcgcaggttccaagggtctactctgccggcagaagccgctaacagacaccggcctggcgctcaggaagttctcattgatccaggggcactcaccacaaatggtattaatcccgacacaagcacagagataggcagagctaaaaactgtttatctccggaggacataatcgacaagtacaaggaagccatcagctactactcgaagtataaaaacgcaggagtaattgagctcgaagcttgcatcaaggcagtgagggtcctagctatacagaaacgctccatggaagccagtgaattcttgcagaacgcagtgtacattaatctacgacagcttagcgaggaggaaaaaatacagcgctattcgattctgtcagaactatatgagctgatcggatttcaccgtaaatcagccttctttaaacgtgttgccgctatgcagtgcgtagcccctagcattgccgaaccagggtggagagcctgctacaagctcctactcgagaccctccctggttatagtctcagtctggaccctaaagatttctccagggggacccaccggggttgggcagctgtgcaaatgaggctgctccatgaactagtgtacgcctcccgtaggatgggcaatcctgctctgtctgtccgccacttgtcgttcctgttgcagactatgctggacttccttagcgatcaggagaagaaggatgtggcccagtcgctcgaaaattacacctcgaagtgccctggaacaatggagcctatagctctaccaggaggactgactcttcctcccgtgccgttcacaaagttaccaatagtcagacatgtaaaacttctgaatctgcccgctagtctgagacctcataagatgaaatccctgctgggccagaacgtttccaccaaaagccctttcatctattcacccatcatcgctcacaaccggggagaagagagaaataaaaagatcgactttcagtgggtgcagggagacgtgtgcgaggtgcaactcatggtctataacccaatgccttttgaacttagggtggaaaatatgggcctcttaacttcaggcgtggaattcgagagcctgcccgctgccttgtccctcccggcagagtcagggctgtatcccgtcacgttagttggtgttccccaaaccacaggcacaatcacagtgaatggctatcatactaccgtgtttggggttttttccgactgccttttggacaacctgcctggaataaaaactagcgggtctaccgtcgaggtcatccccgctttacctagactgcagatctcaacaagcctacctaggagcgcccattctctgcagccttcttctggtgatgaaatctcaacaaatgtgtccgtgcagctttacaacggagaatcacagcagctgataatcaagcttgaaaacatcggaatggagccattggagaagctggaggtgacctccaaagtgctgaccactaaagagaaactgtatggtgattttttgtcctggaagctggaggaaaccttggctcagttccccttacagccgggtaaagtggccaccttcacgattaatatcaaggtcaaacttgatttttcatgtcaggaaaaccttcttcaagacctgagcgacgacggcattagcgtttccggatttccattatcgtctccattcaggcaggtggtgcgcccaagggtcgaaggaaaacccgtcaatccccctgagtcaaataaggctggagattattctcacgtgaaaaccctagaggccgtccttaatttcaagtattcaggtggaccaggtcacaccgagggctattacagaaacctgtcacttggtctacatgtggaggtcgagccaagtgtgtttttcaccagggtgagcacacttccggcaactagcacccgccaatgccacctgcttctggacgtcttcaattcaacagaacacgagttgaccgtgtcaacgcgctccagcgaggcactgatattacacgcaggagaatgccagaggatggccattcaggtcgacaaattcaacttcgagagctttcctgagagccctggcgagaaggggcagtttgccaatcctaagcaactggaggaggaaagacgggaggccaggggcctggaaatccacagcaaactgggaatttgctggagaatccctagcctgaagcgttctggcgaggcctcagtggagggactgcttaatcagcttgtcctagaacatctgcagctcgccccattgcagtgggatgttctggtcgatggccagccttgtgaccgcgaggccgtcgcggcatgtcaggtcggcgacccagtgagactcgaggttcggctaactaacaggtcacctagatcagtgggaccgttcgccctgaccgttgtgcccttccaggatcaccagaatggcgtgcataattatgacctgcacgataccgtgagtttcgtgggatctagcacgttctacctggatgccgtacaacccagtggccaatctgcgtgcctgggcgctctcctgttcttgtatacaggggatttttttttgcatatccgcttccatgaagactctactagtaaggaactcccaccctcttggttctgcctgcctagtgttcacgtttgtgctttagaagcacaggcctag

SEQ ID NO: 221962 - DNA, 4474 bp, Artificial Sequence
  derived and/or modified sequence
aaagtcgggagtgccatggtgccagctggggatcaagaccgcgcgccacacagggggaagccggcccaggctggggctcgcacctcacgtgcctcccgggccctgcgatcctggaggcgctcccaggccgcgcgcgccacggtcacccacccacgtggggggcacgaccgtgggagtcacggggggtaccgtgagggtcacagggggtgccgcagggatccacagtgggcttccgcggggcctccacccctgagcttcacagaggaagtgaaatttgagctgcgcgccctgaaggactgggacttcaaaatgagcgtccctgactacatgcagtgtgctgaggaccaccagacgctgctcgtggtggtccagcctgtgggcatcgtctccgaggagaacttcttcaggatctataagaggatttgctctgtgagtcagatcagcgtgcgggactcccagcgagtcctctacatccgctacaggcaccactacccacccgagaacaacgagtggggtgacttccagacccaccgcaaagtcgtgggcctcatcaccatcacagactgcttctcggccaaggactggccacagacctttgagaagttccacgtgcagaaggagatctacggctccacactgtatgactcccggctctttgtcttcgggctgcagggggagatcgtggagcagccgcgcaccgacgtggctttctaccccaactacgaggactgccagacggtggagaagagaatcgaggacttcatcgagtcactgttcatcgtgctggagtccaagcgtctggacagagccacagacaagtctggggataagatcccccttctctgtgtcccgtttgagaaaaaggactttgtaggactggacacagacagcagacattacaagaagcggtgccaaggccgcatgcggaagcacgtgggggacctgtgcctgcaggcagggatgctgcaggactccctggtgcattaccacatgtcggtggagctgctgcgttctgtgaatgactttctgtggcttggagctgccctggaaggattgtgttcagcttctgtcatctatcactatcctggtggaactggtgggaagagtggagctcggaggttccagggcagcacccttcctgctgaagcagccaatagacaccggccaggggcacaggaagttctcattgatccaggtgccctcaccaccaatggcatcaaccctgacaccagtactgagatcggacgtgctaagaactgccttagccctgaagacataattgacaagtataaagaggcgatttcctattacagcaagtataagaatgcgggagtgattgagttggaagcgtgcatcaaggctgtacgtgtccttgcaattcagaaacggagcatggaagcatcagaatttcttcagaatgcagtttacattaaccttcgacagctttctgaggaagagaaaattcagcgctacagcatcctctccgagctctatgagctgatcggcttccatcgcaagtctgcgttcttcaagcgcgtggccgccatgcagtgcgtggccccaagcatcgcggagcctgggtggagggcctgctacaaactcctcctggaaacgctgcccggctacagtctgtcgctggatcccaaagatttcagcagaggcacgcacagaggctgggctgcggtccagatgcgtttgctccatgaattggtctacgcctcccgaaggatggggaaccctgccctctctgtcagacacctgtccttccttctacagaccatgctggacttcttgtcggatcaggaaaagaaagatgtggcccaaagcctagagaactatacgtccaagtgtcctgggaccatggagcccatcgccctccctggcggcctcaccctgccaccggtgcccttcaccaagcttcccatcgtcaggcatgtgaaactattgaaccttcctgctagcctccggccacacaaaatgaaaagcttgctgggtcagaacgtgtcaaccaaaagtcctttcatctattcaccaattatcgcacacaaccgtggagaagagcggaacaagaaaatagatttccagtgggttcaaggagatgtgtgtgaagttcagctgatggtatataacccaatgccgtttgaacttcgagttgaaaacatggggctgctcaccagcggagtggagttcgagtctctccctgcggcgctttctcttccggctgaatctggtctgtacccagtgacgctcgtcggggtcccgcagacgactggaacgattactgtgaacggttaccataccacggtcttcggtgtgttcagtgactgtttgctggataacctgccgggaataaaaaccagtggctccacagtggaagtcattcccgcgttgccaagactgcagatcagcacctctctgcccagatctgcacattcattgcaaccttcttctggtgatgaaatatctactaatgtatctgtccagctttacaatggagaaagtcagcaactaatcattaaattggaaaatattggaatggaaccattggagaaactggaggtcacctcgaaagttctcaccactaaagaaaaattgtatggcgacttcttgagctggaagctagaggaaacccttgcccagttccctttgcagcctgggaaggtggccacgttcacaatcaacatcaaagtgaagctggatttctcctgccaggagaatctcctgcaggatctcagtgatgatggaatcagtgtgagtggctttcccctgtccagtccttttcggcaggtcgttcggccccgagtggagggcaaacctgtgaacccacccgagagcaacaaagcaggcgactacagccacgtgaagaccctggaagctgtcctgaatttcaaatactctggaggcccgggccacactgaaggatattacaggaatctctccctggggctgcatgtagaagtcgagccgtctgtatttttcacccgagtcagcaccctcccagcaaccagtacccggcagtgtcacctgctcctggatgtcttcaactccaccgagcatgagctgaccgtcagcaccaggagcagcgaggcactcatcctgcacgccggcgagtgccagcgaatggctattcaagtggacaagttcaactttgagagtttcccggagtcccctggggagaaggggcaatttgcaaaccccaagcagctggaggaagagcggcgggaagcccgaggcctggagatccacagcaagctgggcatctgctggagaatcccctccctgaagcgcagtggcgaggcgagtgtggaaggactcctgaaccagctcgtcctggagcacctgcagctggcgcctctgcagtgggatgtgctggtggacggacagccatgtgaccgcgaggctgtggcggcctgccaggtgggcgaccccgtgcgcctggaggtgcggctgaccaaccggagcccgcgcagcgtagggcccttcgccctcactgtggtccccttccaggaccaccagaacggcgtgcacaactacgacctgcacgacaccgtctccttcgtgggctccagcaccttctacctcgacgcggtgcagccgtccggccagtcggcctgcctcggggccctcctcttcctctacacgggagacttcttcctccacatccggttccacgaggacagcaccagcaaggagctgccaccctcttggttctgcctgcccagtgtgcacgtgtgtgccctggaggcgcaggcctgagcccgcctacttccgtccctctttctgcagggccagaggtgaccctgcctggcctcccacaccccctgcaatgagcaaggccttcactgcagccccatctcctcctcctcccccagacccctcccagccctctcctcctgttcctcctgtagcatctttgctgggctacgcagaagccccggacatggcagccccaccccatgccacgccccttcctacactgttccctggaccatacacaggctgaagcagaggaaatcccaaagcgggtgcccatccagcccaggtcccaggatccctgcacccatttctgtgacctggggccccagccgtgctgtgctgctcatcccagcagagggacctccctcgtccagcgacttccctttggccatagaaagaaatggtgagcatgagactgggcacagcctgagggcgtgggcagcttcccaccctccctgggccttggaatcccccaaggctggttttcttcctggagacccccatgggcaacttggcaggagagatggtgccgtaggaggtcgtggatggttgatgccaagagaggccctccacccgtggtgggcaaatgtccaggcctgggctggcagcccagggctgtttctgggtgctccctggccccagggtggcgtctggttaccatggctgtgtgtgtccatgtctgcaagcagttcttcaataaatggcctgcctccccctc

SEQ ID NO: 221963 - DNA, 4297 bp, Artificial Sequence
  derived and/or modified sequence
agcgccggctcggccgccagtaggaagcgccagcccagagcctgggaagtggccgcagaggctgctcggccccgctgcccgccaggtcgtgggctcccgctccgggcccggggccaccggctgtggacttcaaaatgagcgtccctgactacatgcagtgtgctgaggaccaccagacgctgctcgtggtggtccagcctgtgggcatcgtctccgaggagaacttcttcaggatctataagaggatttgctctgtgagtcagatcagcgtgcgggactcccagcgagtcctctacatccgctacaggcaccactacccacccgagaacaacgagtggggtgacttccagacccaccgcaaagtcgtgggcctcatcaccatcacagactgcttctcggccaaggactggccacagacctttgagaagttccacgtgcagaaggagatctacggctccacactgtatgactcccggctctttgtcttcgggctgcagggggagatcgtggagcagccgcgcaccgacgtggctttctaccccaactacgaggactgccagacggtggagaagagaatcgaggacttcatcgagtcactgttcatcgtgctggagtccaagcgtctggacagagccacagacaagtctggggataagatcccccttctctgtgtcccgtttgagaaaaaggactttgtaggactggacacagacagcagacattacaagaagcggtgccaaggccgcatgcggaagcacgtgggggacctgtgcctgcaggcagggatgctgcaggactccctggtgcattaccacatgtcggtggagctgctgcgttctgtgaatgactttctgtggcttggagctgccctggaaggattgtgttcagcttctgtcatctatcactatcctggtggaactggtgggaagagtggagctcggaggttccagggcagcacccttcctgctgaagcagccaatagacaccggccaggggcacaggaagttctcattgatccaggtgccctcaccaccaatggcatcaaccctgacaccagtactgagatcggacgtgctaagaactgccttagccctgaagacataattgacaagtataaagaggcgatttcctattacagcaagtataagaatgcgggagtgattgagttggaagcgtgcatcaaggctgtacgtgtccttgcaattcagaaacggagcatggaagcatcagaatttcttcagaatgcagtttacattaaccttcgacagctttctgaggaagagaaaattcagcgctacagcatcctctccgagctctatgagctgatcggcttccatcgcaagtctgcgttcttcaagcgcgtggccgccatgcagtgcgtggccccaagcatcgcggagcctgggtggagggcctgctacaaactcctcctggaaacgctgcccggctacagtctgtcgctggatcccaaagatttcagcagaggcacgcacagaggctgggctgcggtccagatgcgtttgctccatgaattggtctacgcctcccgaaggatggggaaccctgccctctctgtcagacacctgtccttccttctacagaccatgctggacttcttgtcggatcaggaaaagaaagatgtggcccaaagcctagagaactatacgtccaagtgtcctgggaccatggagcccatcgccctccctggcggcctcaccctgccaccggtgcccttcaccaagcttcccatcgtcaggcatgtgaaactattgaaccttcctgctagcctccggccacacaaaatgaaaagcttgctgggtcagaacgtgtcaaccaaaagtcctttcatctattcaccaattatcgcacacaaccgtggagaagagcggaacaagaaaatagatttccagtgggttcaaggagatgtgtgtgaagttcagctgatggtatataacccaatgccgtttgaacttcgagttgaaaacatggggctgctcaccagcggagtggagttcgagtctctccctgcggcgctttctcttccggctgaatctggtctgtacccagtgacgctcgtcggggtcccgcagacgactggaacgattactgtgaacggttaccataccacggtcttcggtgtgttcagtgactgtttgctggataacctgccgggaataaaaaccagtggctccacagtggaagtcattcccgcgttgccaagactgcagatcagcacctctctgcccagatctgcacattcattgcaaccttcttctggtgatgaaatatctactaatgtatctgtccagctttacaatggagaaagtcagcaactaatcattaaattggaaaatattggaatggaaccattggagaaactggaggtcacctcgaaagttctcaccactaaagaaaaattgtatggcgacttcttgagctggaagctagaggaaacccttgcccagttccctttgcagcctgggaaggtggccacgttcacaatcaacatcaaagtgaagctggatttctcctgccaggagaatctcctgcaggatctcagtgatgatggaatcagtgtgagtggctttcccctgtccagtccttttcggcaggtcgttcggccccgagtggagggcaaacctgtgaacccacccgagagcaacaaagcaggcgactacagccacgtgaagaccctggaagctgtcctgaatttcaaatactctggaggcccgggccacactgaaggatattacaggaatctctccctggggctgcatgtagaagtcgagccgtctgtatttttcacccgagtcagcaccctcccagcaaccagtacccggcagtgtcacctgctcctggatgtcttcaactccaccgagcatgagctgaccgtcagcaccaggagcagcgaggcactcatcctgcacgccggcgagtgccagcgaatggctattcaagtggacaagttcaactttgagagtttcccggagtcccctggggagaaggggcaatttgcaaaccccaagcagctggaggaagagcggcgggaagcccgaggcctggagatccacagcaagctgggcatctgctggagaatcccctccctgaagcgcagtggcgaggcgagtgtggaaggactcctgaaccagctcgtcctggagcacctgcagctggcgcctctgcagtgggatgtgctggtggacggacagccatgtgaccgcgaggctgtggcggcctgccaggtgggcgaccccgtgcgcctggaggtgcggctgaccaaccggagcccgcgcagcgtagggcccttcgccctcactgtggtccccttccaggaccaccagaacggcgtgcacaactacgacctgcacgacaccgtctccttcgtgggctccagcaccttctacctcgacgcggtgcagccgtccggccagtcggcctgcctcggggccctcctcttcctctacacgggagacttcttcctccacatccggttccacgaggacagcaccagcaaggagctgccaccctcttggttctgcctgcccagtgtgcacgtgtgtgccctggaggcgcaggcctgagcccgcctacttccgtccctctttctgcagggccagaggtgaccctgcctggcctcccacaccccctgcaatgagcaaggccttcactgcagccccatctcctcctcctcccccagacccctcccagccctctcctcctgttcctcctgtagcatctttgctgggctacgcagaagccccggacatggcagccccaccccatgccacgccccttcctacactgttccctggaccatacacaggctgaagcagaggaaatcccaaagcgggtgcccatccagcccaggtcccaggatccctgcacccatttctgtgacctggggccccagccgtgctgtgctgctcatcccagcagagggacctccctcgtccagcgacttccctttggccatagaaagaaatggtgagcatgagactgggcacagcctgagggcgtgggcagcttcccaccctccctgggccttggaatcccccaaggctggttttcttcctggagacccccatgggcaacttggcaggagagatggtgccgtaggaggtcgtggatggttgatgccaagagaggccctccacccgtggtgggcaaatgtccaggcctgggctggcagcccagggctgtttctgggtgctccctggccccagggtggcgtctggttaccatggctgtgtgtgtccatgtctgcaagcagttcttcaataaatggcctgcctccccc

SEQ ID NO: 221964 - protein, 261 aa, Artificial Sequence
  derived and/or modified sequence
MRLPEQPGEGKPENEKKGDGGALGGGEEPPRSQAPDFPTWEKMPFHHVTAGLLYKGNYLNRSLSAGSDSEQLANISVEELDEIREAFRVLDRDGNGFISKQELGMAMRSLGYMPSEVELAIIMQRLDMDGDGQVDFDEFMTILGPKLVSSEGRDGFLGNTIDSIFWQFDMQRITLEELKHILYHAFRDHLTMKDIENIIINEEESLNETSGNCQTEFEGVHSQKQNRQTCVRKSLICAFAMAFIISVMLIAANQILRSGME

SEQ ID NO: 221965 - DNA, 786 bp, Artificial Sequence
  derived and/or modified sequence
atgagactgcccgagcagcccggcgagggcaagcccgagaacgagaagaagggcgacggcggcgccctgggcggcggcgaggagccccccagaagccaggcccccgacttccccacctgggagaagatgcccttccaccacgtgaccgccggcctgctgtacaagggcaactacctgaacagaagcctgagcgccggcagcgacagcgagcagctggccaacatcagcgtggaggagctggacgagatcagagaggccttcagagtgctggacagagacggcaacggcttcatcagcaagcaggagctgggcatggccatgagaagcctgggctacatgcccagcgaggtggagctggccatcatcatgcagagactggacatggacggcgacggccaggtggacttcgacgagttcatgaccatcctgggccccaagctggtgagcagcgagggcagagacggcttcctgggcaacaccatcgacagcatcttctggcagttcgacatgcagagaatcaccctggaggagctgaagcacatcctgtaccacgccttcagagaccacctgaccatgaaggacatcgagaacatcatcatcaacgaggaggagagcctgaacgagaccagcggcaactgccagaccgagttcgagggcgtgcacagccagaagcagaacagacagacctgcgtgagaaagagcctgatctgcgccttcgccatggccttcatcatcagcgtgatgctgatcgccgccaaccagatcctgagaagcggcatggagtag

SEQ ID NO: 221966 - DNA, 786 bp, Artificial Sequence
  derived and/or modified sequence
atgcgacttccagagcagcccggcgaggggaaacccgagaacgaaaaaaagggcgatggcggagccttgggggggggtgaggaacctccacgttcacaggctcccgatttcccaacgtgggagaagatgccctttcatcacgtcactgcaggcctgctgtataagggtaactaccttaatcgctcacttagtgcggggtcagatagtgaacaacttgccaacattagcgtagaagaactggacgaaattagggaggcctttcgcgttctggaccgtgacggcaacggcttcatttccaagcaggagttgggtatggctatgcggagtttgggatatatgccttctgaagtagaactggccattatcatgcagcgccttgatatggatggtgacggtcaagtggacttcgacgagtttatgaccatattgggcccaaagcttgtgtcaagtgagggacgagacggttttctggggaacacgattgattccatcttttggcaatttgacatgcagcggatcactttggaggagctgaagcacatcttgtatcacgctttccgggaccacctgactatgaaggacatcgaaaacattatcattaatgaggaagaatctttaaacgaaacgagcggaaattgccaaactgaattcgagggggtgcactctcagaaacaaaaccgacagacctgcgtacggaaatccctgatctgcgccttcgcaatggcttttatcataagcgttatgctgattgccgctaatcagatcctgagatcaggaatggaatag

SEQ ID NO: 221967 - DNA, 786 bp, Artificial Sequence
  derived and/or modified sequence
atgcgcctgcccgaacagccaggcgaaggcaagcccgagaacgaaaagaaaggggacggaggcgcactgggggggggggaggagccgcccaggagtcaggctccggatttccctacatgggagaagatgcccttccaccatgtgaccgctggactcctgtataagggcaattatcttaataggagcctgtccgcgggctctgactccgaacagctggctaacatttccgtagaagagctggacgagatccgtgaggcattcagagtgttggatcgggacggcaatggcttcattagtaaacaggaattaggaatggcaatgaggagtcttggatatatgcctagtgaggtggagctggctatcatcatgcagcgcctcgatatggacggggacgggcaagtggactttgatgaatttatgacaattctcggcccaaagctggttagctcggagggccgcgacggttttctgggaaatacaatcgactcaatcttctggcagttcgatatgcagagaatcacattagaggagctcaagcatatcctctaccacgccttccgggatcatttaaccatgaaggatatagaaaacatcattatcaatgaggaagaatctcttaatgaaacctccgggaattgccagaccgaatttgagggtgtgcactcccaaaagcagaatcggcagacatgcgtgcgaaagtcccttatatgtgcatttgcaatggcattcattatctcagtgatgttgattgccgctaatcagatactccgcagcgggatggaatag

SEQ ID NO: 221968 - DNA, 786 bp, Artificial Sequence
  derived and/or modified sequence
atgaggctgcctgagcagcctggagagggcaagccagaaaatgagaagaagggagatggaggagccctgggcggcggggaggagcccccaagaagccaggccccagacttccccacctgggagaagatgcccttccaccacgtgacagctggcctgctgtacaagggcaactacctgaacagaagcctgtctgctggcagtgacagcgagcagctggccaacatctctgtggaggagctggatgagatccgggaggccttccgggtgctggacagagatggaaatggcttcatcagcaagcaggagctgggcatggccatgaggagcctgggctacatgcccagcgaggtggagctggccatcatcatgcagaggctggacatggatggagatggccaggtggactttgatgagttcatgaccatcctgggccccaagctggtgagcagcgagggcagagatggcttcctgggcaacaccatcgacagcatcttctggcagtttgacatgcagaggatcaccctggaggagctgaagcacatcctgtaccacgccttccgggaccacctgaccatgaaggacatcgagaacatcatcatcaatgaggaggagagcctgaatgagaccagcggcaactgccagacagaatttgaaggagtgcacagccagaagcagaaccggcagacctgtgtgaggaagagcctcatctgtgcctttgccatggccttcatcatctctgtgatgctgattgctgccaaccagatcctgcggagcggcatggagtag

SEQ ID NO: 221969 - DNA, 786 bp, Artificial Sequence
  derived and/or modified sequence
atgcggctgcccgagcagcccggcgagggcaagcccgagaacgagaagaaaggcgatgggggggcacttggaggaggagaagaaccaccaagaagtcaggcccctgacttccctacttgggagaagatgccctttcaccatgtgactgccggcctgctctacaagggcaattatctgaacagatctttaagcgcaggttccgacagcgaacagctcgccaatatctcagtggaagagcttgacgagattcgcgaagcattccgtgtgctggatcgggatgggaatggcttcatttccaagcaggagcttggaatggctatgcggagcttggggtacatgccctcagaggtggaactggccataatcatgcaaaggctggacatggacggtgacgggcaggtggattttgacgagttcatgactatcttgggacctaagctggtctcctctgagggtagagatggtttcttaggcaatacaattgacagcattttttggcagtttgacatgcagcgcatcacgcttgaagagctgaagcacattctttatcacgccttccgcgaccaccttacgatgaaagatattgagaacatcatcattaatgaggaagagtcattgaacgaaacctcggggaactgtcaaaccgagtttgagggcgtgcactcacaaaagcagaataggcagacttgcgtgcgcaagagcctgatttgtgcatttgcaatggccttcatcatttctgttatgctcatcgccgccaatcaaatcttgcgaagtggaatggagtag

SEQ ID NO: 221970 - DNA, 786 bp, Artificial Sequence
  derived and/or modified sequence
atgcggctgcccgagcagcccggcgagggcaagcccgagaacgagaagaaaggtgatggaggcgcgcttggagggggagaggagccgcctaggtcccaggctcctgatttccctacttgggagaagatgcctttccaccatgtgaccgctgggctgctgtacaagggaaattatttaaaccgctccctctctgctgggtctgatagtgaacaactcgcaaatatctccgttgaggaactcgatgagatacgggaggcatttagagtcctggaccgggatggtaacggattcatcagcaagcaggaactgggcatggctatgaggagcctagggtacatgccaagcgaggttgaactggccataattatgcagaggctcgacatggacggggatgggcaagtggactttgacgaatttatgacgatcctcggccccaaactggtgtcatctgaaggacgtgacggcttcctgggcaatacaattgattctatattctggcaattcgatatgcagaggataaccctggaggaattgaagcacatcttgtaccacgccttcagggaccacctgactatgaaggacatcgagaacattattattaacgaggaagagagcctgaatgagacatctggcaactgtcagaccgagtttgaaggggtgcacagtcagaagcagaaccgccaaacttgcgtaaggaagtccttaatctgtgccttcgccatggccttcatcatctctgtgatgctgatagccgctaatcagatcctaaggagcggaatggaatag

SEQ ID NO: 221971 - DNA, 786 bp, Artificial Sequence
  derived and/or modified sequence
atgaggctgcccgagcagccaggcgaaggtaagcccgagaatgaaaaaaagggtgacggcggagctctgggcggaggcgaggaaccaccacgctcccaggcgcctgatttccccacgtgggagaaaatgcctttccaccacgtgactgccggtcttctgtataaaggtaactacctcaatcgtagcttgagtgcaggctccgactcagagcagctggctaacatcagtgtcgaagagctagatgaaatcagggaggcgtttagagtgctggatcgtgatggtaacggctttattagtaagcaagaactggggatggctatgagatcattagggtatatgccaagtgaagtcgagctggccatcatcatgcagcgcctggacatggatggcgatggacaggttgatttcgatgagttcatgaccatattggggcctaaacttgttagcagcgaggggagggacggtttcctgggtaacaccattgattcaatcttctggcagtttgacatgcaacggatcaccctcgaggagctcaaacatatcctgtaccatgcttttcgagaccacctcacaatgaaggacatagagaacatcataattaacgaggaggagtccctgaacgaaacctcgggtaattgtcagaccgaattcgaaggcgttcattctcagaagcagaatcggcaaacgtgcgttcggaagagtctgatttgcgcttttgctatggcttttatcatttcagttatgttaatcgctgcgaaccagattctgcggagcggaatggagtag

SEQ ID NO: 221972 - DNA, 786 bp, Artificial Sequence
  derived and/or modified sequence
atgcgcctccccgagcagcctggcgagggaaagcccgagaatgaaaagaaaggagatggaggggctctggggggtggcgaagaaccaccaaggagtcaagctcccgattttccaacgtgggaaaagatgccgtttcaccacgttactgcaggcctgctctataagggaaattatctgaatagatcattaagtgccggaagcgattcagaacagttagctaacatctctgttgaggagttagatgagattagagaagcctttcgggtcctggaccgcgacggcaacggattcatctcgaagcaggagttaggtatggccatgcggagcctgggatatatgccgtccgaagttgagctggccatcatcatgcagcgcctggatatggatggcgatggtcaagtggattttgacgagtttatgacaattctcggtccaaaactggtgtcttcagagggtcgcgatgggtttctcgggaataccatagattctatcttttggcagtttgacatgcaaaggattaccctggaagagctcaagcatattctctaccacgcttttagggatcatcttactatgaaggatatcgagaacataatcattaacgaagaagagtccctgaatgagacttcagggaactgccagactgagttcgagggcgtgcactcacaaaagcagaatagacagacttgtgtgcgaaagtccctcatatgtgcttttgcgatggcgtttatcatttcagtcatgcttatcgcagctaaccaaatccttaggagtggaatggagtag

SEQ ID NO: 221973 - DNA, 9459 bp, Artificial Sequence
  derived and/or modified sequence
aagagaataaaagctggctccccgagcccgctggggaagctcgctggggtgctatccgcttgagtttgtgtttttttctttcctgcttcttaataaagcttactgcttactctgggtccgcgccacctttaaagctcacggccgcggtctgcgtcttcgttcttgaagtcagcaagaccgcaagcccaccgggaggagcagacgactccggacgcgccatctttaagagctgtaacactcaccgcgaggtccgtggttttattcttaaagtcggcgagaccaacaacccagcagaaggaataaattccgcacacagagtctcagtgccttcgctgacgttcctttgatgagcttctaactctctctgagaacatcgccctggacccccgatgcggctgccagagcaacccggagaggggaagcccgagaatgagaaaaagggggacggaggagccctcggagggggagaggagccgccgaggagccaggcccccgacttccccacctgggaaaagatgccgttccaccatgtgaccgccggcttgttgtacaaggggaattacctcaaccgatcgctctctgctggcagtgacagcgaacagctggctaatatctccgtggaggagctcgatgaaatccgagaggcctttcgggttctggaccgggatgggaacggcttcatctccaagcaggagctgggcatggccatgcgctctttggggtacatgccaagcgaggtggagctggccatcatcatgcagcgcttggacatggacggggatggccaggtggattttgatgaattcatgaccattcttggccccaaactggtgtcttcagaaggtcgcgatggttttcttgggaacacgatagacagcatattctggcagtttgacatgcaaaggataactctggaagagttgaagcacattctctatcatgccttccgagaccacctaacgatgaaggacattgagaacatcattatcaatgaggaagagagcctgaatgagacctcggggaactgccaaacagagtttgaaggagtgcattcccagaagcagaacagacagacctgcgtccggaagagcctcatatgcgcctttgctatggccttcatcatcagtgtcatgctgattgcagccaaccagatactccggagcggcatggagtagcagcctcccgccagccacactgtgttgcagctcaccgcgcatgtgcatgccgtgcgggcagactcttcctccacacagcagacacggacctatggactatggatggatgcggacgatggaaccgttcagtaaagaacccaaggttgagtgcaactggggttgcacttcagcttcatctccttggcagggacactaaagggctgtcttcagtgctttaatggttttgttttctaatgcaataaatcgccaggatttccaaattattgcttcaaccatcagtcataactctagagaaaaacttcatcttcatctcggaattccagcagccatccaggtataatggtgagagagcaagagagaggcatgaacacacagtcacctccactccccattctttcaacccaagggtcaacaggagactctctgctgaggtcaaccctcagttccaagaggctgacttcagggttgccacagaagagggggctttccatcccaccctggcttccttcctccacccagtggagacccccccaaggcatgaggggaaagccattaagtggggtgcagccctggcggtcttcagctgcacccctcaccgcttccgttcttactgccttttctagaggactgccattggtagagctggggtgctctcagtttccgtcggcacttggctttctgttcctagagcccatcccgcaccagcattttggaacctgcagagagcctttctcccagctttgccgcctgtgctgccattagagaaaaaaagaagcataatcgtgggcatctctataacatagacagatatatatatttggcttcttcgtgtgtgatgtcattcttccctaatcgcttacacctaatataagcttgtcctccctcccacactcatccctgcttctttggggcaggggtgaggcaggttgaggggggaggggactgggactggcggtgaggttttgatacccacacccagccatctggagtcatggagacccaccacgtctctatgccggatgacctttgtaagttaaggtccttgtgcatcttacctttcccttaccttggagtttgctttgttagtcttccccagctaaaaagagaaatgcaatccaaaatggaaagatggagagatcaaacgactgtattttcacataagatcttctggccttcagattctgcaactgactcattttcaggaggttgggggaaaagatgtttatgagtttagccaacagaacaggtaatttactcctgcctgcagaatacttttcgttggggaagagaactgaatccaaggatctgttttcaacaccattccaagtctgtaatttcctgacttttcctagatgtcagccactactatgaattcaagcttgtgtagtcagattagccagtaatctctagatgtaatagttccctttgtacttttccaagctcaggtctttattttgtaatggaattaccttgctcctacttcttttgattacatcctaaaactacatgcttccccccttccagtagcgagccaccagaagctttcttgtctctatgcagtgggtaggattttttggtgcgttgtgtgttcctgatctccctccctgtcttcctgctcagctttctccctactgccttttcagacttggagcacccaaggtctccaatgaaagttttctcattcacctctgcaagtgctactggcaacagcctgagggcagctgtagaaactttccctctgtgggagactatgaatattcctgatgagcacaagtaaaactaaggcttcagccataatatggaggagggagcagatgtaagctcccaagagcctgggggatcacaggtccctctgcaaaacttcctggagttcagcccagcaaggccagaccaaggaggcagcaacctgcctttcccccttacctgccctgctgcctgcacactgcatgcctgccccttctgctgctcctgttggctgactcaccactgtccccttaggattggaattctcaactagaaccggtccaaatgcagaatattaatacatcgaacaacttcatccttaatctctgccctgggcagtttgccctctcccatctggacttagatgggagggcatagcagatcttgaagggatatactttcctgtttttccctgacccccgaaccacccaaccacatccataggggtgcaggaccctaagtagactgggtagaaaccccagggatgattcttcaaagccccctcctccatgagaggggactgaaatgctgcagctgaggctggtcttcagggcagaaaatgagtacttctttgaaggtggcttttctgcgagttcttctgcctcctgctggagaacagagacccttcaagaggtgagggttagatttcattggcagagagattagccactgtgcaggagtagggaggaaaaggagttctggagaggcgccgccatcctgttttctggaaaggctgcaggattcctttcctaacggtgaccttcttcttgctcccagtgacctggaagcaagcccaccctccccaggggaaaatctaggagaatgcattcctctgcagactgctagagagagatggcaagaaggaagacacagaattctttctgacagcctaggagttatcttcccactgtggtaaccccccatgtggcacccagggactgaaggacacagtgcgtggagacggccctgagctagcggcattccttagacttcaggagctcagagtttgtcccggtgacttgcaccctggctgctttgcttggacagtttgtcttgggtatagggaagccttccttgtcaggcagccaactcccagccctgttcacacaaattttatgctagggccccatgccagtcagtgtccccatcatggtggctatgaagctcacggctgaagattccagaaggtcctggtctcccatgcccaagggatgccatgtagccccagctggaagtgacttccgcaggaattgagagggaatagctcacccctcattctgtcctccggacttaggaaccagtgaccttggctgcccaactgtgtggaggctgagtgattgacaaacacaggttggctcattcttgctgcaagagcaggtaccccccgccgcccccctggaaagcacaagtgatgagcaagaaggcattttccttgggagagaaggggaaatggaccctgacccccttgatccccaaagaagctgcgccccacctttccagatacccacaaagcccccagacagaatctagcatcgggactattagcaatggcttccagaatgtgcttgggtcccacgtgactgatctgacaaaaaaaaaagagggatattaccatggcaacccttgcattccaccctgagtttgccaaggcacacaaaaatagggaacattttcttaaagaacactccaattcagcctgagtgcaacctgactctctgcatctgtatcctgctgggagaggcaattacccttaaagaatctgggtggtatctctgcctttttgtctggcatttgaacttgtccttctatttactcaggagagcaggagctacctgtaagccctggtatctccccatccctactcccagccccttctcccagggtccagagccaggaccccttaatctaggtaaattgacagaaatatcatcttggaaggcaaacaagatattaagcctccaatctttaaaagtatcggtttgcctgttgagcacactcctgcaagccaaacacgtgaactttggtgaactgaggtttaggtgtggtcttaggcaaacccagtggtttcagaaatgtctgggtgttttatttgcagagaacaagatgtgtcttatgagtcttctttctcaatacctgccctgtctcaaatctcacttgacaaatggtctacgatcttgcagttatccaaaagagcctatgaaaaatggacagctgcttttgacaataatgcccctcccaacttcccattcatagaatcataaagcgatatgtttcagaactgagagagaaaagtttaccttttattccaaatgcctcgtactcggtttaagtccagactcaggtcataaatcaaagacagttttgcacgttgctcttcacctaaatctagcagtttccctgaggccctatgagggcatggacagaaaatgaaggatgcaaccacccaggacagctccctggtttgggctggcctggccacgtgtggtcacatgtcctgggatctgtgtttactgtgtccttgctctccttccttgcagaagctgctaagctctgctcctcctaactgcaggtctcaaaccctattgggtcattttgccacactatttctccaaaggcccatagtcattacattttttaccatttcaccaagataacagggggggtctggaattcccctgctaggaagggccccttttcctatatcaccgtgatggtacagatgaactgagatgaaacttttagacttcagcacgtcacacatcctggttgtataaccaggaggtctgcagagctgcaacccctgaagaacatctgtcttaaaagacctcaaatcagaacattctcattggcctcttcagtgatccccatggagctaagagtccgtaacctaaaggccttaccatagccatcttccctccacacctgattgctcaactgccccagaaggggagaatctatctgaaatagaaaagaagcattaaggaccaggtgcggtggctcacacctataatcccagcactttgggaggccaaggcaggtggatcacttaagatcaggagttcaagaccagcctggccaacgtggtgaaaccccatctctactaaaaaaaaaaaatacaaaaattagccaagcatggtgtcgggcacctgtaatcctagctactctggaggctgaggagggagaatcacttgaaccctggaggcggaggctgcagtgagctgagatcgcgccactgcactccagcctgggcaacagagcaaaacttcatctcaaaaaataattttaaaaaagaaacattattcaccagctaagacttttcaatttaaattatttaaagtgacagcaacatagaggagaatttgggctgcctcttaccgacccagtctccatgataatttgagtgtcacaactgttcagcttcacttcatacttgctttgactaagtcactcgggattgtcctcaattttttggccctgccataaataggtgtatgttagtccgttttgcattgctataaaggaataccttaacactgggtaatttataaagaaaagaggtttatttggctcgcagttctgcaggctgtttgagcaaggtatcaacatctgcttggcttctggtgagacctcagaaagctttgacccatggtggaaggtgaagggggagcaggcacgtcacacagcaagaacaggagcaagagagaggagaagaggtgccagtctccttttcttaacaacccgcaattgcatgaactaataaagtaagaattcactcattactacagggagggcaccgagtcattcatgaggaatctgtccctatgacccaaatatctcccagcaggccccacctccagcactggagatcaacatgaaatttggggggaacaaatatccagcctctatgattggtttggagcaatgagatcaattacaccaacaagccaagcatttctcttagtatcctatggtcattgctaatgcatatggtcattttgacagctgtggtttctccttcatattcatttgggactcttcatagggtctcgagagacatgacaatactgttcaaaacgtctccaaggcaaaattaattttattccgttgactggaaatatatcacaaagaatgaggtttttccagtcccacccacaagacagtcctctgaaagtggaaaagcttgcccggccacctgcccctaccctgaccttggggtagttcatcagttgagcacaacccccatgccgggcatagactcacccatctcttttcctcaggtgtgatgggttggctttcaaactagtgtttctcgcactgttagaagttattgtccaagtggaaaggatgcagaggctggaattttccagtgggatagaagagcaggctaattaggaaggaatattccagggaatgcaaggtgcaactgcgatattgctccatccctggacctgagggagacaaagaaagttcttaaagggctgcagatgctgtcctctgaaggtcttctctggatcgctggcctactttggaaacatgcaggccattgagtgccatggggctgcccatcagtctgatccacacgaaaggctctgtgcatttcaagagcaggctggtagctcgccattcctgggaggatgctgacatctgtcaagcccagaatgcctctctcagggctctcagacctgttaaactgaggccaggagagcagaagaaagaactcaaagtgtggacggtactaccagctggagaaagcccaggagccaggactcttccacccactatctaggttatgttgagtgacattcctccctggcttcaggtttctctaaagccagaggaaaagtaaaccagacaagccctcccatctattttgtctgaaacaagatggagtgaatgctccctactgagagggtctggatttcacccatgaattgcactaggaactgggagctcctttttgaacacaagtcccaagaggcagttgtgataaagtctctcttttggtgtccgctgtctgtaaatgaaacaatgcaaattggtgtatgttaaatgtgtcacagcttgcaggcaagaggttttgtttattctctaaggacttgctgactcgagggagcatcaaagatgagctttctgtctgtcttggcaagtgtgaaaataaagggagtcagtcacctccccaaaggtcatgtgaatcagaattcaggagaaagttggaggaaacaatggcagattccaagaagagatgcttgtttctccatttgagaaagccttactgaaagctactgaataaagagcacaatttccagttatttctttctttgcttttttttttttctggccactataacagcacttccagtatatgttgatagtagcttgtaattattcctaataccccagaaagaagagagtcgtgatctttggtgattgtgaggaattagattaacagtcgcgggggaccggctacctgcgacagccctttaaatggctaatgagggatgctgagtgctgagcggtgcctgcttttgatgtggcccacccatgaccagggagagagggcaggaagagagcagctgcaggatccacaagtctctaacccttctgccccaggcaacataaaaccctagattcttgttctttttccctcttcctaaagtagactgacgtcccagtaattgtttttctaacaagccctgttgttctccctgggaaagacctagattggccaagaaaggatcctgtcagctcctggtggagagttgcacaagccagtggctctcaactctctccaaggaaaattaaagcatattttctctttcttagctcaaaatcagctttcaggggtccttattggggtctgattttcttccccagttctgaatccaggaagaagctttttctccaaggaccaaccaaaaacaatgactttggagaaaaattagactcagaaagtctgtccaggcattgggttggtgaactgtcaactgttggatggggaggaggggtcgctgtgatcgtagcggtcattagacttgggacgtgagttgtctctcaaagcacagtagtaaatgactgtattttgtatattgcccccaatatgttgggtgtaaatagaagcacagctggggattgatcatggccaggacgattggagcttggcagctctcatatccagaataagccactaagacggaactcatcaatcaccatcttcccatttacctcattagcatcccattttctctcattcagtattagttgatgatttctgctattaagtgatgagaaagtcagcagactagtcaaaaaagaatctttatataaaatgtacatattaatataaattaacttagcatgcaacttaccgatcaaatgaagtatatattattaatatgttatcttagtgtataaaggaaaactgccatatttaccagatgttttctttaaccgaacttgtctgtaaatatataatctgtataaaaagagtctaatttaccattatttatgcaatagaaaaaataaaagtttttttttcttttga

SEQ ID NO: 221974 - DNA, 786 bp, Artificial Sequence
  derived and/or modified sequence
atgcggctgccagagcaacccggagaggggaagcccgagaatgagaaaaagggggacggaggagccctcggagggggagaggagccgccgaggagccaggcccccgacttccccacctgggaaaagatgccgttccaccatgtgaccgccggcttgttgtacaaggggaattacctcaaccgatcgctctctgctggcagtgacagcgaacagctggctaatatctccgtggaggagctcgatgaaatccgagaggcctttcgggttctggaccgggatgggaacggcttcatctccaagcaggagctgggcatggccatgcgctctttggggtacatgccaagcgaggtggagctggccatcatcatgcagcgcttggacatggacggggatggccaggtggattttgatgaattcatgaccattcttggccccaaactggtgtcttcagaaggtcgcgatggttttcttgggaacacgatagacagcatattctggcagtttgacatgcaaaggataactctggaagagttgaagcacattctctatcatgccttccgagaccacctaacgatgaaggacattgagaacatcattatcaatgaggaagagagcctgaatgagacctcggggaactgccaaacagagtttgaaggagtgcattcccagaagcagaacagacagacctgcgtccggaagagcctcatatgcgcctttgctatggccttcatcatcagtgtcatgctgattgcagccaaccagatactccggagcggcatggagtag

SEQ ID NO: 221975 - protein, 107 aa, Artificial Sequence
  derived and/or modified sequence
MVIRVFIASSSGFVAIKKKQQDVVRFLEANKIEFEEVDITMSEEQRQWMYKNVPPEKKPTQGNPLPPQIFNGDRYCGDYDSFFESKESNTVFSFLGLKPRLASKAEP

SEQ ID NO: 221976 - DNA, 324 bp, Artificial Sequence
  derived and/or modified sequence
atggtgatccgggtgttcatcgcttcctcttcaggtttcgtcgcaattaaaaagaagcaacaggatgtggtcagatttttggaggctaataaaatcgaatttgaggaagttgatatcaccatgagcgaagagcaacggcagtggatgtacaaaaacgtcccccccgagaagaagccaacccagggaaaccccctccctccacagatttttaatggggaccgctactgcggcgattatgactccttctttgagagtaaggaatcaaataccgtcttttcattcttggggctgaagccacggctcgcttcaaaggctgaaccctag

SEQ ID NO: 221977 - DNA, 324 bp, Artificial Sequence
  derived and/or modified sequence
atggtgatccgggtcttcatcgccagcagcagcggctttgtggccatcaagaagaagcagcaggatgtggtgcgcttcctggaggccaacaagattgaatttgaggaggtggacatcaccatgtctgaggagcagaggcagtggatgtacaagaatgtgcccccagagaagaagcccacccagggcaaccccctgcccccccagatcttcaatggagaccgctactgtggggactatgacagcttctttgagagcaaggagagcaacacagtgttctccttcctgggcctgaagccccggctggccagcaaggccgagccctag

SEQ ID NO: 221978 - DNA, 324 bp, Artificial Sequence
  derived and/or modified sequence
atggtgatccgggtgttcatcgccagcagcagcggcttcgtggccattaagaagaaacagcaggatgtcgtgagatttctcgaggccaataagatagagtttgaggaggttgacatcacaatgagtgaggaacagcgtcagtggatgtacaagaacgtcccacctgagaaaaaacccacacaggggaaccccctaccgccacaaatttttaacggcgaccgctattgcggtgattacgactctttttttgagtctaaagaaagtaatactgtttttagtttcctgggcctgaaaccgcgcttggctagtaaggccgaaccctag

SEQ ID NO: 221979 - DNA, 4649 bp, Artificial Sequence
  derived and/or modified sequence
ccgggcggcgctgggcttttatctgcggacccgccgggagggagccagatcccagcgatcttccccgacggcagcgctttacccagaggctgccggcggctcgtagctgggttcagctctgcgtccacgccagcccggagcccggggggcaaggggtctgtcccgggcgcagcgagaggatggtcatccgcgtgttcatcgcctcttcctcgggcttcgtggcgataaagaagaagcagcaagatgtggttagatttctggaagccaacaagatagagtttgaggaggtggatatcacaatgtcagaagaacagaggcaatggatgtacaaaaacgtccccccggaaaagaaacccactcagggcaaccccctgccacctcagatatttaatggcgaccgatactgtggagattatgacagtttttttgaatccaaggaaagcaacacagtcttttcatttttaggcctgaaaccacggttggcatcaaaggcagaaccttagagaagaagagtggaagatgacggagatgcattttgaagcacccctggtactcagcacacacatgcttacctaatgcatcactgtgacaaaagccacacgcattatcagtaactttgcttgccacggaaaaggtgtttttgaaagatgtggctataatgagaattgcatgattgctttaaaccaaatcaggtggtggattttttttttcttattctatttgcctgcagttgcctcactcacctggaaataccgtcacctgttacaggtgtactttcttaatgactgaaagataagtgggtagcaccgtcagagagaaaatgttggatctgccctaggttatagtagatgccggaattgcgtaaacccacttctctttaagctgcctggattgcacctttgaaatatgtctgccaagttgttagaatctttgaatcagaaggaaaaaaagcagcgctggttgacaaagggtgttgaagatttttgctgcagaatcagttacaaacatcacagttcccatgctttgtaataacacctggtgaaaaagttagatattctagacttgttttagtaatggaaactcttacctccacatattatcctacagatgtttccagaaatccctgttgtaacatcaagtgatcagaactaagttactgggatgacaataattgctatttgaaatatatgcttctttatttcttgcaaggggcaagtttcacccaaatgcctgagactgcttgaaagatatattttaagtggtgcactaattagtgaatatataggaaaattatctgacgagtatctgaaggcattttcagctctagcaatttatttataatatataagttcatatattttttaatccagctcccctaacagacagctgctgcttctattttgtgaagggactatattttttgagaaaggaaaatctcagttagatatattttgtgaacccttgattagacatattaaaatataccaatgttgtagtaaaatttaatttttccttttgttacttttcatttgcctctaattttgcttgctcatatttctggccaatgtacagcctcatatttttcagagtaatacagatacttgttctcattccgtatatgagcacaagtaaggtttcagagcaacacacatgagaaagagagtaacccggaattgtacttgtcaagcaaaatctatactcctattggagtggatgctgatgaacatcgaacatatctacttcattagagcagaggctatttttctgcattcttgtccctataacagggatgcttaattttttttttaacttagagttttaaattgccaaacatgggaacagccttgaataggataaattttcagagggctgcctaaaatattttatttctagcatcctgattctggacttttcattataattctgagcaggaaatttataagaaattgaaagagcagaagaattacagccctgtcacatgtgcccagcactccgccccatgccttgctaaatgtagactaaagaacttgttgaatgctaaggctgaaatcccaacctgagatttgtagtccaggattacaaccagaaggaaagtatgacagatttctacttaactagaatggacacatgatccacaattttctcttcaagggaagctgttgtcaaattatggatattactggttagttgtcattaagtaagatccaggtcaaattccatttgacaaatcccagggactatccaggaatttttttttaactggatattgtgtttgagtatgtgagtcttctgataaaactcagaatttctttttaagcagttgtaaaaattgtcatgttgtaattcattactcagctaacatttagtctactcttgctagtgagtgccaagaaccaacttggtaaggttgaggctttgcaagttaactgctggggttataggatcaataccatacttgctagacaaagctacccagatttgtcttatattataatttttgagttaaccgtagtatacctattatgattatagtaaacagactagtgggtagtaatgctaaattaccatcacagttatgtgccatctccccaccccatttttttttttttttttttgatcagcaaagaaatacaggagaccagtctcgagtggtgctgtacttgttatgagtgaggcagcagcacagtgtgtggcatttacatggtacccaggctccacagagtaccaagatgttgccctctgggaccacacttagctcagagaatatggggtccttacttgtattcttttatcagctgattttgaaacatataataatgattttcttgttcccttctttaactagctgcctttagattttgataatcacagtcttaaaatactaggaaagaagtggatgggaattgtaggcatagatttcatatcaagggcatttcaagacagaatttttatttcctgtagtaggcttgctggagcaaaggaaatgtgctgctaaaaatcaacttatgccattttaaaattagataaaatatggagtgccatcctgctaggtgagtacagaccagaagaaaatttagttgggaaaatacttgtttttccaaattccggtgttttattacaatcaaagaagaggaaagcaaggtattttttcacctcagattctaatatattctagatttgtttctgttttatagatttaattcaatacctccacatagatgtttttatattacatgaatttaataataaactaaacttttttttgtctcccgttattgaaaagtaccaaagcttctttctgttgtgtttgattttactataggggttttgctttttctagagatacttttcatttaacagcttttgttaagtgtcaggctgcactttgctccatataattattgttttcagatttcaacttgtatgtgtttgtctcttaaagcattggtgaaatcacatattttatattcagcataaaggagaataaattccagaaaacacatattctgaaaatggagtgtttgttccctgccatttttcacacctctcttaattttagttctgtttagttgagaggctgtgattttactcttgcctgtgaacctcatgcatgaaagcagcacattaaattgtaaaaatacaaacagatcgtgtgatcattcaaggagccagacatgaggtcctgcacgagggtgttgggaggacaccacagattcatctcagacagtgatcaggactgaggatggagttaaatcactcagcccctgggtggggtggggtggttcaaatggatgactgatctcctgagtacactgaagccacaggctggtggccatgttctctgaattgggtgcagaagacaagggcagagtggctgcggcccctattacctttgtagcagccacatcagaaagcagaagaaaacagtatttctgaaggcattgtttgaggttgatctcagcactgaacgatttcaagccctacgcaccagaacagaaggagggtggaggaagtgatcagagggaacgagctgtaggtttgcagaaatgtgtgaaaccaaaatgatcactgcctacttgtgattcaaatcttcagagttttcctagttcttctagaaatacatgtcaggtttgtttgttcatcctttctgtcagcatggatcaagcccctaaaatgtggtaagtgttgtcagagcagggcaatatctctactctcaagtatgaggggaatagaaacaaagcagcagttttagccagggttcaatgatagagtggaggtaaattaagagcctccaggctgtgattcaccatttgagacattatacataatttgtttttgttataagccatttgaatttttaaaaaatttcatacatgcaatggaatatagatatgtatatacacatataatatatatgctaaagtataaagagtaataataatgacaataaacaaacccctgtgtgcctaccacccaccttattgcctttcctttgaggtaccgtgtgcggtttcctgaacctatctctatccctgtctgatagagggaacccctgtactgaactttgtgttgaccatagccttcttgtctttcatcactttatctccatgtatgtatccttaaagaataataaatggaattaaactgaa

SEQ ID NO: 221980 - DNA, 324 bp, Artificial Sequence
  derived and/or modified sequence
atggtaatccgggtatttatcgctagtagctctgggttcgtcgctattaaaaaaaagcagcaggacgtggtgcgctttttggaagctaataagatcgagtttgaggaagtggacattacaatgtctgaagagcagcggcaatggatgtacaaaaatgtgccccctgaaaaaaaacccacccagggcaacccgttgcccccacagatctttaacggcgaccggtactgtggtgactatgacagctttttcgagagcaaggagtcaaacactgtgttctcatttctcgggcttaaaccacgcttagcttctaaagctgagccatag

SEQ ID NO: 221981 - DNA, 324 bp, Artificial Sequence
  derived and/or modified sequence
atggtgatcagagtgttcatcgccagcagcagcggcttcgtggccatcaagaagaagcagcaggacgtggtgagattcctggaggccaacaagatcgagttcgaggaggtggacatcaccatgagcgaggagcagagacagtggatgtacaagaacgtgccccccgagaagaagcccacccagggcaaccccctgcccccccagatcttcaacggcgacagatactgcggcgactacgacagcttcttcgagagcaaggagagcaacaccgtgttcagcttcctgggcctgaagcccagactggccagcaaggccgagccctag

SEQ ID NO: 221982 - protein, 663 aa, Artificial Sequence
  derived and/or modified sequence
MAGMKTASGDYIDSSWELRVFVGEEDPEAESVTLRVTGESHIGGVLLKIVEQINRKQDWSDHAIWWEQKRQWLLQTHWTLDKYGILADARLFFGPQHRPVILRLPNRRALRLRASFSQPLFQAVAAICRLLSIRHPEELSLLRAPEKKEKKKKEKEPEEELYDLSKVVLAGGVAPALFRGMPAHFSDSAQTEACYHMLSRPQPPPDPLLLQRLPRPSSLSDKTQLHSRWLDSSRCLMQQGIKAGDALWLRFKYYSFFDLDPKTDPVRLTQLYEQARWDLLLEEIDCTEEEMMVFAALQYHINKLSQSGEVGEPAGTDPGLDDLDVALSNLEVKLEGSAPTDVLDSLTTIPELKDHLRIFRPRKLTLKGYRQHWVVFKETTLSYYKSQDEAPGDPIQQLNLKGCEVVPDVNVSGQKFCIKLLVPSPEGMSEIYLRCQDEQQYARWMAGCRLASKGRTMADSSYTSEVQAILAFLSLQRTGSGGPGNHPHGPDASAEGLNPYGLVAPRFQRKFKAKQLTPRILEAHQNVAQLSLAEAQLRFIQAWQSLPDFGISYVMVRFKGSRKDEILGIANNRLIRIDLAVGDVVKTWRFSNMRQWNVNWDIRQVAIEFDEHINVAFSCVSASCRIVHEYIGGYIFLSTRERARGEELDEDLFLQLTGGHEAF

SEQ ID NO: 221983 - protein, 286 aa, Artificial Sequence
  derived and/or modified sequence
MAGMKTASGDYIDSSWELRVFVGEEDPEAESVTLRVTGESHIGGVLLKIVEQINRKQDWSDHAIWWEQKRQWLLQTHWTLDKYGILADARLFFGPQHRPVILRLPNRRALRLRASFSQPLFQAVAAICRLLSIRHPEELSLLRAPEKKEKKKKEKEPEEELYDLSKVVLAGGVAPALFRGMPAHFSDSAQTEACYHMLSRPQPPPDPLLLQRLPRPSSLSDKTQLHSRWLDSSRCLMQQGIKAGDALWLRFKYYSFFDLDPKTDPVRLTQLYEQARWDLLLEEIDC

SEQ ID NO: 221984 - DNA, 2477 bp, Artificial Sequence
  derived and/or modified sequence
gagaaaggagggcaggaagcccacggcccacaggggtgtagcccgagacccacctgcagcccccagcccttgccaggaaagcagcagccgcagccatggcggggatgaagacagcctccggggactacatcgactcgtcatgggagctgcgggtgtttgtgggagaggaggacccagaggccgagtcggtcaccctgcgggtcactggggagtcgcacatcggcggggtgctcctgaagattgtggagcagatcaatcgcaagcaggactggtcagaccatgctatttggtgggaacagaagaggcagtggctgctgcagacccactggacactggacaagtacgggatcctggccgacgcacgcctcttctttgggccccagcaccggcccgtcatccttcggttgcccaaccgccgcgcactgcgcctccgtgccagcttctcccagcccctcttccaggctgtggctgccatctgccgcctcctcagcatccggcaccccgaggagctgtccctgctccgggctcctgagaagaaggagaagaagaagaaagagaaggagccagaggaagagctctatgacttgagcaaggttgtcttggctgggggcgtggcacctgcactgttccgggggatgccagctcacttctcggacagcgcccagactgaggcctgctaccacatgctgagccggccccagccgccacccgaccccctcctgctccagcgtctgccacggcccagctccctgtcagacaagacccagctccacagcaggtggctggactcgtcgcggtgtctcatgcagcagggcatcaaggccggggacgcactctggctgcgcttcaagtactacagcttcttcgatttggatcccaagacagaccccgtgcggctgacacagctgtatgagcaggcccggtgggacctgctgctggaggagattgactgcaccgaggaggagatgatggtgtttgccgccctgcagtaccacatcaacaagctgtcccagagcggggaggtgggggagccggctggcacagacccagggctggacgacctggatgtggccctgagcaacctggaggtgaagctggaggggtcggcgcccacagatgtgctggacagcctcaccaccatcccagagctcaaggaccatctccgaatctttcggccccggaagctgaccctgaagggctaccgccaacactgggtggtgttcaaggagaccacactgtcctactacaagagccaggacgaggcccctggggaccccattcagcagctcaacctcaagggctgtgaggtggttcccgatgttaacgtctccggccagaagttctgcattaaactcctagtgccctcccctgagggcatgagtgagatctacctgcggtgccaggatgagcagcagtatgcccgctggatggctggctgccgcctggcctccaaaggccgcaccatggccgacagcagctacaccagcgaggtgcaggccatcctggccttcctcagcctgcagcgcacgggcagtgggggcccgggcaaccacccccacggccctgatgcctctgccgagggcctcaacccctacggcctcgttgccccccgtttccagcgaaagttcaaggccaagcagctcaccccacggatcctggaagcccaccagaatgtggcccagttgtcgctggcagaggcccagctgcgcttcatccaggcctggcagtccctgcccgacttcggcatctcctatgtcatggtcaggttcaagggcagcaggaaagacgagatcctgggcatcgccaacaaccgactgatccgcatcgacttggccgtgggcgacgtggtcaagacctggcgtttcagcaacatgcgccagtggaatgtcaactgggacatccggcaggtggccatcgagtttgatgaacacatcaatgtggccttcagctgcgtgtctgccagctgccgaattgtacacgagtatatcgggggctacattttcctgtcgacgcgggagcgggcccgtggggaggagctggatgaagacctcttcctgcagctcaccgggggccatgaggccttctgagggctgtctgattgcccctgccctgctcaccaccctgtcacagccactcccaagcccacacccacaggggctcactgccccacacccgctccaggcaggcacccagctgggcatttcacctgctgtcactgactttgtgcaggccaaggacctggcagggccagacgctgtaccatcacccaggccagggatgggggtgggggtccctgagctcatgtggtgccccctttccttgtctgagtggctgaggctgatacccctgacctatctgcagtcccccagcacacaaggaagaccagatgtagctacaggatgatgaaacatggtttcaaacgagttctttcttgttactttttaaaatttcttttttataaattaatattttattgt

SEQ ID NO: 221985 - DNA, 1006 bp, Artificial Sequence
  derived and/or modified sequence
acccgccctgctcgtgataaggcacaagcaagggctgccctgaaggaagctccaaagagaaaggagggcaggaagcccacggcccacaggggtgtagcccgagacccacctgcagcccccagcccttgccaggaaagcagccgcagccatggcggggatgaagacagcctccggggactacatcgactcgtcatgggagctgcgggtgtttgtgggagaggaggacccagaggccgagtcggtcaccctgcgggtcactggggagtcgcacatcggcggggtgctcctgaagattgtggagcagatcaatcgcaagcaggactggtcagaccatgctatttggtgggaacagaagaggcagtggctgctgcagacccactggacactggacaagtacgggatcctggccgacgcacgcctcttctttgggccccagcaccggcccgtcatccttcggttgcccaaccgccgcgcactgcgcctccgtgccagcttctcccagcccctcttccaggctgtggctgccatctgccgcctcctcagcatccggcaccccgaggagctgtccctgctccgggctcctgagaagaaggagaagaagaagaaagagaaggagccagaggaagagctctatgacttgagcaaggttgtcttggctgggggcgtggcacctgcactgttccgggggatgccagctcacttctcggacagcgcccagactgaggcctgctaccacatgctgagccggccccagccgccacccgaccccctcctgctccagcgtctgccacggcccagctccctgtcagacaagacccagctccacagcaggtggctggactcgtcgcggtgtctcatgcagcagggcatcaaggccggggacgcactctggctgcgcttcaagtactacagcttcttcgatttggatcccaagacagaccccgtgcggctgacacagctgtatgagcaggcccggtgggacctgctgctggaggagattgactgc

SEQ ID NO: 221986 - DNA, 1992 bp, Artificial Sequence
  derived and/or modified sequence
atggcaggtatgaagacagcgtctggcgattacattgatagcagttgggagctgcgggtgtttgttggcgaggaggatcccgaggccgagtctgtcactcttagggtgacgggagagtctcacattggtggcgtccttttgaaaatcgtggagcagattaataggaagcaggactggagtgaccatgcaatctggtgggagcagaagaggcagtggctgctgcagacacactggaccttggacaagtacggcattctcgcagacgccagactgtttttcggtccacagcaccggccggtgatcctcaggctgccaaatcgacgagccctacggctgagagcttccttctcccagccactcttccaggctgtagcagctatttgtaggctcctctcaatccgacatcccgaggagttgtccttactacgggcgcccgaaaaaaaggaaaagaagaaaaaggagaaggagccggaggaggaattgtatgatctcagcaaagtcgttttagctggaggtgtcgcaccggccctgttccgaggaatgccagcacacttctcggattccgcccagacagaggcatgttaccacatgctttccaggcctcagccaccccccgaccccttgctgcttcaaagactgccccggccatcatctttaagcgataaaactcagctgcatagtagatggctggacagcagcagatgtcttatgcagcagggtattaaagccggggacgcattatggctccgcttcaaatattatagtttttttgatttagaccctaaaaccgatccagttagattgactcagttgtacgagcaagctcgttgggatctgcttttagaggaaatcgattgtacagaggaggagatgatggtctttgctgcattgcagtatcatatcaacaaactaagtcagtctggagaggttggcgagcctgcagggacagaccctggccttgacgatctggacgtggcattgtccaacctcgaggttaaactagaagggagcgccccgacggacgtactggattcactgactacgattccggagctcaaggatcatcttagaatcttccggcccagaaaattgactctaaagggctaccgccaacactgggtggtcttcaaggaaacaactctgagctactacaagtcccaagatgaggctccaggagatcctattcaacagctgaatttgaagggttgcgaggttgttccagatgtgaatgtgtcaggccaaaagttctgtatcaagctgctagtgccgtccccagagggcatgagcgagatttaccttcgctgccaggatgaacagcagtacgcccgatggatggctggctgccgtttggcttctaagggtcgtaccatggctgactcttcatacacgtccgaggttcaggccatcctcgccttcttaagtctccagaggacgggctctggcggcccaggaaatcatcctcacgggcccgacgctagcgccgaaggccttaatccctacgggctagtagcaccgcggtttcagcgaaaattcaaggcaaaacaactcacccccaggatacttgaagctcaccagaacgtggcccagttgtccctcgctgaggcgcagctgaggttcattcaagcctggcagtctcttcccgacttcggcatttcctacgtaatggtcagatttaaaggatctcgcaaggacgaaatccttgggattgctaataatcggctgatacggatcgaccttgccgtcggcgatgttgtaaagacttggaggtttagcaatatgagacagtggaacgtgaactgggatataaggcaggtagccattgaatttgatgaacatataaatgtggctttctcctgtgtgagcgcctcatgcaggatcgttcatgaatacatcggcgggtatatcttcctctctacccgggaacgagcccggggggaggagctggacgaggacttgttccttcagcttactggaggccacgaggctttttag

SEQ ID NO: 221987 - DNA, 861 bp, Artificial Sequence
  derived and/or modified sequence
atggctggtatgaaaactgcgtctggcgactacattgattcctcatgggagctgagggtgtttgtgggagaagaggatcctgaggcagagtccgtcacgctccgcgttaccggagagtcacacattgggggcgttctgctcaaaatcgttgagcagattaacagaaagcaagactggtccgaccacgccatatggtgggagcagaaacgacagtggctgctacagacccactggacactggacaagtacggcatcctcgctgatgcacggctgttctttggccctcaacataggccagttatattacgtttacccaaccgccgtgccctcaggctaagggcatccttttctcagccactgttccaagcagtcgcagccatatgccggttactgagtattcgacatcccgaggagttatctcttcttcgcgcaccagagaaaaaggaaaaaaagaagaaggagaaggagcccgaagaggaattgtacgatttgtccaaagtggttctggctggcggggtagcacctgcactcttccgcggcatgccagcccatttctctgactccgctcagactgaagcatgctatcacatgctcagccgtccgcaaccgccaccggacccgctcctgctgcagcgtctgccccgcccttctagtttatcagataagacacagctgcattctcggtggctcgattctagtcgttgcctgatgcagcagggaataaaagccggagatgccttgtggctcagatttaagtactactcttttttcgatcttgaccccaagacggacccagtcaggctaacacagctatatgagcaggccaggtgggacctgctccttgaggaaatcgactgttag

SEQ ID NO: 221988 - DNA, 1992 bp, Artificial Sequence
  derived and/or modified sequence
atggccggcatgaagacagccagcggggactacatcgacagctcctgggagctgcgggtgtttgtgggggaggaggaccctgaggccgagagcgtgaccctgcgggtgactggagagagccacatcggcggcgtgctgctgaagatcgtggagcagatcaacaggaagcaggactggagcgaccacgccatctggtgggagcagaagaggcagtggctgctgcagacccactggaccctggacaagtatggcatcctggctgatgcccggctcttcttcggcccccagcacaggcctgtgatcctgcggctgcccaacagaagagccctgcggctgcgggccagcttcagccagcccctcttccaggccgtggccgccatctgccgcctgctgagcatccgccaccctgaggagctgagcctgctgcgggcccctgagaagaaggagaagaagaagaaggagaaggagcctgaggaggagctgtatgacctgagcaaggtggtgctggccggcggcgtggccccagccctcttccggggcatgcctgcccacttcagtgacagcgcccagacagaggcctgctaccacatgctgagccggccccagcccccaccagaccccctgctgctgcagaggctgccccggcccagcagcctgagtgacaagacccagctgcacagccgctggctggacagcagccgctgcctgatgcagcagggcatcaaggctggagatgccctgtggctgcgcttcaagtactacagcttctttgacctggaccccaagacagatcctgtgcggctgacccagctgtatgagcaggcccgctgggacctgctgctggaggagattgactgcacagaggaggagatgatggtgtttgctgccctgcagtaccacatcaacaagctgagccagagcggggaggtgggggagcccgccggcacagaccccggcctggatgacctggatgtggccctgagcaacctggaggtgaagctggagggcagcgcccccacagatgtgctggacagcctgaccaccatccctgagctgaaggaccacctgcgcatcttccggcccaggaagctgaccctgaagggctaccggcagcactgggtggtgttcaaggagaccaccctgagctactacaagagccaggatgaggcccctggggaccccatccagcagctgaacctgaagggctgtgaggtggtgcctgatgtgaatgtgtctggccagaagttctgcatcaagctgctggtgcccagccctgagggcatgtctgagatctacctgcgctgccaggatgagcagcagtatgcccgctggatggccggctgccgcctggccagcaaaggaagaaccatggctgacagcagctacaccagcgaggtgcaggccatcctggccttcctgagcctgcagaggacaggcagcggcggccctggcaaccacccccacggcccagatgccagcgctgagggcctgaacccctacggcctggtggccccccgcttccagaggaagttcaaggccaagcagctgaccccccgcatcctggaggcccaccagaatgtggcccagctgagcctggccgaggcccagctgcgcttcatccaggcctggcagagcctgcctgactttggcatctcctatgtgatggtgcgcttcaagggcagcaggaaggatgagatcctgggcatcgccaacaacagactcatcagaattgacctggccgtgggagatgtggtgaagacctggaggttcagcaacatgaggcagtggaatgtgaactgggacatccggcaggtggccattgaatttgatgagcacatcaacgtggccttcagctgtgtgtctgccagctgccgcatcgtgcatgagtacatcggcggctacatcttcctgagcacccgggagcgggcccggggggaggagctggatgaggacctcttcctgcagctgactggaggccacgaggccttctag

SEQ ID NO: 221989 - DNA, 861 bp, Artificial Sequence
  derived and/or modified sequence
atggccggcatgaagacagccagcggggactacatcgacagctcctgggagctgcgggtgtttgtgggggaggaggaccctgaggccgagagcgtgaccctgcgggtgactggagagagccacatcggcggcgtgctgctgaagatcgtggagcagatcaacaggaagcaggactggagcgaccacgccatctggtgggagcagaagaggcagtggctgctgcagacccactggaccctggacaagtatggcatcctggctgatgcccggctcttcttcggcccccagcacaggcctgtgatcctgcggctgcccaacagaagagccctgcggctgcgggccagcttcagccagcccctcttccaggccgtggccgccatctgccgcctgctgagcatccgccaccctgaggagctgagcctgctgcgggcccctgagaagaaggagaagaagaagaaggagaaggagcctgaggaggagctgtatgacctgagcaaggtggtgctggccggcggcgtggccccagccctcttccggggcatgcctgcccacttcagtgacagcgcccagacagaggcctgctaccacatgctgagccggccccagcccccaccagaccccctgctgctgcagaggctgccccggcccagcagcctgagtgacaagacccagctgcacagccgctggctggacagcagccgctgcctgatgcagcagggcatcaaggctggagatgccctgtggctgcgcttcaagtactacagcttctttgacctggaccccaagacagatcctgtgcggctgacccagctgtatgagcaggcccgctgggacctgctgctggaggagattgactgctag

SEQ ID NO: 221990 - DNA, 1992 bp, Artificial Sequence
  derived and/or modified sequence
atggccggcatgaagaccgccagcggcgactacatcgacagcagctgggaactccgggtgttcgtaggcgaggaggatcccgaggccgagagcgtgactctgcgggtcaccggcgaatcccacatcggcggggtgctattgaaaattgttgaacagatcaacaggaagcaggactggagcgatcatgctatatggtgggaacagaagcgccaatggctgctacagacacactggactctagataagtatggcattctcgccgatgcccggctctttttcggtccacaacatagacccgttattctgaggctgcctaaccggcgggctctgcggctcagagctagcttttcccagcccttgttccaggccgtcgctgctatctgtcgtcttctttcaattcgccatccggaggaactgtctctgctaagagctcctgagaaaaaagaaaaaaagaagaaggagaaggagcccgaggaggagctgtatgatctatccaaggtcgttctggccgggggagtggcacccgctctgtttcggggtatgcccgcacacttttcagactctgcacagaccgaggcctgttaccacatgctgagcaggccgcagcctcctccggacccactgctgttgcagcggcttccccggccttcaagtctctccgacaaaacccagctgcattctcgatggcttgacagctctcgctgtttgatgcaacagggaattaaagccggggatgcattgtggctgaggttcaagtattactcattcttcgatctggatcctaaaactgaccccgtacggctgactcagctctacgagcaggcgcgctgggacttgttgttggaggagatcgactgtactgaggaagaaatgatggtttttgcggcactccagtatcacataaacaagcttagccaatccggcgaagtcggcgagccagccgggactgaccccggcctggacgacctagatgtggccctatcaaacctagaggtgaagttggagggctccgcgcctaccgatgtgctcgatagcctgacaactattcctgagctcaaggaccacttgaggatcttcagaccacggaagctgaccctgaaggggtatagacagcattgggtggtcttcaaagaaacaaccctgtcctactacaagtcacaggacgaggctccaggagaccctatccagcaactcaatctcaaagggtgcgaggtggtgcctgacgtgaacgtgtctggccagaagttctgtataaagctgctggtcccaagcccggaagggatgagcgagatctacctcaggtgccaggacgagcagcagtatgcccgctggatggctgggtgcaggcttgcaagcaaaggtaggaccatggctgactccagctatacttcagaggtgcaggccatcctggcatttctcagcttgcagcgcacaggaagcggaggaccaggaaaccacccacatggacccgatgccagtgccgaaggactgaatccttatggactggtcgcccctcgcttccagcggaagtttaaggctaagcagttaacacctcgcattcttgaggcccatcagaacgttgcacagttgtctctggccgaggcccagctgcgtttcatccaagcatggcagtctctgccagacttcggtatcagctacgtgatggtacgctttaaaggcagtcgtaaggatgagatcctggggatagccaacaacaggttgataagaatagacctggcagttggcgacgtggtgaaaacatggcgcttttcaaatatgagacagtggaacgtgaactgggacataagacaggtggcgatcgagtttgacgaacatattaatgtggcttttagctgcgtctccgcctcttgtagaattgtccacgaatacatcggtggatatattttcctctcaacacgagagagggcccgcggcgaggaacttgatgaggatctcttcctacagctgactggcgggcacgaggcattctag

SEQ ID NO: 221991 - DNA, 861 bp, Artificial Sequence
  derived and/or modified sequence
atggccggcatgaagaccgccagcggcgactacatcgacagcagctgggagctcagggtattcgttggcgaggaagatcccgaggccgaatctgtaacgctgagagtgacaggcgagagccacattggaggagtcttacttaaaattgtggagcagatcaatcgcaagcaggactggtcagatcatgccatatggtgggagcagaaaagacaatggcttttgcaaacacactggacgctcgacaagtacggaatccttgctgatgccaggttgttctttggtccacagcatcgacccgtgattctgagactgcctaatagacgcgctctcaggctgcgagctagcttctcgcagcccctttttcaggcggttgcagcaatctgcaggctgctgagtattcgccacccagaagagctgtcgctgttgcgggcccctgagaaaaaggaaaagaaaaaaaaagagaaagagcccgaagaagagctgtacgatctttccaaggtggtcctggctggaggggtcgccccggcactctttagggggatgccagcccacttctcagactccgcacagactgaagcttgttaccatatgctcagccggcctcaacctcccccagatcccctcctgctgcaaagactgccacgaccctcttctttaagtgataaaacacagctccacagtcgatggctggacagttcgagatgcttgatgcaacagggaatcaaggcaggggacgctctgtggcttcggtttaaatattactctttctttgatctagatccaaagacagaccctgtgcgccttactcagttatacgaacaagcccgctgggatctactcctagaggaaattgattgttag

SEQ ID NO: 221992 - DNA, 1992 bp, Artificial Sequence
  derived and/or modified sequence
atggcgggtatgaaaacagcttctggggactacattgacagttcgtgggaacttagagtgttcgtcggagaagaagaccccgaagcagagagtgtgacactgcgggttaccggggagtcgcacattggtggggtcttactgaagatcgtagagcagattaacaggaagcaggattggtcagatcacgcaatctggtgggaacagaaaagacagtggttgctgcagacacactggacactcgacaaatacgggatcctcgcagatgctcggctcttcttcgggcctcagcataggcctgtgatactgcggcttcccaatcgcagagccctgcggctgcgagccagctttagccagccactttttcaagccgtcgccgctatctgcagactcctgtctatacggcatcccgaggaactgagcctgctgagggcaccagagaagaaggagaaaaaaaagaaggaaaaagaaccagaagaggaattgtatgacctgtcaaaggttgtcctggcaggcggagtggctcccgcactctttagggggatgccggctcacttctcggatagcgctcagacagaagcatgctaccatatgcttagccgccctcaaccacccccagaccctctgttgctgcagagattgccaagaccttcttctctttctgataagacacagcttcacagcaggtggctggactcttcccggtgtctgatgcagcaaggaatcaaggctggagacgctctatggctaaggttcaagtattactcatttttcgatctcgatcctaagacagatcccgtcaggctgacccagttgtatgaacaggcgaggtgggatctgctgcttgaggagatcgattgtactgaggaagaaatgatggttttcgcagccttacaataccatattaacaagctttcacagagcggagaggtgggggagcctgctggaactgacccaggtttggacgacttagatgttgctctatccaacctagaggtgaagctcgaggggagcgccccaaccgacgttcttgacagtctgacaactatacctgaattgaaggaccatctaagaatctttaggccacgtaagctgacactgaagggctataggcagcactgggtggtttttaaagagaccacactctcttattataaatctcaggatgaggcacccggtgatccgatccagcagctcaacctcaagggatgtgaagtggtccctgacgtaaatgtgtcggggcagaagttttgcattaagctgctggtccccagtccagagggaatgtctgaaatctacctaaggtgccaggatgagcagcaatatgcacggtggatggcaggctgccggctcgcctccaaagggaggaccatggcggactcatcctacacaagtgaggtacaagccatcctcgcatttctctctttgcaaaggacagggtccggagggcctggcaaccacccccatgggccagacgcgagcgctgagggcttgaatccttacggacttgttgcaccacgcttccagagaaagtttaaagcaaaacagttgactccacgcattctcgaggcgcaccagaacgtggcccagctgagtctggctgaagcccaacttaggttcatccaagcatggcaaagtttacccgatttcggcatttcatacgtaatggtccggtttaaggggtctcggaaagatgaaatcctgggtattgctaataacaggttaatacgcattgacctggccgtcggtgatgtggttaaaacttggagattctcaaatatgcgccagtggaacgtcaactgggatataaggcaagtagccattgaatttgatgagcacataaatgtagcttttagttgtgtgtctgcatcttgtcggatcgttcatgaatatatcgggggttacatcttcttatctaccagagaaagggcaagaggcgaagaactggatgaggatctgttcctgcaactcactgggggacacgaagctttttag

SEQ ID NO: 221993 - DNA, 861 bp, Artificial Sequence
  derived and/or modified sequence
atggctggcatgaagaccgctagtggcgactatattgactcctcctgggaattgcgcgtgttcgttggggaggaggacccagaggccgagtctgtaacacttcgggtgaccggtgagagccacattggaggtgttctgctgaaaatcgtggaacagatcaacaggaagcaggattggagcgatcatgcaatttggtgggagcagaagcggcaatggctcctccagactcattggactctggacaaatacggaatcctggccgacgcccgactgtttttcggcccacagcacagacctgtaattctgcgtctccctaaccggcgtgctcttagactgagagcctctttcagtcagcctcttttccaggctgtcgcagctatttgcaggttgctttctatcagacacccggaagagttgagtctgttgagggctccggaaaaaaaagagaagaagaagaaggagaaggagcccgaggaggagctgtacgacctttccaaggtcgtcctggcgggaggtgtcgcgcctgctctgttccggggaatgcctgcacactttagtgactcagcccagactgaggcctgctatcacatgctgagtcgaccacagccacccccagacccattactgctgcagcgcctacctcgacccagcagcctgtcggacaaaacacagttgcactcccgctggttggacagcagcagatgtctcatgcagcagggaatcaaagcaggggacgcattatggctgcgttttaagtactactctttcttcgacctggacccaaagacagatcccgttcggttgactcaactctacgaacaggccaggtgggacttgttgctggaggaaatcgattgctag

SEQ ID NO: 221994 - DNA, 1992 bp, Artificial Sequence
  derived and/or modified sequence
atggccggcatgaagaccgccagcggcgactacatcgacagcagctgggagctgagagtgttcgtgggcgaggaggaccccgaggccgagagcgtgaccctgagagtgaccggcgagagccacatcggcggcgtgctgctgaagatcgtggagcagatcaacagaaagcaggactggagcgaccacgccatctggtgggagcagaagagacagtggctgctgcagacccactggaccctggacaagtacggcatcctggccgacgccagactgttcttcggcccccagcacagacccgtgatcctgagactgcccaacagaagagccctgagactgagagccagcttcagccagcccctgttccaggccgtggccgccatctgcagactgctgagcatcagacaccccgaggagctgagcctgctgagagcccccgagaagaaggagaagaagaagaaggagaaggagcccgaggaggagctgtacgacctgagcaaggtggtgctggccggcggcgtggcccccgccctgttcagaggcatgcccgcccacttcagcgacagcgcccagaccgaggcctgctaccacatgctgagcagaccccagcccccccccgaccccctgctgctgcagagactgcccagacccagcagcctgagcgacaagacccagctgcacagcagatggctggacagcagcagatgcctgatgcagcagggcatcaaggccggcgacgccctgtggctgagattcaagtactacagcttcttcgacctggaccccaagaccgaccccgtgagactgacccagctgtacgagcaggccagatgggacctgctgctggaggagatcgactgcaccgaggaggagatgatggtgttcgccgccctgcagtaccacatcaacaagctgagccagagcggcgaggtgggcgagcccgccggcaccgaccccggcctggacgacctggacgtggccctgagcaacctggaggtgaagctggagggcagcgcccccaccgacgtgctggacagcctgaccaccatccccgagctgaaggaccacctgagaatcttcagacccagaaagctgaccctgaagggctacagacagcactgggtggtgttcaaggagaccaccctgagctactacaagagccaggacgaggcccccggcgaccccatccagcagctgaacctgaagggctgcgaggtggtgcccgacgtgaacgtgagcggccagaagttctgcatcaagctgctggtgcccagccccgagggcatgagcgagatctacctgagatgccaggacgagcagcagtacgccagatggatggccggctgcagactggccagcaagggcagaaccatggccgacagcagctacaccagcgaggtgcaggccatcctggccttcctgagcctgcagagaaccggcagcggcggccccggcaaccacccccacggccccgacgccagcgccgagggcctgaacccctacggcctggtggcccccagattccagagaaagttcaaggccaagcagctgacccccagaatcctggaggcccaccagaacgtggcccagctgagcctggccgaggcccagctgagattcatccaggcctggcagagcctgcccgacttcggcatcagctacgtgatggtgagattcaagggcagcagaaaggacgagatcctgggcatcgccaacaacagactgatcagaatcgacctggccgtgggcgacgtggtgaagacctggagattcagcaacatgagacagtggaacgtgaactgggacatcagacaggtggccatcgagttcgacgagcacatcaacgtggccttcagctgcgtgagcgccagctgcagaatcgtgcacgagtacatcggcggctacatcttcctgagcaccagagagagagccagaggcgaggagctggacgaggacctgttcctgcagctgaccggcggccacgaggccttctag

SEQ ID NO: 221995 - DNA, 861 bp, Artificial Sequence
  derived and/or modified sequence
atggccggcatgaagaccgccagcggcgactacatcgacagcagctgggagctgagagtgttcgtgggcgaggaggaccccgaggccgagagcgtgaccctgagagtgaccggcgagagccacatcggcggcgtgctgctgaagatcgtggagcagatcaacagaaagcaggactggagcgaccacgccatctggtgggagcagaagagacagtggctgctgcagacccactggaccctggacaagtacggcatcctggccgacgccagactgttcttcggcccccagcacagacccgtgatcctgagactgcccaacagaagagccctgagactgagagccagcttcagccagcccctgttccaggccgtggccgccatctgcagactgctgagcatcagacaccccgaggagctgagcctgctgagagcccccgagaagaaggagaagaagaagaaggagaaggagcccgaggaggagctgtacgacctgagcaaggtggtgctggccggcggcgtggcccccgccctgttcagaggcatgcccgcccacttcagcgacagcgcccagaccgaggcctgctaccacatgctgagcagaccccagcccccccccgaccccctgctgctgcagagactgcccagacccagcagcctgagcgacaagacccagctgcacagcagatggctggacagcagcagatgcctgatgcagcagggcatcaaggccggcgacgccctgtggctgagattcaagtactacagcttcttcgacctggaccccaagaccgaccccgtgagactgacccagctgtacgagcaggccagatgggacctgctgctggaggagatcgactgctag

SEQ ID NO: 221996 - protein, 281 aa, Artificial Sequence
  derived and/or modified sequence
MLFIFPLSLPWRPSCWKESCSTGQRQAGRSREDSVTPPPSSPWPTPPAGAMSTKQEARRDEGEARTRGQEAQLRDRAHLSQQRRLKQATQFLHKDSADLLPLDSLKRLGTSKDLQPRSVIQRRLVEGNPNWLQGEPPRMQDLIHGQESRRKTSRTEIPALLVNCKCQDQLLRVAVDTGTQYNRISAGCLSRLGLEKRVLKASAGDLAPGPPTQVEQLELQLGQETVVCSAQVVDAESPEFCLGLQTLLSLKCCIDLEHGVLRLKAPFSELPFLPLYQEPGQ

SEQ ID NO: 221997 - protein, 270 aa, Artificial Sequence
  derived and/or modified sequence
MLFIFPLSLPWRPSCWKESCSTGQRQAGRSREDSVTPPPSSPWPTPPAGAMSTKQEARRDEGEARTRGQEAQLRDRAHLSLHKDSADLLPLDSLKRLGTSKDLQPRSVIQRRLVEGNPNWLQGEPPRMQDLIHGQESRRKTSRTEIPALLVNCKCQDQLLRVAVDTGTQYNRISAGCLSRLGLEKRVLKASAGDLAPGPPTQVEQLELQLGQETVVCSAQVVDAESPEFCLGLQTLLSLKCCIDLEHGVLRLKAPFSELPFLPLYQEPGQ

SEQ ID NO: 221998 - DNA, 846 bp, Artificial Sequence
  derived and/or modified sequence
atgctgttcatcttccccctgagcctgccctggagacccagctgctggaaggagagctgcagcaccggccagagacaggccggcagaagcagagaggacagcgtgacccccccccccagcagcccctggcccaccccccccgccggcgccatgagcaccaagcaggaggccagaagagacgagggcgaggccagaaccagaggccaggaggcccagctgagagacagagcccacctgagccagcagagaagactgaagcaggccacccagttcctgcacaaggacagcgccgacctgctgcccctggacagcctgaagagactgggcaccagcaaggacctgcagcccagaagcgtgatccagagaagactggtggagggcaaccccaactggctgcagggcgagccccccagaatgcaggacctgatccacggccaggagagcagaagaaagaccagcagaaccgagatccccgccctgctggtgaactgcaagtgccaggaccagctgctgagagtggccgtggacaccggcacccagtacaacagaatcagcgccggctgcctgagcagactgggcctggagaagagagtgctgaaggccagcgccggcgacctggcccccggcccccccacccaggtggagcagctggagctgcagctgggccaggagaccgtggtgtgcagcgcccaggtggtggacgccgagagccccgagttctgcctgggcctgcagaccctgctgagcctgaagtgctgcatcgacctggagcacggcgtgctgagactgaaggcccccttcagcgagctgcccttcctgcccctgtaccaggagcccggccagtag

SEQ ID NO: 221999 - DNA, 2746 bp, Artificial Sequence
  derived and/or modified sequence
agcaatctcgggaaattggagactgacgcggctgctcctgcatgttatttatttttcctctttccctcccgtggagaccctcctgttggaaagagagctgcagcacgggacagagacaggcaggaagaagcagagaggactcggtgacgcccccaccgagcagcccctggcccactcctccagcaggggccatgagcaccaagcaggaggccaggagagatgagggagaagccaggacgagggggcaggaggcacagcttcgagaccgagcccacctgagccagcagcgccggctcaaacaggccacccagttcctgcacaaggactcggccgacctgctcccgctggacagcctcaagaggctcggcacctccaaggacttgcagccgcgcagtgtgatccaaagacgcctggtggagggaaacccgaattggcttcagggggagcctccccggatgcaggacctgattcatggccaggagagcaggaggaagaccagcaggacagagattccagctcttctggtcaactgcaagtgccaggaccagctgcttagagtggccgttgacacaggcacccaatacaatcggatctctgctggatgtctcagccgcctggggttagagaaaagggtcctaaaagcctcagctggggacctggcccctgggcccccaacccaggtggagcagttggagctacagctggggcaggagactgtggtgtgctcggcacaggtggtggatgctgagagtcctgaattctgcctgggcctgcagactctgctttctctcaagtgctgcatcgacctggagcacggagtgctgcggctgaaagccccgttctcagagctacccttcctgcctttgtaccaagagcctggccagtgactgctgtctcagtcagtccccagagggaaagaccttgccttagaagaagaggcgtgtggggaacgggggctcttgaagccaggtagctggggactatggtgtctgcccttccaatcacctccctgacccctgctgtcccattttccccagctggccgcattcctctctgcttctcagcagctgtcctactccccaggacgagttttcactagagggcccacgatgccaggattctgattcatcttcctcccaagaaaagcaaagccaaatcaagaccacagataggaacctaagcacaatggggtgcctgcttgggctgggtcgaaggctctgctgactgctgtccttgtccatcacccaataccaccccaaacacaactcaacttcccacaccaccatgtctctcaccacaccttctgggcctcattatctcccacaactagaccgccatgcctcaccaacctatgtccctggacctcctggtgtctgcctctcggagtctgtgcacatctgctcacagttgagtgggggaagaaacagccagaattcaatacaacaaagagcgggagttagtataggaatgtccatctcataaggctgagagctattttttcctgtggctgcaaatgtctgaagccagttagtttgattaccctgtgcaaaaccttggacatacttctgctattaacgctataggtatttatccgtttccactggctttttgtacccaccgagcccctgagccttgcgtgtgtgtgtgtggaagagccttgtagagaactgctcctgtgaggcagacaggacagtgaggttgtcaccactcagacttcacctattcagcattctttctgatttctagaactatccacctcattaggccttcttcctatccccatctctggcctcttgagcttaagcttgtattgtcctggaatcagtggctttctaaccccctgccaggctttgccaaagcaaaaagacagaggctttttttttttttttaaagtttggggtctgtcaggagacagaggcttttttgaattcactgtgaagagaagaacccgaaccttaagacgccagatccctgagagtctttctggctggtttgagtctctcaaatcatggattaggagtaaagaaagaggccaggcgcaatggctcatgcctgtaatcccagcactttgggaggctgaggtgggtggatcacttgaggtcaggagtttgagaccagcctgggtaatatggcaaaaccccatctctactaaaaaatacaaaaattagccaggtatggtggtgaacacctgtaatcccagctacttggaaggctgaggcataggagttgcttgaacctgggagatgggggttgtagtgagccaagttcgtgccatcggactccagcctgggtgaaggagtgagaccctgtctccaaaaacaaacaaaaaaggagcagagaaagacagtggtacagctaacctgaacaagggaactgggaccgttgggctgaaacagtcttgagcctggggttgactgggttagagaagaaccgggatgcaaggagctgcctgtgacacctggcctgccctttctcagctgcctcccctgccctttctcagctgcctcccctgccctcagaaggaaaggagagggctcacttatcacttgtgccatagcacctggtctcaaaatcctaaaagctttcctcgccctcactgccttgctccacaaggtccactttcctgggtcttgtgctgtgcctttccttgtctgcctcctgctgcttctgtaactgcagaccccaggcccaatggcaagccctcggctcagctgcttctccattggaataaactcttgtttctcta

SEQ ID NO: 222000 - DNA, 813 bp, Artificial Sequence
  derived and/or modified sequence
atgctgttcatcttccccctgagcctgccctggagacccagctgctggaaggagagctgcagcaccggccagagacaggccggcagaagcagagaggacagcgtgacccccccccccagcagcccctggcccaccccccccgccggcgccatgagcaccaagcaggaggccagaagagacgagggcgaggccagaaccagaggccaggaggcccagctgagagacagagcccacctgagcctgcacaaggacagcgccgacctgctgcccctggacagcctgaagagactgggcaccagcaaggacctgcagcccagaagcgtgatccagagaagactggtggagggcaaccccaactggctgcagggcgagccccccagaatgcaggacctgatccacggccaggagagcagaagaaagaccagcagaaccgagatccccgccctgctggtgaactgcaagtgccaggaccagctgctgagagtggccgtggacaccggcacccagtacaacagaatcagcgccggctgcctgagcagactgggcctggagaagagagtgctgaaggccagcgccggcgacctggcccccggcccccccacccaggtggagcagctggagctgcagctgggccaggagaccgtggtgtgcagcgcccaggtggtggacgccgagagccccgagttctgcctgggcctgcagaccctgctgagcctgaagtgctgcatcgacctggagcacggcgtgctgagactgaaggcccccttcagcgagctgcccttcctgcccctgtaccaggagcccggccagtag

SEQ ID NO: 222001 - DNA, 846 bp, Artificial Sequence
  derived and/or modified sequence
atgctgtttatctttccccttagcctgccatggcgcccatcatgctggaaggagtcttgctctacagggcagcgtcaggctggtaggtcacgagaggactcagtgaccccacctccaagctccccatggcccacccccccagccggtgcaatgagcacaaaacaggaggcacgcagagatgaaggtgaggcccggaccagaggacaggaagcccaattacgggacagagcgcacctgtcgcagcagcgccggttgaagcaagccacacagtttctgcacaaagatagcgccgacctgcttcccctggacagcctgaaacgtctggggacctccaaggatctgcagccccgatcggttatccaacggcgacttgtggagggcaacccaaattggctgcagggagagccaccaaggatgcaggacctcatccacggacaggagtccagaagaaaaacctctagaaccgagataccagcgctcctggtcaattgcaagtgtcaagaccagttgctgagggtagccgtggataccgggactcagtacaaccgtatctctgccggctgcctctctaggctgggcctcgaaaagagagtcttgaaggcgtccgcaggggatctggctcctgggcccccgacacaggtggaacagttggaacttcagctgggccaggaaacagtggtttgctctgcccaggttgttgacgctgagtcccctgagttctgcctggggcttcagacgctcctgtccttaaaatgctgcatcgacttggagcatggagtgctcagactcaaagccccattctccgaactgccctttttgcccctgtaccaggaacctggccagtag

SEQ ID NO: 222002 - DNA, 813 bp, Artificial Sequence
  derived and/or modified sequence
atgctgtttatcttcccactgagcctgccttggaggccatcttgctggaaggaatcatgctcgacggggcaaagacaggctggtcgttcgagagaggactcggtgacccctccccctagcagtccttggcctaccccaccagccggcgccatgagtacaaagcaagaggcccgcagggacgagggtgaggcccggaccagggggcaagaggcgcagcttcgtgatcgcgcgcacttgtctctccacaaggactccgctgatctcttgccactggactccctcaaacgcctcggtaccagcaaggatctgcagcccaggtctgtgattcagagacgcttggtagagggaaatcctaactggctgcagggggagcctccacgcatgcaggacctgattcacggacaggaatcccggcgcaagaccagccgcactgaaattcccgcattgttagtcaactgtaagtgccaggaccaactgctgcgggtcgcggtggatactggcacgcagtataacaggatcagcgcggggtgtctctcaagactggggctggaaaaaagggtcctgaaagcgagcgccggagacctggcccccgggccacctactcaggttgaacaacttgagctccagctcgggcaagagacagtagtatgcagcgcccaggtggtggatgcagaatccccggagttttgcctcggcctgcaaactctgctgagcctcaaatgttgcatagaccttgaacatggggttctgaggctcaaggcccctttttctgaactaccttttctgcccctgtaccaggagccaggacaatag

SEQ ID NO: 222003 - DNA, 846 bp, Artificial Sequence
  derived and/or modified sequence
atgctgttcatcttccccctgagcctgccctggaggcccagctgctggaaggagagctgcagcacaggccagaggcaggccggccgcagccgggaggacagcgtgaccccaccacccagcagcccctggcccaccccacctgctggggccatgagcaccaagcaggaggccaggagagatgaaggagaggcccggacccggggccaggaggcccagctgcgggaccgggcccacctgagccagcagaggcggctgaagcaggccacccagttcctgcacaaggacagcgctgacctgctgcccctggacagcctgaagaggctgggcaccagcaaggacctgcagcccaggagcgtcatccagaggcggctggtggagggcaaccccaactggctgcagggcgagccccccaggatgcaggacctgatccacggccaggagagcaggaggaagaccagcaggacagagatcccagccctgctggtgaactgcaagtgccaggaccagctgctgcgggtggccgtggacaccggcacccagtacaaccgcatctctgctggctgcctgagccggctgggcctggagaagagggtgctgaaggccagcgctggggacctggcccctggcccccccacccaggtggagcagctggagctgcagctgggccaggagaccgtggtgtgcagcgcccaggtggtggatgctgagagccctgagttctgcctgggcctgcagaccctgctgagcctgaagtgctgcatcgacctggagcacggcgtgctgcggctgaaggcccccttcagcgagctgcccttcctgcccctgtaccaggagcccggccagtag

SEQ ID NO: 222004 - DNA, 813 bp, Artificial Sequence
  derived and/or modified sequence
atgctgttcatcttccccctgagcctgccctggaggcccagctgctggaaggagagctgcagcacaggccagaggcaggccggccgcagccgggaggacagcgtgaccccaccacccagcagcccctggcccaccccacctgctggggccatgagcaccaagcaggaggccaggagagatgaaggagaggcccggacccggggccaggaggcccagctgcgggaccgggcccacctgagcctgcacaaggacagcgctgacctgctgcccctggacagcctgaagaggctgggcaccagcaaggacctgcagcccaggagcgtcatccagaggcggctggtggagggcaaccccaactggctgcagggcgagccccccaggatgcaggacctgattcatggccaggagagcaggaggaagaccagcaggacagagatcccagccctgctggtgaactgcaagtgccaggaccagctgctgcgggtggccgtggacaccggcacccagtacaaccgcatctctgctggctgcctgagccggctgggcctggagaagagggtgctgaaggccagcgctggggacctggcccctggcccccccacccaggtggagcagctggagctgcagctgggccaggagaccgtggtgtgcagcgcccaggtggtggatgctgagagccctgagttctgcctgggcctgcagaccctgctgagcctgaagtgctgcatcgacctggagcacggcgtgctgcggctgaaggcccccttcagcgagctgcccttcctgcccctgtaccaggagcccggccagtag

SEQ ID NO: 222005 - DNA, 846 bp, Artificial Sequence
  derived and/or modified sequence
atgctgttcatcttccccctgagcctgccctggcggcccagctgctggaaggagtcttgctcgacaggccagagacaggcaggcaggtcaagagaggacagtgttacgccacctccatctagtccctggcctaccccaccagcaggagcgatgtccacgaaacaggaggcccgtagggatgaaggtgaggcccgcacacggggccaagaggcccagcttcgcgatagggcccacttgtcccaacagcgaaggttgaaacaggcgacacagtttctgcacaaggactcagcggacctactcccccttgattctctgaagagacttggtaccagcaaggatttacagccccggtctgttatccagaggagactagtagagggtaatccgaattggctacagggggagcccccaaggatgcaagatctgattcacggccaggaaagccgtagaaagaccagtaggactgagatccctgcacttttagtgaattgtaagtgccaagatcaattgctccgagtcgcagtcgatacgggtacacagtacaatcgcataagcgccggctgtttaagcagactgggattagagaagagggtgctgaaagcgtcagcaggagatctggctccaggcccccctacgcaggtcgagcagctggaactccagttagggcaggaaaccgtggtgtgcagtgcacaggtagtcgatgcggagtcccccgagttctgcctcgggctgcagacactgttgagtttaaaatgctgcatcgatttggaacacggcgtgttgcgactgaaagctcctttttccgagctgccatttctacccttgtaccaggagcctggacagtag

SEQ ID NO: 222006 - DNA, 813 bp, Artificial Sequence
  derived and/or modified sequence
atgctgttcatcttccccctgagcctgccctggcggcccagctgctggaaggaaagctgttcaacggggcaacgccaggccggccgatcaagggaggattcagtgaccccacctcctagcagtccttggccaacgccccccgccggcgccatgtccacgaagcaggaggcccgcagagatgaaggcgaagcacggaccagggggcaggaggctcagttgagagacagagcccatctctccctgcacaaggacagtgccgacttgctcccactcgactctttgaaaaggctaggtacttctaaggatctccagccccggtcagtgatccagaggagacttgtagagggtaatcccaattggctgcagggggagcctccgcggatgcaggacctcattcatgggcaagaatcccgccggaagacaagtcgaacagagatcccagctctgttagttaattgcaagtgccaagatcagttgttacgggtggccgtcgataccggaactcagtacaataggatatctgcgggatgtctgtcccgacttgggctcgagaagcgggtgctgaaggcaagcgccggggacctggccccagggcctccaactcaggtggaacagctggagctacagctgggtcaggagacagttgtgtgtagcgctcaggttgttgacgctgaaagtcctgagttttgtttaggactgcagaccctcctctccctgaagtgttgcattgatctagagcacggagtcttaaggctcaaggctccgttttctgaacttcccttcctccctctataccaggagccaggccagtag

SEQ ID NO: 222007 - DNA, 846 bp, Artificial Sequence
  derived and/or modified sequence
atgctctttatcttccccctttcgctgccatggcggccttcatgttggaaggaatcatgctcaacaggccagaggcaggcaggacggtcgcgagaagactctgttacccccccacctagctccccgtggcctacgccacctgctggagccatgtccacaaaacaggaggccaggcgggatgaaggcgaggccagaacacggggacaagaagcccagctcagggatcgcgcacacctgtcccagcagcggagactcaaacaggctacacagttcttgcataaggacagcgcggatctcctgcccctcgactctctcaagcggctgggcacgtctaaagacctacagccacgatccgtaatccagcggagactggtggaaggtaaccctaactggttacagggcgaacctccacgcatgcaagatctgatacatggacaggagagccgaagaaagacatcccggactgaaatccccgcactcctggtgaactgtaagtgccaagaccaacttttgcgcgtcgctgtcgacaccggaacacaatacaataggatttctgcgggatgcttgtccagactagggctagaaaagcgggttcttaaggcctcagctggggacttagcgcctggcccaccaacgcaagtggagcaacttgagctgcagctgggacaagaaacagtggtttgcagtgcccaggtggtggacgccgagtcgccagagttttgcctaggtctgcaaacactgctgagcctgaagtgctgcatcgatctggagcacggagtcttacgactcaaagccccattctccgaattgccatttctgcctctgtaccaggagcctggccaatag

SEQ ID NO: 222008 - DNA, 813 bp, Artificial Sequence
  derived and/or modified sequence
atgctgtttatatttcccctatcccttccctggcgaccatcttgctggaaggagagctgttcgaccgggcaacgtcaggccggacgatcccgcgaagacagcgttaccccgccacccagcagcccctggcccactcctccagccggtgccatgtctacgaagcaggaagcccgtcgcgatgagggcgaggcaaggacccgtggacaggaggctcagctgcgcgatagagctcacctgtcactacataaggactcagcggatctgctgccactggatagtctcaaacgcttgggaaccagtaaggacttacagccccgaagtgttattcagagacgcctggtcgaggggaacccaaactggctccaaggcgagccccctcgcatgcaggatctgatacatggccaggagagcagaaggaagacatctcggaccgagatccccgctctgttagtaaattgcaagtgtcaggaccaacttttaagggtggccgtagacactggcacgcagtataatcgtatctccgccggatgtctaagccgcttgggcttggagaaaagagttctgaaggctagcgccggtgacttagccccaggccctcctacacaggtggagcagttggagcttcagctaggccaagaaaccgtagtctgctccgcccaggtggtggatgcagagtcccccgagttttgtctgggcctacaaacactcctctccttaaaatgttgcatcgacctggaacatggggttctcaggctcaaggcacccttctcagagttgccctttctgcctctgtaccaggagcctggccaatag

SEQ ID NO: 222009 - DNA, 2671 bp, Artificial Sequence
  derived and/or modified sequence
atgttatttatttttcctctttccctcccgtggagaccctcctgttggaaagagagctgcagcacgggacagagacaggcaggaagaagcagagaggactcggtgacgcccccaccgagcagcccctggcccactcctccagcaggggccatgagcaccaagcaggaggccaggagagatgagggagaagccaggacgagggggcaggaggcacagcttcgagaccgagcccacctgagcctgcacaaggactcggccgacctgctcccgctggacagcctcaagaggctcggcacctccaaggacttgcagccgcgcagtgtgatccaaagacgcctggtggagggaaacccgaattggcttcagggggagcctccccggatgcaggacctgattcatggccaggagagcaggaggaagaccagcaggacagagattccagctcttctggtcaactgcaagtgccaggaccagctgcttagagtggccgttgacacaggcacccaatacaatcggatctctgctggatgtctcagccgcctggggttagagaaaagggtcctaaaagcctcagctggggacctggcccctgggcccccaacccaggtggagcagttggagctacagctggggcaggagactgtggtgtgctcggcacaggtggtggatgctgagagtcctgaattctgcctgggcctgcagactctgctttctctcaagtgctgcatcgacctggagcacggagtgctgcggctgaaagccccgttctcagagctacccttcctgcctttgtaccaagagcctggccagtgactgctgtctcagtcagtccccagagggaaagaccttgccttagaagaagaggcgtgtggggaacgggggctcttgaagccaggtagctggggactatggtgtctgcccttccaatcacctccctgacccctgctgtcccattttccccagctggccgcattcctctctgcttctcagcagctgtcctactccccaggacgagttttcactagagggcccacgatgccaggattctgattcatcttcctcccaagaaaagcaaagccaaatcaagaccacagataggaacctaagcacaatggggtgcctgcttgggctgggtcgaaggctctgctgactgctgtccttgtccatcacccaataccaccccaaacacaactcaacttcccacaccaccatgtctctcaccacaccttctgggcctcattatctcccacaactagaccgccatgcctcaccaacctatgtccctggacctcctggtgtctgcctctcggagtctgtgcacatctgctcacagttgagtgggggaagaaacagccagaattcaatacaacaaagagcgggagttagtataggaatgtccatctcataaggctgagagctattttttcctgtggctgcaaatgtctgaagccagttagtttgattaccctgtgcaaaaccttggacatacttctgctattaacgctataggtatttatccgtttccactggctttttgtacccaccgagcccctgagccttgcgtgtgtgtgtgtggaagagccttgtagagaactgctcctgtgaggcagacaggacagtgaggttgtcaccactcagacttcacctattcagcattctttctgatttctagaactatccacctcattaggccttcttcctatccccatctctggcctcttgagcttaagcttgtattgtcctggaatcagtggctttctaaccccctgccaggctttgccaaagcaaaaagacagaggctttttttttttttttaaagtttggggtctgtcaggagacagaggcttttttgaattcactgtgaagagaagaacccgaaccttaagacgccagatccctgagagtctttctggctggtttgagtctctcaaatcatggattaggagtaaagaaagaggccaggcgcaatggctcatgcctgtaatcccagcactttgggaggctgaggtgggtggatcacttgaggtcaggagtttgagaccagcctgggtaatatggcaaaaccccatctctactaaaaaatacaaaaattagccaggtatggtggtgaacacctgtaatcccagctacttggaaggctgaggcataggagttgcttgaacctgggagatgggggttgtagtgagccaagttcgtgccatcggactccagcctgggtgaaggagtgagaccctgtctccaaaaacaaacaaaaaaggagcagagaaagacagtggtacagctaacctgaacaagggaactgggaccgttgggctgaaacagtcttgagcctggggttgactgggttagagaagaaccgggatgcaaggagctgcctgtgacacctggcctgccctttctcagctgcctcccctgccctttctcagctgcctcccctgccctcagaaggaaaggagagggctcacttatcacttgtgccatagcacctggtctcaaaatcctaaaagctttcctcgccctcactgccttgctccacaaggtccactttcctgggtcttgtgctgtgcctttccttgtctgcctcctgctgcttctgtaactgcagaccccaggcccaatggcaagccctcggctcagctgcttctccattggaataaactcttgtttctct

SEQ ID NO: 222010 - protein, 497 aa, Artificial Sequence
  derived and/or modified sequence
MSCVLGGVIPLGLLFLVCGSQGYLLPNVTLLEELLSKYQHNESHSRVRRAIPREDKEEILMLHNKLRGQVQPQASNMEYMTWDDELEKSAAAWASQCIWEHGPTSLLVSIGQNLGAHWGRYRSPGFHVQSWYDEVKDYTYPYPSECNPWCPERCSGPMCTHYTQIVWATTNKIGCAVNTCRKMTVWGEVWENAVYFVCNYSPKGNWIGEAPYKNGRPCSECPPSYGGSCRNNLCYREETYTPKPETDEMNEVETAPIPEENHVWLQPRVMRPTKPKKTSAVNYMTQVVRCDTKMKDRCKGSTCNRYQCPAGCLNHKAKIFGTLFYESSSSICRAAIHYGILDDKGGLVDITRNGKVPFFVKSERHGVQSLSKYKPSSSFMVSKVKVQDLDCYTTVAQLCPFEKPATHCPRIHCPAHCKDEPSYWAPVFGTNIYADTSSICKTAVHAGVISNESGGDVDVMPVDKKKTYVGSLRNGVQSESLGTPRDGKAFRIFAVRQ

SEQ ID NO: 222011 - DNA, 1494 bp, Artificial Sequence
  derived and/or modified sequence
atgtcctgcgtcctggggggggttatccctcttggcctcctttttctggtctgtggaagccagggctacctcctcccaaacgtgactctcctcgaagaactgctgagcaaataccagcacaatgaatcgcattccagagtgcggcgcgcaatccccagggaagataaggaagagatccttatgttgcataacaagctcaggggacaggtgcagccccaggcctccaacatggaatacatgacttgggacgatgaattagagaagagcgcagcggcttgggcatcccagtgtatctgggagcacggacccacaagcctcctggtgagcattgggcagaatctgggagcccattggggaaggtaccggagccccggtttccatgtgcagagttggtatgacgaagtgaaggactacacttacccatatccttcggagtgtaatccatggtgtcccgagaggtgcagcgggcccatgtgcacccattacacgcagatcgtgtgggctacaaccaacaagataggctgtgccgtgaatacttgcaggaaaatgaccgtctggggggaggtgtgggagaacgctgtctatttcgtgtgcaactatagccccaaggggaactggatcggcgaagccccctacaagaatggccgcccttgcagtgaatgccctccatcctacgggggatcttgcagaaacaatctctgctacagagaagagacctatacccctaagccagaaacagatgaaatgaacgaagtcgagaccgcccctattcctgaagagaaccacgtgtggctccagcccagagtgatgcgccctacaaagccaaaaaaaacttccgccgtgaactacatgacccaagtggttaggtgcgatacaaaaatgaaggaccgctgtaagggctctacctgtaacaggtatcagtgccccgctggctgcctgaatcacaaagcgaagatatttgggacccttttctacgagtcctcaagttcgatctgcagggccgccattcattatggaatccttgacgacaaaggaggtctggttgacatcacaagaaacggaaaggtgcctttttttgttaagtcagagagacacggagtccaatctctgtctaaatacaagccctctagttcctttatggtgtcgaaggtgaaagtgcaggaccttgactgttataccaccgtggctcagctgtgtcccttcgaaaagcccgccacccactgcccaaggattcactgcccggcccattgcaaggatgagccaagttactgggccccagtgtttggtacgaatatctacgccgatacttccagcatatgcaaaactgcggtacatgcaggcgtgataagcaacgagtccgggggcgacgtcgacgtgatgcctgtcgataagaagaagacttacgtcggctctctgcgcaacggagttcagagtgaaagcttgggaactccgagggacggaaaagcattcagaatttttgccgtgaggcagtag

SEQ ID NO: 222012 - DNA, 1494 bp, Artificial Sequence
  derived and/or modified sequence
atgagctgtgtgctgggcggcgtcatccccctgggcctgctcttcctggtgtgtggcagccagggctacctgctgcccaacgtgaccctgctggaggagctgctgagcaagtaccagcacaatgaaagccacagccgggtgcggcgggccatcccccgggaggacaaggaggagatcctgatgctgcacaacaagctgcggggccaggtgcagccccaggccagcaacatggagtacatgacctgggatgatgagctggagaagtctgctgctgcctgggccagccagtgcatctgggagcacggccccaccagcctgctggtgtccatcggccagaacctgggcgcccactggggccgctaccgcagccctggcttccacgtgcagagctggtatgatgaggtgaaggactacacctacccctaccccagcgagtgcaacccctggtgcccagagcgctgcagcggccccatgtgcacccactacacccagatcgtgtgggccaccaccaacaagattggctgtgctgtgaacacctgcaggaagatgacagtgtggggcgaggtgtgggagaatgctgtgtactttgtgtgcaactacagccccaagggcaactggattggagaggccccctacaagaatggccggccctgcagcgagtgcccccccagctatggaggcagctgcaggaacaacctgtgctaccgggaggagacctacacccccaagccagagacagatgagatgaatgaggtggagacagcccccatccctgaggagaaccacgtgtggctgcagccccgggtgatgaggcccaccaagcccaagaagaccagcgctgtgaactacatgacccaggtggtgcgctgtgacaccaagatgaaggaccgctgcaagggcagcacctgcaaccgctaccagtgcccagctggctgcctgaaccacaaggccaagatcttcggcaccctcttctatgagagcagcagcagcatctgccgggccgccatccactacggcatcctggatgacaagggcggcctggtggacatcaccagaaatggcaaggtgcccttctttgtgaagtcagaaagacatggagtgcagagcctgagcaagtacaagcccagcagcagcttcatggtgtccaaggtgaaggtgcaggacctggactgctacaccaccgtggcccagctgtgcccctttgagaagccagccacccactgcccccgcatccactgcccagcccactgcaaggatgagcccagctactgggcccctgtgtttggcaccaacatctatgctgacaccagcagcatctgcaagacagctgtgcacgccggggtcatcagcaatgaaagtggaggagatgtggatgtgatgcctgtggacaagaagaagacctacgtgggcagcctgagaaatggagtgcagagcgagagcctgggcaccccaagagatggcaaggccttccgcatctttgctgtgcggcagtag

SEQ ID NO: 222013 - DNA, 1494 bp, Artificial Sequence
  derived and/or modified sequence
atgagctgcgtgctgggcggcgtgatccccctgggcctgctgttcctggtgtgtggctctcaagggtatcttcttcctaacgtgacccttctggaagagcttttaagcaaatatcaacataacgaatctcattctagggtcaggagagccattccgagggaggataaagaagagattctaatgcttcacaacaaactgaggggtcaggtacaacctcaggcttctaacatggagtacatgacttgggacgacgaactggagaaaagtgccgcagcctgggctagccagtgtatctgggagcatgggccaacctcattgctggtgagcattggccagaatctcggggcccactgggggcgctaccgaagccccggctttcacgtgcagtcttggtacgacgaagtgaaggattatacatacccatatcccagtgagtgcaatccatggtgccctgaacgatgcagcggacccatgtgtactcattacactcagatcgtttgggctacaacaaacaagatagggtgcgccgttaacacttgtagaaaaatgacagtatggggcgaggtatgggagaatgcagtttattttgtgtgcaactacagtcctaaagggaactggatcggggaggccccatacaaaaatggccgaccatgtagtgagtgtccaccatcatacggcgggtcttgtaggaacaacttatgttacagagaggaaacgtacacccccaaacctgagacggacgagatgaacgaagttgaaacggcaccaattcccgaggagaaccacgtctggctgcagcctagagttatgcgcccaaccaaacccaagaagaccagtgctgtgaattacatgactcaagtggtacgctgtgacacaaaaatgaaagatcgatgtaaaggctccacatgcaacaggtatcagtgccccgcaggctgtctgaaccataaggcaaagatcttcggcactctattctatgagtcttcctcatcaatctgtagggctgccattcactatggtatcctggacgacaagggcgggctggtggatatcactaggaatggaaaagtcccattctttgtgaaaagcgagagacacggagtgcagtcactctctaaatataagcccagtagtagctttatggtgagcaaggttaaagtccaggacctggactgctataccactgtggcccagctgtgtccctttgagaaacctgctacccactgccctaggatccattgcccggcgcattgcaaagatgagcccagttattgggctcctgtatttggaaccaacatttacgccgatacaagtagcatatgcaagaccgccgtgcacgctggtgtcatttcaaacgagtccggtggagacgtcgacgtcatgcctgtggataaaaaaaagacatacgttggctctctacggaacggagtgcaaagcgagtcactcggaaccccgcgggacggtaaagcattccgcattttcgccgtcagacaatag

SEQ ID NO: 222014 - DNA, 1494 bp, Artificial Sequence
  derived and/or modified sequence
atgtcctgtgttttaggaggggtcatcccactggggctgcttttcttggtatgcggaagtcaggggtatttgcttccgaacgtgactctgctcgaggaattactcagtaaataccagcacaatgaaagtcattcaagggtccgacgcgctattccacgggaagacaaagaggagattttaatgctgcataacaagctgagaggtcaagttcagcctcaggcttctaacatggagtacatgacctgggacgatgagctggaaaagtccgccgcagcatgggcatcccagtgcatttgggagcacgggccaacaagcctgctagtgagcataggccagaatctcggcgcacactgggggagatatcggtctcccggattccacgtgcaaagttggtacgatgaggttaaggattatacttacccctacccttcagagtgcaatccttggtgcccagaacgatgctcggggccaatgtgcacccactatacgcaaatagtatgggccactaccaataaaataggatgcgctgtgaacacttgcaggaaaatgactgtgtggggagaagtctgggaaaacgctgtctacttcgtgtgcaactattcacccaagggaaactggattggcgaagctccctacaaaaacgggaggccttgttcggagtgccctccctcctacgggggttcttgccgtaacaacctgtgctatagggaagagacatacacacccaagcccgagaccgacgagatgaacgaagtggagaccgcgcctatccccgaagagaatcacgtctggctgcagcccagagtgatgcgccctactaagccgaaaaagaccagcgccgtgaactacatgacgcaggtggtaagatgtgacaccaagatgaaggaccgatgtaaggggagtacttgcaaccgctatcagtgccctgcgggatgtctgaatcataaggccaaaatctttggaaccctcttttacgagtctagttcaagcatttgtcgggcagcgattcactacgggattctggacgataagggtgggctggtggacatcacaaggaatgggaaagtgccattctttgtcaaaagcgagagacacggcgtccagtctttgtctaagtataaacctagttctagctttatggtcagcaaagtgaaagtccaggacctcgattgttataccaccgtggcccagctctgcccttttgagaagccggctactcactgtccgcgtattcactgtccggctcattgtaaggacgaaccctcatattgggccccagtatttggaaccaacatctacgccgacacaagcagtatttgtaaaactgctgtccacgccggtgtaatctcgaacgaatccggtggagacgtggacgttatgcccgttgataagaagaagacatacgtggggagcctcaggaatggagtccagtccgaatctctgggcactccacgggatggcaaagctttccggatcttcgccgtgaggcagtag

SEQ ID NO: 222015 - DNA, 4637 bp, Artificial Sequence
  derived and/or modified sequence
ggcctccgggctccggggagcctacaagaggcggtacgctgagccccggcacccactcgcatcccagggcgtctccggctgctcctattgagctgtctgctcgctgtgcccgctgtgcctgctgtgcccgcgctgtcgccgctgctaccgcgtctgctggacgcgggagacgccagcgagctggtgattggagccctgcggagagctcaagcgcccagctctgcccgaggagcccaggctgccccgtgagtcccatagttgctgcaggagtggagccatgagctgcgtcctgggtggtgtcatccccttggggctgctgttcctggtctgcggatcccaaggctacctcctgcccaacgtcactctcttagaggagctgctcagcaaataccagcacaacgagtctcactcccgggtccgcagagccatccccagggaggacaaggaggagatcctcatgctgcacaacaagcttcggggccaggtgcagcctcaggcctccaacatggagtacatgacctgggatgacgaactggagaagtctgctgcagcgtgggccagtcagtgcatctgggagcacgggcccaccagtctgctggtgtccatcgggcagaacctgggcgctcactggggcaggtatcgctctccggggttccatgtgcagtcctggtatgacgaggtgaaggactacacctacccctacccgagcgagtgcaacccctggtgtccagagaggtgctcggggcccatgtgcacgcactacacacagatagtttgggccaccaccaacaagatcggttgtgctgtgaacacctgccggaagatgactgtctggggagaagtttgggagaacgcggtctactttgtctgcaattattctccaaaggggaactggattggagaagccccctacaagaatggccggccctgctctgagtgcccacccagctatggaggcagctgcaggaacaacttgtgttaccgagaagaaacctacactccaaaacctgaaacggacgagatgaatgaggtggaaacggctcccattcctgaagaaaaccatgtttggctccaaccgagggtgatgagacccaccaagcccaagaaaacctctgcggtcaactacatgacccaagtcgtcagatgtgacaccaagatgaaggacaggtgcaaagggtccacgtgtaacaggtaccagtgcccagcaggctgcctgaaccacaaggcgaagatctttggaactctgttctatgaaagctcgtctagcatatgccgcgccgccatccactacgggatcctggatgacaagggaggcctggtggatatcaccaggaacgggaaggtccccttcttcgtgaagtctgagagacacggcgtgcagtccctcagcaaatacaaaccttccagctcattcatggtgtcaaaagtgaaagtgcaggatttggactgctacacgaccgttgctcagctgtgcccgtttgaaaagccagcaactcactgcccaagaatccattgtccggcacactgcaaagacgaaccttcctactgggctccggtgtttggaaccaacatctatgcagatacctcaagcatctgcaagacagccgtgcacgcgggagtcatcagcaacgagagtgggggtgacgtggacgtgatgcccgtggataaaaagaagacctacgtgggctcgctcaggaatggagttcagtctgaaagcctggggactcctcgggatggaaaggccttccggatctttgctgtcaggcagtgaatttccagcaccaggggagaaggggcgtcttcaggagggcttcggggttttgcttttatttttattttgtcattgcggggtatatggagagtcaggaaacttcctttgactgatgttcagtgtccatcactttgtggcctgtgggtgaggtgacatctcatcccctcactgaagcaacagcatcccaaggtgctcagccggactccctggtgcctgatcctgctggggcctgggggtctccatctggacgtcctctctcctttagagatctgagctgtctcttaaaggggacagttgcccaaaatgttccttgctatgtgttcttctgttggtggaggaagttgatttcaacctccctgccaaaagaacaaaccatttgaagctcacaattgtgaagcattcacggcgtcggaagaggccttttgagcaagcgccaatgagtttcaggaatgaagtagaaggtagttatttaaaaataaaaaacacagtccgtccctaccaatagaggaaaatggttttaatgtttgctggtcagacagacaaatgggctagagtaagagggctgcgggtatgagagaccccggctccgccctggcacgtgtccttgctggcggcccgccacaggcccccttcaatggccgcattcaggatggctctatacacagcagtgctggtttatgtagagttcagcagtcacttcagagatgtatcttgtctttgtcaggcccttcgtcttcatggcccacctgttttctgccgtgacctttggtcccattgaggactaaggatcgggaccctttctttaccccctacccgttgtggctcccaccctgcctcggactggtttacgtgtcctggttcacacccaggacttttctttgcaagcgaacctgtttgaagcccaagtcttaactcctggtctcgtaaggttccactgagacgagatgtctgagaacaaccaaagaaggcctgctctttgctgcttttaaaaaatgacaattaaatgtgcagattccccacgcacccgatgacctattttttcagccgtgggaggaatggagtctttggtacattcctcaccgaggttagcagctcagtttgtggttatgaaaccgtctgtggcctcatgacagcgagagatgggaatacactagaaggatctcttttcctgttttcgtgaaacgactcttgccaaacgttcccgaggcgccaaggagtgtagtacaccctggctgccatcactctataaaagtgcttcatgagcccagaccaaaagcccacagtgaaatgaagtacccttttgtaaatagcatttttttgcagaaggtgaaaattccactctctaccaccgggccagccaatagatcactttggtgaatgctagtttcaaatttgattcaaaatatttcttaggtgaaagaactagcagaaagtcaaaaactaagatactgtagactggacaagaaattctacctgggcacctaggtgatgccttctttctttgattgcctttctaataaatgcagaatctgaaggtaaataggtttaaaacaaaacaaaaacccacccctttaaggagttggtaaaaagcagttcaactcttagcttgactgagctaaaattcacaggactacgtgctttgtgcattgtagtctagtcgtaattcataggtactgactcctcagccccaaatgtcggagaggaagaattcggtcagcctgtcaggtcgtgagtccagttaccaccaaacatctgggaaacttctgggtgctgggtgctctgctgctggacttttgtggctgtgtctgtgtctgcaagataaattagatcgccctgtggggtttgcagaattagtgaagggtccaggacgatcccagtgggctcgcttccaaagcatcccactcaagggagacttgaaacttccagtgtgagttgaccccatcatttaaaaataaagtccccgggttccttaatgcctccttcactgggccttcctagcaggatagaaagtccttgcccagagcaggacctggctgtctttttttttttttttttttttttcccgagaccaagtttcactctgttgcccaaggtagagtgcagtggcgtgatctctgctcattgcaactgccgcctcccgggttcaagcaattctcatgcatcagcctcccaagtacctgggactacaggcgtgagctaccatgcccggctaatttttgtatttttagtagagatggggtttcattatgttggccaggctggtctcgaactccttacctcaggtgatccacccaccttggcctcccgaagtgctgggattacaggcatgagccactgcgcccggccatggacctggctgtctttatcatccccacaaacattttgaaactggaatatttgtcttcagaaaatggaaacaagactataaatgataagccctgtccctagcaccacctctcctgtgtgtggaatagaggcccctcgtgctaccaacacttaccctgtgtttaaaaagatcttgtaccaagccaacggcgttcctggctctcctgcccacaggatgaacattttcggcttccttaggagttttgccctaccgtattccaaagcgtgtgctggtttctcatattgtctgtaggctcactcagcccgcagtttatgtgtgtgcttttttctatgaaaaatgatgtattttgctacttcctgtgtacaaagttttattgtaaatgttttttgtgctttgcatgaacaggggccacgttgttgcaattgtttcagtagaactggtttgatttctaaaatgttcctgtaacatatcttttatgaacaaatctgaacaatttgtgaaataaaacattgaaaacca

SEQ ID NO: 222016 - DNA, 1494 bp, Artificial Sequence
  derived and/or modified sequence
atgagctgcgtgctgggcggcgtgatccccctgggcctgctgttcctggtgtgcggcagccagggctacctgctgcccaacgtgaccctgctggaggagctgctgagcaagtaccagcacaacgagagccacagcagagtgagaagagccatccccagagaggacaaggaggagatcctgatgctgcacaacaagctgagaggccaggtgcagccccaggccagcaacatggagtacatgacctgggacgacgagctggagaagagcgccgccgcctgggccagccagtgcatctgggagcacggccccaccagcctgctggtgagcatcggccagaacctgggcgcccactggggcagatacagaagccccggcttccacgtgcagagctggtacgacgaggtgaaggactacacctacccctaccccagcgagtgcaacccctggtgccccgagagatgcagcggccccatgtgcacccactacacccagatcgtgtgggccaccaccaacaagatcggctgcgccgtgaacacctgcagaaagatgaccgtgtggggcgaggtgtgggagaacgccgtgtacttcgtgtgcaactacagccccaagggcaactggatcggcgaggccccctacaagaacggcagaccctgcagcgagtgcccccccagctacggcggcagctgcagaaacaacctgtgctacagagaggagacctacacccccaagcccgagaccgacgagatgaacgaggtggagaccgcccccatccccgaggagaaccacgtgtggctgcagcccagagtgatgagacccaccaagcccaagaagaccagcgccgtgaactacatgacccaggtggtgagatgcgacaccaagatgaaggacagatgcaagggcagcacctgcaacagataccagtgccccgccggctgcctgaaccacaaggccaagatcttcggcaccctgttctacgagagcagcagcagcatctgcagagccgccatccactacggcatcctggacgacaagggcggcctggtggacatcaccagaaacggcaaggtgcccttcttcgtgaagagcgagagacacggcgtgcagagcctgagcaagtacaagcccagcagcagcttcatggtgagcaaggtgaaggtgcaggacctggactgctacaccaccgtggcccagctgtgccccttcgagaagcccgccacccactgccccagaatccactgccccgcccactgcaaggacgagcccagctactgggcccccgtgttcggcaccaacatctacgccgacaccagcagcatctgcaagaccgccgtgcacgccggcgtgatcagcaacgagagcggcggcgacgtggacgtgatgcccgtggacaagaagaagacctacgtgggcagcctgagaaacggcgtgcagagcgagagcctgggcacccccagagacggcaaggccttcagaatcttcgccgtgagacagtag

SEQ ID NO: 222017 - protein, 119 aa, Artificial Sequence
  derived and/or modified sequence
MVRISKPKTFQAYLDDCHRRYSCAHCRAHLANHDDLISKSFQGSQGRAYLFNSVVNVGCGPAEERVLLTGLHAVADIHCENCKTTLGWKYEQAFESSQKYKEGKYIIELNHMIKDNGWD

SEQ ID NO: 222018 - protein, 157 aa, Artificial Sequence
  derived and/or modified sequence
MCVAQVLTAHLLPPRQALGSLCSPWAAPRVGPLPPAPAMVRISKPKTFQAYLDDCHRRYSCAHCRAHLANHDDLISKSFQGSQGRAYLFNSVVNVGCGPAEERVLLTGLHAVADIHCENCKTTLGWKYEQAFESSQKYKEGKYIIELNHMIKDNGWD

SEQ ID NO: 222019 - DNA, 474 bp, Artificial Sequence
  derived and/or modified sequence
atgtgcgtggcccaggtgctgaccgcccacctgctgccccccagacaggccctgggcagcctgtgcagcccctgggccgcccccagagtgggccccctgccccccgcccccgccatggtgagaatcagcaagcccaagaccttccaggcctacctggacgactgccacagaagatacagctgcgcccactgcagagcccacctggccaaccacgacgacctgatcagcaagagcttccagggcagccagggcagagcctacctgttcaacagcgtggtgaacgtgggctgcggccccgccgaggagagagtgctgctgaccggcctgcacgccgtggccgacatccactgcgagaactgcaagaccaccctgggctggaagtacgagcaggccttcgagagcagccagaagtacaaggagggcaagtacatcatcgagctgaaccacatgatcaaggacaacggctgggactag

SEQ ID NO: 222020 - DNA, 474 bp, Artificial Sequence
  derived and/or modified sequence
atgtgtgtagcccaggtactcactgctcatctgttgccacccagacaggccctgggatccctatgttccccctgggccgcgcctcgcgtgggtccgctgcctccagccccagccatggtccgaatctccaagccaaaaacatttcaagcttacctggacgactgccaccgccggtattcgtgtgctcactgtagggctcacctcgcgaatcacgacgacctcatctccaagtctttccagggatcccagggcagggcctaccttttcaatagcgtcgtaaatgtaggctgcggccctgccgaggagcgggtcctcctgaccggactgcatgccgtggccgacattcactgcgaaaattgtaagacaactctgggctggaagtacgagcaggcatttgaatcatcccagaaatacaaagaaggcaaatacatcatagagcttaaccatatgataaaggataacggatgggactag

SEQ ID NO: 222021 - DNA, 474 bp, Artificial Sequence
  derived and/or modified sequence
atgtgtgtggcccaggtgctgacagcccacctgctgcccccccggcaggccctgggcagcctgtgcagcccctgggccgccccccgggtgggccccctgcccccagccccagccatggtgcgcatcagcaagcccaagaccttccaggcctacctggatgactgccaccggcgctacagctgtgcccactgccgggcccacctggccaaccatgatgacctgatcagcaagagcttccagggcagccagggccgggcctacctgttcaacagcgtggtgaatgtgggctgcggccctgctgaggagcgggtgctgctgaccggcctgcatgctgtggccgacatccactgtgagaactgcaagaccaccctgggctggaagtatgagcaggcctttgagagcagccagaagtacaaggagggcaagtacatcatcgagctgaaccacatgatcaaggacaatggctgggactag

SEQ ID NO: 222022 - DNA, 474 bp, Artificial Sequence
  derived and/or modified sequence
atgtgcgtggcccaggtgctgaccgcccacctgctgcccccccggcaagctctgggctccttatgtagcccttgggccgcccccagagttggcccactcccacccgccccggccatggtgcggatatctaagccaaagactttccaggcttaccttgacgactgccaccgacgctacagttgtgcacattgtagggcacacctcgccaaccacgatgacctcatttctaagtcattccaagggtcgcagggccgtgcttacctgttcaatagcgtggtgaacgtcgggtgcggacctgccgaggagagagtgctgcttaccggactgcatgccgtggcagatatccactgcgagaattgcaaaacgacactcgggtggaagtatgagcaggcttttgaatcctcccaaaaatacaaggagggcaagtatattatcgaactaaaccacatgattaaggacaatgggtgggactag

SEQ ID NO: 222023 - DNA, 474 bp, Artificial Sequence
  derived and/or modified sequence
atgtgcgtggcgcaggtcctcacggcccatttgttacctccacgtcaggccctggggtctctgtgctcgccgtgggccgcaccgcgagtgggacctctgccacccgctcctgccatggttagaataagcaaacctaaaacatttcaggcatacctggacgactgccatcgcaggtatagctgtgctcactgccgcgcacacctcgccaatcacgatgacctgatcagcaaatcattccagggaagccagggcagagcctacctcttcaacagtgtcgtgaacgtgggctgcgggccagccgaggagcgggtcctcctgactggactgcacgcggtcgccgacatccactgcgaaaattgcaagactactctgggttggaagtacgagcaggcatttgagtcctctcaaaagtataaagagggaaaatacatcattgaacttaatcacatgataaaggataatggatgggactag

SEQ ID NO: 222024 - DNA, 940 bp, Artificial Sequence
  derived and/or modified sequence
ggtgtaaacaagtccaggcgcctgcgaacccgggcccgggggggacggcgcccgccaggagcgccccccactcccaggccagcccaccccggcggaccgggccccgcgcgcccaggcgaggcactgggctccctctgctccccgtgggccgctccccgcgtggggccactgcccccggcccccgccatggtgcggatttcaaagcccaagacgtttcaggcctacttggatgattgtcaccggaggtatagctgtgcccactgccgcgctcacctggccaaccacgacgacctcatctccaagtccttccagggcagtcaggggcgtgcctacctcttcaactcagtggtgaacgtgggctgcgggccagccgaggagcgggtgctgctgaccggcctccatgctgtcgccgacatccactgcgagaactgcaagaccactttgggctggaaatatgaacaggcctttgagagcagccagaagtacaaagaggggaagtacatcattgaactcaaccacatgatcaaagacaacggctgggactgacccccgctcccccgacgcatgtggctccagcccggcctggccgccagggagcgccactggcttcccgccacccgaagggagctctggaccctcagagcccctgcagaggacggatctagctcctgtatatatattttattgcatgcactgtgaccttggggggagaacagaagggggacgacgcccccgcacctcctgcgatctggctggcttggatctcgtttttaacccgttcctgccccacctgccctatagttatggcctgtgttctgctctcctggtcccagtgcaccgtctgctctgtgaactcctcccaccaggcccttcttaccccacgcgtgtctgtccccctcgttctgtagcgtttgtacataataaaacaatggagtggaga

SEQ ID NO: 222025 - DNA, 1588 bp, Artificial Sequence
  derived and/or modified sequence
ggcgcctgcgaacccgggcccgggggggacggcgcccgccaggagcgccccccactcccaggccagcccaccccggcggaccgggccccgcgcgcccaggcgaggtgaggcccgcgccgtcagggctgcgtgtcgccccgcgcccctgcccagcccgcgaggactgccccctcccccggcgcccgcccccacccccgcgccccaggtgagccccggagtccaggtaaggctccgcgttgcaggtaagagcccctgagcgtagaggaggccttggcgcccgcaggtgagagcccctcccctcctaggtgaccctcaaccttcacggcgaggcctcctacctcctccaggtgggggaccctctccccgatgaaccccctaaaccaccagtgaaccccactgctctccagatgaggtcgcaaggaccaaccagtgcctacccgcccatgctcccccgaaactgggaactgacagcccagcccctccaaagccccttcctccagcttcagctgccaggtcagcaagggtgaggccggaagcaggcgggtgactcaccctgggcacctccgagcctcagtttccccatggatgcaacctgaggcctcctcactgagtcaaaaccgagacgcctctggtccccggagaggctgctggctctggggaaaggagagagcagcccagtgtgacagagcgagtccccacggctctgggagtgcctcgcatgtgtgtggcccaggtcctgacagcccacctactccctccccggcaggcactgggctccctctgctccccgtgggccgctccccgcgtggggccactgcccccggcccccgccatggtgcggatttcaaagcccaagacgtttcaggcctacttggatgattgtcaccggaggtatagctgtgcccactgccgcgctcacctggccaaccacgacgacctcatctccaagtccttccagggcagtcaggggcgtgcctacctcttcaactcagtggtgaacgtgggctgcgggccagccgaggagcgggtgctgctgaccggcctccatgctgtcgccgacatccactgcgagaactgcaagaccactttgggctggaaatatgaacaggcctttgagagcagccagaagtacaaagaggggaagtacatcattgaactcaaccacatgatcaaagacaacggctgggactgacccccgctcccccgacgcatgtggctccagcccggcctggccgccagggagcgccactggcttcccgccacccgaagggagctctggaccctcagagcccctgcagaggacggatctagctcctgtatatatattttattgcatgcactgtgaccttggggggagaacagaagggggacgacgcccccgcacctcctgcgatctggctggcttggatctcgtttttaacccgttcctgccccacctgccctatagttatggcctgtgttctgctctcctggtcccagtgcaccgtctgctctgtgaactcctcccaccaggcccttcttaccccacgcgtgtctgtccccctcgttctgtagcgtttgtacataataaaacaatggagtggagaca

SEQ ID NO: 222026 - protein, 350 aa, Artificial Sequence
  derived and/or modified sequence
MRLPDVQLWLVLLWALVRAQGTGSVCPSCGGSKLAPQAERALVLELAKQQILDGLHLTSRPRITHPPPQAALTRALRRLQPGSVAPGNGEEVISFATVTDSTSAYSSLLTFHLSTPRSHHLYHARLWLHVLPTLPGTLCLRIFRWGPRRRRQGSRTLLAEHHITNLGWHTLTLPSSGLRGEKSGVLKLQLDCRPLEGNSTVTGQPRRLLDTAGHQQPFLELKIRANEPGAGRARRRTPTCEPATPLCCRRDHYVDFQELGWRDWILQPEGYQLNYCSGQCPPHLAGSPGIAASFHSAVFSLLKANNPWPASTSCCVPTARRPLSLLYLDHNGNVVKTDVPDMVVEACGCS

SEQ ID NO: 222027 - DNA, 1053 bp, Artificial Sequence
  derived and/or modified sequence
atgcgcctgcccgatgtgcagctatggctggtactgctctgggcactggtcagggcacagggtactgggagcgtgtgcccgtcttgcggcggcagtaagctcgctccccaggccgaacgggccctggtgctcgaacttgccaaacaacaaattctggatggactgcatctcactagtcgcccccggattactcaccccccccctcaggcagctctgacccgtgctctacgacgcctccagcctggctccgtcgctccagggaacggagaggaagttatttcgtttgctactgtgaccgactccacttctgcttactcatctctgttaaccttccatctgtctactccgcggtcacaccatctttatcacgcgcgactctggcttcacgtactgccaactcttcctgggaccctctgcttaagaatcttccgatgggggcctcgccggagaagacagggctcccgcactctactcgcagaacaccacatcacaaatctgggatggcatactctgactctaccttcgtctggactcagaggcgaaaagtcgggggtgctcaagctacaactggactgtcgccctctcgaaggcaatagcaccgtcacaggccagccccgaaggctgctggataccgccggacaccagcagccctttcttgaactcaaaattcgggccaacgaacccggcgccggtcgggccaggaggagaacccctacatgtgagccagcgacccccctgtgctgccggagggatcactatgttgattttcaggagctgggctggcgtgattggattctgcagccggaggggtatcaactgaactattgttctggccagtgtccaccccatcttgcgggttcacccggcatagcagctagcttccattcagccgtgtttagccttttgaaggcaaataacccctggcccgcaagtactagctgttgtgttcctacagcccgcagacctctgagcttactgtacctggatcataacgggaatgttgtgaaaacagatgtcccggacatggttgtcgaagcttgcggatgttcctag

SEQ ID NO: 222028 - DNA, 2429 bp, Artificial Sequence
  derived and/or modified sequence
agctgtgagggtcaagcacagctatccatcagatgatctactttcagccttcctgagtcccagacaatagaagacaggtggctgtacccttggccaagggtaggtgtggcagtggtgtctgctgtcactgtgccctcattggcccccagcaatcagactcaacagacggagcaactgccatccgaggctcctgaaccagggccattcaccaggagcatgcggctccctgatgtccagctctggctggtgctgctgtgggcactggtgcgagcacaggggacagggtctgtgtgtccctcctgtgggggctccaaactggcaccccaagcagaacgagctctggtgctggagctagccaagcagcaaatcctggatgggttgcacctgaccagtcgtcccagaataactcatcctccaccccaggcagcgctgaccagagccctccggagactacagccagggagtgtggctccagggaatggggaggaggtcatcagctttgctactgtcacagactccacttcagcctacagctccctgctcacttttcacctgtccactcctcggtcccaccacctgtaccatgcccgcctgtggctgcacgtgctccccacccttcctggcactctttgcttgaggatcttccgatggggaccaaggaggaggcgccaagggtcccgcactctcctggctgagcaccacatcaccaacctgggctggcataccttaactctgccctctagtggcttgaggggtgagaagtctggtgtcctgaaactgcaactagactgcagacccctagaaggcaacagcacagttactggacaaccgaggcggctcttggacacagcaggacaccagcagcccttcctagagcttaagatccgagccaatgagcctggagcaggccgggccaggaggaggacccccacctgtgagcctgcgacccccttatgttgcaggcgagaccattacgtagacttccaggaactgggatggcgggactggatactgcagcccgaggggtaccagctgaattactgcagtgggcagtgccctccccacctggctggcagcccaggcattgctgcctctttccattctgccgtcttcagcctcctcaaagccaacaatccttggcctgccagtacctcctgttgtgtccctactgcccgaaggcccctctctctcctctacctggatcataatggcaatgtggtcaagacggatgtgccagatatggtggtggaggcctgtggctgcagctagcaagaggacctggggctttggagtgaagagaccaagatgaagtttcccaggcacagggcatctgtgactggaggcatcagattcctgatccacaccccaacccaacaaccacctggcaatatgactcacttgacccctatgggacccaaatgggcactttcttgtctgagactctggcttattccaggttggctgatgtgttgggagatgggtaaagcgtttcttctaaaggggtctacccagaaagcatgatttcctgccctaagtcctgtgagaagatgtcagggactagggagggagggagggaaggcagagaaaaattacttagcctctcccaagatgagaaagtcctcaagtgaggggaggaggaagcagatagatggtccagcaggcttgaagcagggtaagcaggctggcccagggtaagggctgttgaggtaccttaagggaaggtcaagagggagatgggcaaggcgctgagggaggatgcttaggggacccccagaaacaggagtcaggaaaatgaggcactaagcctaagaagttccctggtttttcccaggggacaggacccactgggagacaagcatttatactttctttcttcttttttatttttttgagatcgagtctcgctctgtcaccaggctggagtgcagtgacacgatcttggctcactgcaacctccgtctcctgggttcaagtgattcttctgcctcagcctcccgagcagctgggattacaggcgcccactaatttttgtattcttagtagaaacgaggtttcaacatgttggccaggatggtctcaatctcttgacctcttgatccacccgacttggcctcccgaagtgatgagattataggcgtgagccaccgcgcctggcttatactttcttaataaaaaggagaaagaaaatcaacaaatgtgagtcataaagaagggttagggtgatggtccagagcaacagttcttcaagtgtactctgtaggcttctgggaggtcccttttcaggggtgtccacaaagtcaaagctattttcataataatactaacatgttatttgccttttgaattctcattatcttaaaattgtattgtggagttttccagaggccgtgtgacatgtgattacatcatctttctgacatcattgttaa

SEQ ID NO: 222029 - DNA, 1053 bp, Artificial Sequence
  derived and/or modified sequence
atgaggctgcctgatgtgcagctgtggctggtgctgctgtgggccctggtgcgggcccagggcaccggctctgtgtgccccagctgtggcggcagcaagctggccccccaggccgagcgggccctggtgctggagctggccaagcagcagatcctggatggcctgcacctgaccagccggccccgcatcacccaccccccaccccaggccgccctgacccgggccctgcggcggctgcagcccggctctgtggcccctggaaatggagaggaggtgatcagctttgccaccgtgacagacagcaccagcgcctacagcagcctgctgaccttccacctgagcacccccaggagccaccacctgtaccacgcccggctgtggctgcacgtgctgcccaccctgcccggcaccctgtgcctgcgcatcttccgctggggccccaggagaagacggcagggcagcaggaccctgctggccgagcaccacatcaccaacctgggctggcacaccctgaccctgcccagcagcggcctgcggggggagaagtctggagtgctgaagctgcagctggactgccggcccctggagggcaacagcacagtgacaggccagccccggcggctgctggacacagctggccaccagcagcccttcctggagctgaagatccgggccaatgagcccggggccggccgggcccggcggaggacccccacctgtgagcccgccacccccctgtgctgcagaagagaccactacgtggacttccaggagctgggctggagggactggatcctgcagcctgagggctaccagctgaactactgcagcggccagtgccccccccacctggccggcagccctggcattgctgccagcttccacagcgctgtgttcagcctgctgaaggccaacaacccctggccagccagcaccagctgctgcgtgcccacagcccggcggcccctgagcctgctgtacctggaccacaatggaaatgtggtgaagacagatgtgcctgacatggtggtggaggcctgtggctgcagctag

SEQ ID NO: 222030 - DNA, 1053 bp, Artificial Sequence
  derived and/or modified sequence
atgcggctgcccgacgtgcagctgtggctggtgctgctgtgggccctcgtgcgggctcagggcactgggtctgtttgcccttcctgcggcggctccaagctggcgccacaggccgagcgagctctcgtcctggagttagccaaacagcagattctcgatggtctgcaccttacttcccgcccaagaatcacgcatccacctccccaggccgcactaacgagggccttgcgacgactgcaacccggctctgtcgcgccagggaatggagaggaggtgatctcattcgccaccgtcacggacagtacctctgcttacagctctcttctgacgtttcacctctccactccgcgctcacatcatctctatcacgccagactgtggctgcatgtactaccaactctccctgggacattatgcttgaggattttcagatggggacccagaaggaggcgacagggctcaagaactctcttggctgagcaccatattacgaacctgggatggcacactctcacattaccttcctctggcctcagaggggaaaaaagtggcgtgcttaagctccagctggactgccgacccctggagggaaattccaccgtaacaggccaaccgagacgtctgttggacaccgccgggcatcagcagccgttcctggaactaaaaattcgtgcgaacgaaccgggggccgggcgggcacggaggaggacaccaacttgtgagcccgcaaccccactgtgctgccggcgcgaccactacgtggatttccaggaactgggctggcgcgattggattctccaacctgaaggttatcagctcaattactgttcagggcaatgccctcctcacctagctgggtccccaggaatcgccgcctcctttcactctgcagtcttcagcctacttaaagcaaacaatccctggcctgcgagtacctcttgttgtgtaccgacagcccggcgtccgcttagcctactgtaccttgaccacaacggaaacgtcgtcaaaactgacgtgcctgacatggtcgtggaagcttgtggatgctcgtag

SEQ ID NO: 222031 - DNA, 1053 bp, Artificial Sequence
  derived and/or modified sequence
atgaggctgcctgacgtgcagctatggcttgttttgctatgggctctggtcagggcacagggtacaggttcagtctgcccctcctgtggtgggtccaaactcgcgcctcaggccgagagagcattggtcttggagcttgctaagcagcagatactcgacggtctccatctaacatcccggcctagaatcacacaccccccacctcaggcagctttaacccgggctctgagaagattgcagcccggtagcgtggcccctgggaatggcgaagaggttattagctttgccaccgtgaccgatagcacatctgcatattcttctctgttaacctttcaccttagcacacccagaagccaccacctgtaccatgctcgtctctggctgcacgtgctcccaacactgccgggtactttgtgcttgcgaatctttaggtggggcccacgccgtaggcgtcaaggttctcgcacccttctcgccgagcaccacatcaccaacctgggctggcatactctcaccctgccatcttctgggttgcggggagaaaagtctggagtgttgaagcttcagctcgattgccgtcctttggagggaaactccacggttactggccagccaaggaggcttctggacaccgccggacatcagcaaccctttttggaacttaagatccgcgcaaacgaacctggggctggcagggctagaagacgaacaccaacctgtgaacctgccacgcccttatgctgcagacgggaccattatgtagacttccaggaactcggctggagagattggatcctccaacccgagggatatcagcttaactactgctccggccagtgcccaccccacctcgctggcagtccaggtattgcagcctccttccatagcgctgtcttttcattgctcaaggcaaataacccctggcctgcctcgacgagttgttgtgttccgacagcgaggagacccctctcccttctgtacttggatcataacggcaatgtggtcaaaaccgatgtacccgacatggtggtggaagcctgtgggtgctcttag

SEQ ID NO: 222032 - DNA, 1053 bp, Artificial Sequence
  derived and/or modified sequence
atgagactgcccgacgtgcagctgtggctggtgctgctgtgggccctggtgagagcccagggcaccggcagcgtgtgccccagctgcggcggcagcaagctggccccccaggccgagagagccctggtgctggagctggccaagcagcagatcctggacggcctgcacctgaccagcagacccagaatcacccacccccccccccaggccgccctgaccagagccctgagaagactgcagcccggcagcgtggcccccggcaacggcgaggaggtgatcagcttcgccaccgtgaccgacagcaccagcgcctacagcagcctgctgaccttccacctgagcacccccagaagccaccacctgtaccacgccagactgtggctgcacgtgctgcccaccctgcccggcaccctgtgcctgagaatcttcagatggggccccagaagaagaagacagggcagcagaaccctgctggccgagcaccacatcaccaacctgggctggcacaccctgaccctgcccagcagcggcctgagaggcgagaagagcggcgtgctgaagctgcagctggactgcagacccctggagggcaacagcaccgtgaccggccagcccagaagactgctggacaccgccggccaccagcagcccttcctggagctgaagatcagagccaacgagcccggcgccggcagagccagaagaagaacccccacctgcgagcccgccacccccctgtgctgcagaagagaccactacgtggacttccaggagctgggctggagagactggatcctgcagcccgagggctaccagctgaactactgcagcggccagtgccccccccacctggccggcagccccggcatcgccgccagcttccacagcgccgtgttcagcctgctgaaggccaacaacccctggcccgccagcaccagctgctgcgtgcccaccgccagaagacccctgagcctgctgtacctggaccacaacggcaacgtggtgaagaccgacgtgcccgacatggtggtggaggcctgcggctgcagctag

SEQ ID NO: 222033 - protein, 568 aa, Artificial Sequence
  derived and/or modified sequence
MDYRRLLMSRVVPGQFDDADSSDSENRDLKTVKEKDDILFEDLQDNVNENGEGEIEDEEEEGYDDDDDDWDWDEGVGKLAKGYVWNGGSNPQANRQTSDSSSAKMSTPADKVLRKFENKINLDKLNVTDSVINKVTEKSRQKEADMYRIKDKADRATVEQVLDPRTRMILFKMLTRGIITEINGCISTGKEANVYHASTANGESRAIKIYKTSILVFKDRDKYVSGEFRFRHGYCKGNPRKMVKTWAEKEMRNLIRLNTAEIPCPEPIMLRSHVLVMSFIGKDDMPAPLLKNVQLSESKARELYLQVIQYMRRMYQDARLVHADLSEFNMLYHGGGVYIIDVSQSVEHDHPHALEFLRKDCANVNDFFMRHSVAVMTVRELFEFVTDPSITHENMDAYLSKAMEIASQRTKEERSSQDHVDEEVFKRAYIPRTLNEVKNYERDMDIIMKLKEEDMAMNAQQDNILYQTVTGLKKDLSGVQKVPALLENQVEERTCSDSEDIGSSECSDTDSEEQGDHARPKKHTTDPDIDKKERKKMVKEAQREKRKNKIPKHVKKRKEKTAKTKKGK

SEQ ID NO: 222034 - DNA, 1707 bp, Artificial Sequence
  derived and/or modified sequence
atggactacagaagactgctgatgagcagagtggtgcccggccagttcgacgacgccgacagcagcgacagcgagaacagagacctgaagaccgtgaaggagaaggacgacatcctgttcgaggacctgcaggacaacgtgaacgagaacggcgagggcgagatcgaggacgaggaggaggagggctacgacgacgacgacgacgactgggactgggacgagggcgtgggcaagctggccaagggctacgtgtggaacggcggcagcaacccccaggccaacagacagaccagcgacagcagcagcgccaagatgagcacccccgccgacaaggtgctgagaaagttcgagaacaagatcaacctggacaagctgaacgtgaccgacagcgtgatcaacaaggtgaccgagaagagcagacagaaggaggccgacatgtacagaatcaaggacaaggccgacagagccaccgtggagcaggtgctggaccccagaaccagaatgatcctgttcaagatgctgaccagaggcatcatcaccgagatcaacggctgcatcagcaccggcaaggaggccaacgtgtaccacgccagcaccgccaacggcgagagcagagccatcaagatctacaagaccagcatcctggtgttcaaggacagagacaagtacgtgagcggcgagttcagattcagacacggctactgcaagggcaaccccagaaagatggtgaagacctgggccgagaaggagatgagaaacctgatcagactgaacaccgccgagatcccctgccccgagcccatcatgctgagaagccacgtgctggtgatgagcttcatcggcaaggacgacatgcccgcccccctgctgaagaacgtgcagctgagcgagagcaaggccagagagctgtacctgcaggtgatccagtacatgagaagaatgtaccaggacgccagactggtgcacgccgacctgagcgagttcaacatgctgtaccacggcggcggcgtgtacatcatcgacgtgagccagagcgtggagcacgaccacccccacgccctggagttcctgagaaaggactgcgccaacgtgaacgacttcttcatgagacacagcgtggccgtgatgaccgtgagagagctgttcgagttcgtgaccgaccccagcatcacccacgagaacatggacgcctacctgagcaaggccatggagatcgccagccagagaaccaaggaggagagaagcagccaggaccacgtggacgaggaggtgttcaagagagcctacatccccagaaccctgaacgaggtgaagaactacgagagagacatggacatcatcatgaagctgaaggaggaggacatggccatgaacgcccagcaggacaacatcctgtaccagaccgtgaccggcctgaagaaggacctgagcggcgtgcagaaggtgcccgccctgctggagaaccaggtggaggagagaacctgcagcgacagcgaggacatcggcagcagcgagtgcagcgacaccgacagcgaggagcagggcgaccacgccagacccaagaagcacaccaccgaccccgacatcgacaagaaggagagaaagaagatggtgaaggaggcccagagagagaagagaaagaacaagatccccaagcacgtgaagaagagaaaggagaagaccgccaagaccaagaagggcaagtag

SEQ ID NO: 222035 - DNA, 1707 bp, Artificial Sequence
  derived and/or modified sequence
atggattatcgacggctgcttatgtccagggtggtgccagggcagttcgatgacgctgattcctcagattccgagaaccgtgacctgaaaacagtcaaagaaaaggatgacattctcttcgaagatttacaggacaacgttaatgaaaatggcgagggcgagatcgaagacgaggaggaagaaggttatgatgacgatgacgacgattgggactgggacgaaggggtgggcaaactggcaaaaggctatgtgtggaatggtggcagtaatcctcaggccaatcgacaaacgtcagacagcagctccgcaaagatgagcacccccgcagataaagtattgcgcaaattcgaaaacaagatcaacctggacaagctgaatgtgacggactcagttattaataaggtcaccgagaaatcaagacagaaggaggctgacatgtaccggatcaaggataaggcagatagggccaccgttgaacaggtgctggatcccaggaccagaatgatccttttcaaaatgctgacaagaggaatcataaccgagatcaacgggtgcataagcacaggaaaggaggcgaatgtgtatcacgcctccactgctaacggagagagtcgcgctataaaaatctacaagacatccattctggtcttcaaggatcgcgacaaatatgtcagtggagagttcaggttcagacacgggtattgtaaggggaatcctagaaaaatggtgaaaacctgggccgagaaggaaatgcgcaatcttattagactgaatactgctgagataccgtgtcccgagccaattatgttacgttcccatgtgctggtgatgagcttcatcggcaaagacgatatgcccgcaccacttctaaagaacgtacagctgtctgaaagtaaagcacgcgagctgtatcttcaggtcatccagtacatgcggcggatgtaccaggacgcccggttggtacacgccgatctgtccgagttcaatatgctttaccacggtggtggagtgtacattatcgatgtgtcacaaagcgtggagcacgaccatccgcatgcccttgagttcctacgcaaagattgtgctaatgtgaacgacttttttatgcggcattccgtggccgttatgactgttcgcgagctgttcgagtttgtcacagacccctccataacgcatgagaacatggacgcgtatctgtctaaggcgatggaaatagcttcccaacgcactaaggaagaaagaagttctcaagaccatgtggacgaggaggtctttaagcgcgcatacattccacgtacccttaatgaggtcaagaactacgaaagggatatggacatcatcatgaaacttaaggaggaggacatggcaatgaacgcgcaacaggataacatcctctaccagaccgtgaccggcctgaagaaagatctgtcaggcgtgcagaaagtacctgcgctgttggaaaaccaggtcgaagagcggacctgttctgatagcgaggacatagggtccagcgaatgctccgacacagattcagaagagcaaggcgaccatgccagacccaaaaagcatacaacagacccggacatcgataagaaggaacgcaaaaagatggtaaaggaggcccagcgagaaaagaggaagaataagattcccaaacacgtcaagaaaagaaaagagaagactgcaaagaccaagaagggcaagtag

SEQ ID NO: 222036 - DNA, 1707 bp, Artificial Sequence
  derived and/or modified sequence
atggactaccgccgcctgctgatgagccgggtggtgcccggccagtttgatgatgctgacagcagtgacagtgaaaatagagacctgaagacagtgaaggagaaggatgacatcctgtttgaggacctgcaggacaacgtgaatgaaaatggagagggggagattgaagatgaggaggaggagggctatgatgatgatgatgatgactgggactgggatgaaggagtgggcaagctggccaagggctacgtgtggaatggaggcagcaacccccaggccaaccggcagaccagtgacagcagcagcgccaagatgagcaccccagctgacaaggtgctgaggaagtttgagaacaagatcaacctggacaagctgaatgtgacagacagcgtcatcaacaaggtgacagagaagagccggcagaaggaggccgacatgtaccgcatcaaggacaaggctgaccgggccaccgtggagcaggtgctggaccccaggaccaggatgatcctcttcaagatgctgacccggggcatcatcacagagatcaatggctgcatcagcacaggcaaggaggccaacgtgtaccacgccagcacagccaatggagagagccgggccatcaagatctacaagaccagcatcctggtgttcaaggaccgggacaagtatgtgtctggagagttccgcttccgccacggctactgcaagggcaaccccaggaagatggtgaagacctgggccgagaaggagatgaggaacctgatccggctgaacacagctgagatcccctgcccagagcccatcatgctgcggagccacgtgctggtgatgtccttcatcggcaaggatgacatgcctgcccccctgctgaagaatgtgcagctgtctgagagcaaggcccgggagctgtacctgcaggtgatccagtacatgaggaggatgtaccaggatgcccggctggtgcatgctgacctgtctgagttcaacatgctgtaccatggaggcggcgtgtacatcattgatgtgtcccagagcgtggagcatgaccacccccacgccctggagttcctgaggaaggactgtgccaacgtgaatgacttcttcatgaggcacagcgtggccgtgatgacagtgcgggagctgtttgaatttgtgacagaccccagcatcacccatgagaacatggatgcctacctgagcaaggccatggagatcgccagccagaggaccaaggaggagaggagcagccaggaccacgtggatgaggaggtgttcaagagggcctacatccccaggaccctgaatgaggtgaagaactatgaaagagacatggacatcatcatgaagctgaaggaggaggacatggccatgaatgcccagcaggacaacatcctgtaccagacagtgacaggcctgaagaaggacctgtctggagtgcagaaggtgcctgccctgctggagaaccaggtggaggagaggacctgcagcgacagtgaagatattggcagcagtgaatgtagtgacacagattctgaggagcagggcgaccacgcccggcccaagaagcacaccacagatcctgacatcgacaagaaggagaggaagaagatggtgaaggaggcccagcgggagaagaggaagaacaagatccccaagcacgtgaagaagaggaaggagaagacagccaagaccaagaagggcaagtag

SEQ ID NO: 222037 - DNA, 1707 bp, Artificial Sequence
  derived and/or modified sequence
atggactaccggcggctgctgatgagccgggtggtgcccggccagttcgacgacgccgactcaagcgattcagaaaatagagatctcaagactgtgaaggagaaagacgacattttgttcgaggacctccaggacaacgtcaacgaaaacggcgaaggtgaaattgaggacgaagaggaagagggctacgacgacgatgacgacgactgggattgggacgaaggtgtaggtaagttagctaaaggttacgtgtggaacggagggagcaatcctcaggcaaaccggcagacgagcgatagcagtagcgccaagatgtccacgcctgcggataaggttcttcggaaatttgaaaacaaaattaacctggacaagctgaacgttaccgatagcgtgattaataaagttacggagaaatccaggcagaaggaagctgatatgtacaggatcaaggataaagcggacagggcgaccgtagaacaggtcctggacccgagaacccgtatgatccttttcaagatgttgacccgtgggatcatcacagaaatcaacggatgtatctctactggtaaagaagcaaatgtctaccacgcctcaacagcaaatggtgagtctagagctatcaagatctacaagacatccatcctagtcttcaaagacagggacaaatacgtctccggtgaattccggttccgccatgggtattgcaaaggcaacccgcgaaagatggttaaaacctgggccgagaaagagatgcggaatctgattaggctgaatacggcagagattccatgcccagagccaatcatgcttcgctcacatgtcctggtcatgagtttcatcggaaaggacgatatgccggctcctctgttgaagaatgtgcaactctcagagtccaaagcaagagagctttatctacaggttatacaatatatgcggcggatgtaccaggacgcacggttggttcatgcggatctgagcgaatttaacatgctctatcatggtgggggagtctatattatcgatgtttcccagtccgtggaacacgaccatcctcatgcgctggagttcttacgcaaggattgtgccaatgtgaacgatttttttatgcggcattcagttgcagtgatgaccgtacgcgaacttttcgagtttgtcacagacccatcaattacgcatgaaaatatggacgcatacctttcaaaagccatggaaattgcctctcagcgtacgaaggaagaacggagcagccaagaccatgtggacgaagaagtgttcaagcgcgcttacatccccagaaccttgaacgaggttaagaactatgagagggatatggacattatcatgaaacttaaggaagaggacatggccatgaacgcacagcaggacaatatactgtaccagactgtgacaggcttaaaaaaggatctatcaggcgtccaaaaggttcccgctctgttggagaatcaagtcgaggaaaggacctgtagtgattctgaggacattggctcttccgagtgttcagacactgactcggaggaacaaggggaccacgcccgtccaaaaaagcacacaacagatccagatattgacaagaaggaacgtaagaagatggtgaaggaagcacagcgggagaaaaggaagaacaagattcccaagcacgtgaaaaaaagaaaggaaaagaccgcaaagaccaagaaagggaagtag

SEQ ID NO: 222038 - DNA, 1707 bp, Artificial Sequence
  derived and/or modified sequence
atggattatagacgactattaatgtcaagagtggtgcccggtcaatttgatgatgccgacagttccgactccgagaaccgggatttaaagactgtgaaagagaaggacgatatcctgttcgaggatctgcaggacaatgttaatgagaatggtgagggagaaattgaggacgaagaggaggaaggctatgacgatgatgacgatgattgggattgggatgaaggcgtcggcaagcttgcaaaaggctacgtgtggaatgggggatccaatccgcaggcaaacaggcagacctctgattcctcaagcgcgaaaatgtcaacacccgcagataaggtgctgagaaagttcgagaataagataaaccttgacaagctcaatgtcaccgattcagtcattaacaaggtgaccgaaaaatcaagacagaaggaggccgacatgtaccgcattaaggacaaagccgaccgggctacagttgaacaagtccttgatccacggacaagaatgatactattcaaaatgcttactcggggaattatcaccgagatcaacggctgtatctctacgggaaaagaagctaatgtatatcacgctagcacagctaacggcgaatcacgtgctatcaaaatttataagacgtctattctggtctttaaagatcgagataagtatgtgtctggggagtttagattccgccacgggtattgtaagggtaatcccaggaaaatggtgaagacatgggctgaaaaggaaatgaggaacctgattagactgaataccgctgaaataccttgccctgaacccatcatgctgaggagtcacgttcttgtcatgtcgtttatcggcaaggatgacatgccagcccctcttctgaaaaacgtacagctgagcgagagcaaggccagggagctgtacctgcaggtgattcagtacatgaggaggatgtatcaggacgcaagactcgtgcacgcggacctgagcgaatttaacatgttatatcacggaggaggggtgtacatcatagatgtgagtcagtctgtagagcacgaccaccctcatgccttagaatttctcaggaaggactgtgccaatgtaaatgacttctttatgcgtcatagcgtagctgtgatgacagtgagagagctgtttgaattcgtgaccgatcctagcatcacccatgaaaatatggatgcctacttatccaaagccatggagattgcatcgcagcgcactaaagaagagcgctcatcacaagaccacgtcgacgaggaggtgtttaaacgagcttacattccaaggacactgaatgaagtgaaaaactatgagagggacatggacattatcatgaagcttaaagaggaagacatggccatgaacgcccagcaggataacatcctctaccagacagttacaggcctcaagaaagacctgagtggtgtgcagaaagtcccagcactcctcgagaaccaggtcgaagaacgtacgtgttccgactctgaagatatcggttcttctgaatgctccgacactgattcagaggaacagggagaccatgctcgccctaagaagcacactaccgatccagacatcgacaagaaagagaggaaaaagatggtgaaagaagctcagagggagaaacggaagaataaaattcctaaacacgtgaaaaagcggaaggagaaaaccgccaaaacgaaaaaaggcaagtag

SEQ ID NO: 222039 - DNA, 2810 bp, Artificial Sequence
  derived and/or modified sequence
agcgaccctactgtgggtgcggtgtcttcccagagagtggtgaagttaggaaggtacgaccccctaggccgaacagcctgtgggctagctggcgcctcctgccgcagtaaacacaaagtggggtacagaaacgaaaactccgggaagaaacggccagcacgggcctcgccgtgccggctactcaacacgccttcctgagagcacagaacatccacagccctatacagcgcgccatccagagagctccggactcccagctcggcgcaggggcgggacttccgctcaagtcagacttccgggcgaggcggtgaggggcttccggttggggtggcagggtggtggatctgtcggtcccgttttcccgtcgcacgtggtggccactgttggcttctgaatggtttgcaaggcggatatccacgccaaggcctttggatcggccgtgggtacatccgtctgagccgttcctttccatcgcagagcggcggcctccggcggcgctctccagtcatggactaccggcggcttctcatgagccgggtggtccccgggcaattcgacgacgcggactcctctgacagtgaaaacagagacttgaagacagtcaaagagaaggatgacattctgtttgaagaccttcaagacaatgtgaatgagaatggtgaaggtgaaatagaagatgaggaggaggagggttatgacgatgatgatgatgactgggactgggatgaaggagttggaaaactcgccaagggttatgtctggaatggaggaagcaacccacaggcaaatcgacagacctccgacagcagttcagccaaaatgtctactccagcagacaaggtcttacggaaatttgagaataaaattaatttagataagctaaatgttactgattccgtcataaataaagtcaccgaaaagtctagacaaaaggaagcagatatgtatcgcatcaaagataaggcagacagagcaactgtagaacaggtgttggatcccagaacaagaatgattttattcaagatgttgactagaggaatcataacagagataaatggctgcattagcacaggaaaagaagctaatgtataccatgctagcacagcaaatggagagagcagagcaatcaaaatttataaaacttctattttggtgttcaaagatcgggataaatatgtaagtggagaattcagatttcgtcatggctattgtaaaggaaaccctaggaaaatggtgaaaacttgggcagaaaaagaaatgaggaacttaatcaggctaaacacagcagagataccatgtccagaaccaataatgctaagaagtcatgttcttgtcatgagtttcatcggtaaagatgacatgcctgcaccactcttgaaaaatgtccagttatcagaatccaaggctcgggagttgtacctgcaggtcattcagtacatgagaagaatgtatcaggatgccagacttgtccatgcagatctcagtgaatttaacatgctgtaccacggtggaggcgtgtatatcattgacgtgtctcagtccgtggagcacgaccacccacatgccttggagttcttgagaaaggattgcgccaacgtcaatgatttctttatgaggcacagtgttgctgtcatgactgtgcgggagctctttgaatttgtcacagatccatccattacacatgagaacatggatgcttatctctcaaaggccatggaaatagcatctcaaaggaccaaggaagaacggtctagccaagatcatgtggatgaagaggtgtttaagcgagcatatattcctagaaccttgaatgaagtgaaaaattatgagagggatatggacataattatgaaattgaaggaagaggacatggccatgaatgcccaacaagataatattctataccagactgttacaggattgaagaaagatttgtcaggagttcagaaggtccctgcactcctagaaaatcaagtggaggaaaggacttgttctgattcagaagatattggaagctctgagtgctctgacacagactctgaagagcagggagaccatgcccgccccaagaaacacaccacggaccctgacattgataaaaaagaaagaaaaaagatggtcaaggaagcccagagagagaaaagaaaaaacaaaattcctaaacatgtgaaaaaaagaaaggagaagacagccaagacgaaaaaaggcaaatagaatgagaaccatattatgtacagtcattttcctcagttccttttctcgcctgaactcttaagctgcatctggaagatggcttattggttttaaccagattgtcatcgtggcactgtctgtgaagacggattcaaatgttttcatgtaactatgtaaaaagctctaagctctagagtctagatccagtcactgactctgtctggtgttgacagaggatttatttaagctattattttaataaagaactttgtacatttttatttttatatttttttctcttacaaatatgtttttggaagcatgataaatgtttaaatgtagtcaacatctgtaactcttacatgagtgtccagaggcactcatgggaaaattggttttgctttctttgtacacaccagagacccatctgaggtcatctgattataaggccatgtttatataaagggaatttcacccacagttcagctggctgttgattttcactgcaactctgcctttgtgtgtattggcgatcatttgtaatgctcttacacttcgtctttaatgttctttttggagttaggacctctcagttcataaagttttttacaattcaa

SEQ ID NO: 222040 - protein, 862 aa, Artificial Sequence
  derived and/or modified sequence
MSDSGSQLGSMGSLTMKSQLQITVISAKLKENKKNWFGPSPYVEVTVDGQSKKTEKCNNTNSPKWKQPLTVIVTPVSKLHFRVWSHQTLKSDVLLGTAALDIYETLKSNNMKLEEVVVTLQLGGDKEPTETIGDLSICLDGLQLESEVVTNGETTCSESASQNDDGSRSKDETRVSTNGSDDPEDAGAGENRRVSGNNSPSLSNGGFKPSRPPRPSRPPPPTPRRPASVNGSPSATSESDGSSTGSLPPTNTNTNTSEGATSGLIIPLTISGGSGPRPLNPVTQAPLPPGWEQRVDQHGRVYYVDHVEKRTTWDRPEPLPPGWERRVDNMGRIYYVDHFTRTTTWQRPTLESVRNYEQWQLQRSQLQGAMQQFNQRFIYGNQDLFATSQSKEFDPLGPLPPGWEKRTDSNGRVYFVNHNTRITQWEDPRSQGQLNEKPLPEGWEMRFTVDGIPYFVDHNRRTTTYIDPRTGKSALDNGPQIAYVRDFKAKVQYFRFWCQQLAMPQHIKITVTRKTLFEDSFQQIMSFSPQDLRRRLWVIFPGEEGLDYGGVAREWFFLLSHEVLNPMYCLFEYAGKDNYCLQINPASYINPDHLKYFRFIGRFIAMALFHGKFIDTGFSLPFYKRILNKPVGLKDLESIDPEFYNSLIWVKENNIEECDLEMYFSVDKEILGEIKSHDLKPNGGNILVTEENKEEYIRMVAEWRLSRGVEEQTQAFFEGFNEILPQQYLQYFDAKELEVLLCGMQEIDLNDWQRHAIYRHYARTSKQIMWFWQFVKEIDNEKRMRLLQFVTGTCRLPVGGFADLMGSNGPQKFCIEKVGKENWLPRSHTCFNRLDLPPYKSYEQLKEKLLFAIEETEGFGQE

SEQ ID NO: 222041 - protein, 752 aa, Artificial Sequence
  derived and/or modified sequence
MKLEEVVVTLQLGGDKEPTETIGDLSICLDGLQLESEVVTNGETTCSESASQNDDGSRSKDETRVSTNGSDDPEDAGAGENRRVSGNNSPSLSNGGFKPSRPPRPSRPPPPTPRRPASVNGSPSATSESDGSSTGSLPPTNTNTNTSEGATSGLIIPLTISGGSGPRPLNPVTQAPLPPGWEQRVDQHGRVYYVDHVEKRTTWDRPEPLPPGWERRVDNMGRIYYVDHFTRTTTWQRPTLESVRNYEQWQLQRSQLQGAMQQFNQRFIYGNQDLFATSQSKEFDPLGPLPPGWEKRTDSNGRVYFVNHNTRITQWEDPRSQGQLNEKPLPEGWEMRFTVDGIPYFVDHNRRTTTYIDPRTGKSALDNGPQIAYVRDFKAKVQYFRFWCQQLAMPQHIKITVTRKTLFEDSFQQIMSFSPQDLRRRLWVIFPGEEGLDYGGVAREWFFLLSHEVLNPMYCLFEYAGKDNYCLQINPASYINPDHLKYFRFIGRFIAMALFHGKFIDTGFSLPFYKRILNKPVGLKDLESIDPEFYNSLIWVKENNIEECDLEMYFSVDKEILGEIKSHDLKPNGGNILVTEENKEEYIRMVAEWRLSRGVEEQTQAFFEGFNEILPQQYLQYFDAKELEVLLCGMQEIDLNDWQRHAIYRHYARTSKQIMWFWQFVKEIDNEKRMRLLQFVTGTCRLPVGGFADLMGSNGPQKFCIEKVGKENWLPRSHTCFNRLDLPPYKSYEQLKEKLLFAIEETEGFGQE

SEQ ID NO: 222042 - DNA, 2589 bp, Artificial Sequence
  derived and/or modified sequence
atgagcgatagtggatctcagctgggatccatgggatcactaacgatgaagagccagttgcaaattacagtgatatcagccaagttaaaggagaataagaagaactggttcggcccctctccctatgtcgaagtgacggtggacgggcagagcaagaagacagaaaagtgtaataacaccaactcacctaagtggaaacagccactgactgtcattgtcactcccgtgtcaaagctgcattttcgcgtttggagtcaccagaccttgaaatccgatgtgttactcggaactgccgccctagatatttacgagacacttaagtccaataacatgaaactggaagaggtcgtcgtgaccctacagctggggggcgacaaggaacccaccgagactatcggggacctcagcatctgtctggatggcttgcagctggaaagcgaagtggtgacgaatggcgagacaacctgttccgaatcggcttcacagaatgacgatggttccaggtccaaagacgaaacccgggtctcaaccaatgggtccgacgaccccgaagacgccggagcaggggagaacaggagagtttcaggtaacaactctcctagcctgtctaatggaggtttcaagccatcccgtccaccacgcccaagccggcctccccccccaacccctagacggccagcctccgtgaacggctccccctccgcgacctctgaatccgatggttcttcaacaggttcccttccccccacgaacacaaacaccaataccagcgagggcgccaccagcggacttataatcccgctaactatttcagggggtagtgggccaagaccactgaacccggttacccaggcaccccttccccctgggtgggagcagagggttgaccagcatggccgagtctattatgttgaccacgtggagaaacggaccacgtgggatagacccgagcctcttccacctggctgggagagacgagttgacaatatggggcgaatttattatgtcgaccactttaccagaacaactacttggcagcgtccgactctcgagtccgtacgcaactacgagcagtggcagttgcagcggtctcagctccagggtgcaatgcaacagtttaaccaacgattcatctacggcaatcaggacttgttcgcaacttcccagagtaaggaattcgaccctctggggcctctccctcctgggtgggaaaaacgcacggactctaacgggcgggtgtacttcgtcaatcacaatactagaattactcagtgggaggaccctaggagccaaggccagttaaacgaaaagcccctacctgaaggctgggagatgagattcactgtggatggcatcccatacttcgtggaccacaaccgtaggacaaccacctatattgacccgaggaccggcaagagcgccctggataacggccctcaaattgcttatgttcgagacttcaaggcaaaagtccaatacttccgattctggtgccagcagctggccatgccccaacatatcaaaataacagtcacgaggaaaacgttgttcgaagatagctttcaacagatcatgagtttttcaccccaggatctgcgccggcggctgtgggtgattttccctggagaggaaggattggactacggaggtgttgcccgggagtggttcttcttgctatctcacgaggttctcaaccccatgtattgtctgtttgagtacgccggaaaagacaactattgtctgcaaatcaatcccgcatcttatatcaacccagaccacttgaagtacttcagatttatcgggcggttcatcgcaatggccctgttccacggaaagtttatagacacgggtttctcactccctttctacaagcgcatcctcaataagccagtcggactgaaggacttagaatccatcgacccagagttctacaattctctcatctgggtgaaagaaaacaacattgaagagtgtgatttggagatgtattttagcgtggacaaggaaatccttggagaaataaagtcccacgacctgaagcctaacggagggaacatcttggttaccgaagaaaacaaagaagagtacatccggatggttgctgagtggaggttgagcagaggcgtagaagagcagacacaggctttttttgaagggttcaacgaaattctgcctcagcagtatctgcagtatttcgacgcaaaggagcttgaagtgcttctttgtggcatgcaggagatcgatctgaatgattggcagcgccacgccatctaccggcattatgcccgtacaagcaagcagattatgtggttttggcagttcgtgaaggagatagacaatgaaaaaagaatgaggctgttgcagttcgtgaccggaacatgtcgcttgcccgtgggtggatttgctgaccttatgggcagcaatggaccacagaaattttgtatcgaaaaggtgggtaaagaaaattggctgccccggtctcatacctgttttaacaggttggacctgccaccttataagtcctacgaacagctaaaagaaaagcttctctttgccattgaggagacagagggattcggtcaggaatag

SEQ ID NO: 222043 - DNA, 6401 bp, Artificial Sequence
  derived and/or modified sequence
gcgctcaggcgcctgcgctttagctgctaactcgctctagtagctgtggtcggggctcgggaccggctgccatcttagtctagggactgaggagtcgccgccgccccgagtcccggtaccatgcatttcacggtggccttgtggagacaacgccttaacccaaggaagtgactcaaactgtgagaacttcaggttttccaacctattggtggtatgtctgacagtggatcacaacttggttcaatgggtagcctcaccatgaaatcacagcttcagatcactgtcatctcagcaaaacttaaggaaaataagaagaattggtttggaccaagtccttacgtagaggtcacagtagatggacagtcaaagaagacagaaaaatgcaacaacacaaacagtcccaagtggaagcaaccccttacagttatcgttacccctgtgagtaaattacattttcgtgtgtggagtcaccagacactgaaatctgatgttttgttgggaactgctgcattagatatttatgaaacattaaagtcaaacaatatgaaacttgaagaagtagttgtgactttgcagcttggaggtgacaaagagccaacagagacaataggagacttgtcaatttgtcttgatgggctacagttagagtctgaagttgttaccaatggtgaaactacatgttcagaaagtgcttctcagaatgatgatggctccagatccaaggatgaaacaagagtgagcacaaatggatcagatgaccctgaagatgcaggagctggtgaaaataggagagtcagtgggaataattctccatcactctcaaatggtggttttaaaccttctagacctccaagaccttcacgaccaccaccacccaccccacgtagaccagcatctgtcaatggttcaccatctgccacttctgaaagtgatgggtctagtacaggctctctgccgccgacaaatacaaatacaaatacatctgaaggagcaacatctggattaataattcctcttactatatctggaggctcaggccctaggccattaaatcctgtaactcaagctcccttgccacctggttgggagcagagagtggaccagcacgggcgagtttactatgtagatcatgttgagaaaagaacaacatgggatagaccagaacctctacctcctggctgggaacggcgggttgacaacatgggacgtatttattatgttgaccatttcacaagaacaacaacgtggcagaggccaacactggaatccgtccggaactatgaacaatggcagctacagcgtagtcagcttcaaggagcaatgcagcagtttaaccagagattcatttatgggaatcaagatttatttgctacatcacaaagtaaagaatttgatcctcttggtccattgccacctggatgggagaagagaacagacagcaatggcagagtatatttcgtcaaccacaacacacgaattacacaatgggaagaccccagaagtcaaggtcaattaaatgaaaagcccttacctgaaggttgggaaatgagattcacagtggatggaattccatattttgtggaccacaatagaagaactaccacctatatagatccccgcacaggaaaatctgccctagacaatggacctcagatagcctatgttcgggacttcaaagcaaaggttcagtatttccggttctggtgtcagcaactggccatgccacagcacataaagattacagtgacaagaaaaacattgtttgaggattcctttcaacagataatgagcttcagtccccaagatctgcgaagacgtttgtgggtgatttttccaggagaagaaggtttagattatggaggtgtagcaagagaatggttctttcttttgtcacatgaagtgttgaacccaatgtattgcctgtttgaatatgcagggaaggataactactgcttgcagataaaccccgcttcttacatcaatccagatcacctgaaatattttcgttttattggcagatttattgccatggctctgttccatgggaaattcatagacacgggtttttctttaccattctataagcgtatcttgaacaaaccagttggactcaaggatttagaatctattgatccagaattttacaattctctcatctgggttaaggaaaacaatattgaggaatgtgatttggaaatgtacttctccgttgacaaagaaattctaggtgaaattaagagtcatgatctgaaacctaatggtggcaatattcttgtaacagaagaaaataaagaggaatacatcagaatggtagctgagtggaggttgtctcgaggtgttgaagaacagacacaagctttctttgaaggctttaatgaaattcttccccagcaatatttgcaatactttgatgcaaaggaattagaggtccttttatgtggaatgcaagagattgatttgaatgactggcaaagacatgccatctaccgtcattatgcaaggaccagcaaacaaatcatgtggttttggcagtttgttaaagaaattgataatgagaagagaatgagacttctgcagtttgttactggaacctgccgattgccagtaggaggatttgctgatctcatggggagcaatggaccacagaaattctgcattgaaaaagttgggaaagaaaattggctacccagaagtcatacctgttttaatcgcctggacctgccaccatacaagagctatgagcaactgaaggaaaagctgttgtttgccatagaagaaacagaaggatttggacaagagtaacttctgagaacttgcaccatgaatgggcaagaacttatttgcaatgtttgtccttctctgcctgttgcacatcttgtaaaattggacaatggctctttagagagttatctgagtgtaagtaaattaatgttctcatttagatttatctcccagtgatttctactcagcgtttccagaaatcaggtctgcaaatgactagtcagaaccttgcttaacatgagattttaacacaacaatgaaatttgccttgtcttattccactagtttattcctttaacaacaatattttatgtgtgtcaaaagtctcacttgggagtagtgtttttttcttttagacattctgcagacatgcagggaagtcctttggtaactgcaatatacaagattttcctattaagcctcttggtaagaggcatttgttaaaagtgcaagcttactcctgcttctggggatgtgagcaaaattcgggcttgtgttctccctctcattttagtctgacttgactattgtttttcctttctggcgcatgaatccatacatcattcctggaagtgaggcaagactcttgcatctctacaaagtagttttgtcaatttgaattcagggaaaagttggtcacagcctgcaaatgacttcatttggaagtctgattgtttcagttgcctgacaaatactacactttacaaacaatgttaacactgtgattccttcattgttttaagaagttaacctagggccgggcatggtggctcatacctgtaatcctagcactctgggaggccgaggcaggaggatccctttagcccaggagttaaagaccagcctgggcaacatagggagaccctgtcttttttttgggcagcgtggtgggggataaataaataaaaggaaaaaaaacttagcctagaattagaattaatttaattgaattcatctaaagatgtctctggtgatttttatatgttccgctatataattgatgctttatagttttatcataatccaacaacttcagttatatttaattattgttaaggagtttaagactagaaagactagagtgctttctagtccaaatagaggtcagtgaaacagcttttgacatcagattttcatttgagagggagagctgtggtactggctaaaaagaaaggaagataacatccagtaaccacaggaatatattctctgtgaattaaaagtcttcaaagttatcatttctctgacatatgttggagtagtcatttccattctttacattgtcatgaactggattgataaccctcatctgcaatattttcacccctaaaatttttaacagggtttcctttttttctcacgactatttaagtttagattgctccattattaactgattaatgcactttgaagttctctggaattaattattttaacttggcctagcttcgactgtcaaggtggctgttataaatttgacttcattggcagtggatgaagcctaagccagctgagtctctatcatagctgaaccctgaggacagcctcatagctcatgtatcagggacttttgccacatttcagaggcatagcatgaacaagtaatattaagccaagaataagcagcagaaccctgttccatatggaaaaaagaaaaacaattttttgtccctaatgttcttccttttacatcctggaacaacaataaaaacatttttttaaacttgtctactgtaagatactgccatcataaagcagagacttacatgagtgaaagggttgcctcatcaagcagctcagtgtaaatggggaggctaggctctccccagccctatggtttttttatttcatgtaccccaggaaatactgtgtggtttctaaaagccctggttgttaaaagtagggactctgcctttttgttggtagggagaaaaaacgctattgctttgtcttacagagcgaatgtctgccaactacccgttcattatataagtctgaacttggtaatatatggctaatgaagattaagccctctataaagacttcctgttgaggtgaattctcatactgaaatgtagttacctacaatatttactagagatttatgaaattaaattaagagataatgtaagaaaatacatttttttggttctatataatgcttcatgattcatttagggacctagaaatattgtgtgaaaatatataaatatcacccaaaaggctttctgccctatatttttaaaatacagaatagttatatttgaagtagccctggccctagttctatagggcttggctatttaatatttttatggaagaagtgtttagttctggaaaaggtaaatgcttgtatatatttttgcagcctgggatctccctactccattttttcctttaatttaagtggccacatgtatatgtcttccctgctgtgttaggaaaatgggggctggatatcccaagaatcagaggttatataaaaatactgcaaatagaccgcagacataaatatctaccaaatgctatcttaaattttggtccaaactgaacatatggaaatagatttattgtaagtatttacttagagctttttcttaaatctgaactaacttgcttttagaagtctttttctttgtaagcattgtaaatgctaataaatcctgttaatttttttttttttttttttttttttttactgcatgttacattgaaataaaaacaaagtaaaatgagcaattgccttattgttctgctcttttgcagggggtgggggttggggaagacagcattccacagcctggtcaggagggaaggacctcacttgtttcatcaaatggagtggtttaaaactgatcaagcagctcataataatgaattcctgctctgtcttttattatcttatgtcagagtgcagcaaaatctcatttcataagacttacaataactctatttaaaattcaggtattgtactcgggaggctgaggtgggaggatcccaggagttcaaatcctgcctgggcaacatagcaagaccctgtctcttaaaaaaacaaaaagacatattcaggtactgatttttcatcaagagattgacataccaatgatcagaaattttagtgaaacttgactcaactatacacaaagttctcatcctaaatgaactatttcagtcaagcccactctaccactttttacttatctggttaataatccgaaatgttaccggggttgactcacggaattaaatttttcctctatttttatatcctttcctgttgtggatgtaacttacctttctaaactcctttagagttaacgacttctatttagtattgttggtatctccagcccccctcctttttttgtttttcttttagttatttactttgtttgtataatttgctttcattaactaaaaatggaattggcagcactggattgtatattactgtattaagagtacctttgttttcttgatctgttacttttaatactcaggtaatgctacaaatattacagggagtcaaatgcttttataaagttccttcagtggttgcctcacttgcgttttcctacaagatgtaagactgtttataattaaacttttttggtccttca

SEQ ID NO: 222044 - DNA, 2940 bp, Artificial Sequence
  derived and/or modified sequence
agctgtggtcggggctcgggaccggctgccatcttagtctagggactgaggagtcgccgccgccccgagtcccggtaccatgcatttcacggtggccttgtggagacaacgccttaacccaaggaagtgactcaaactgtgagaacttcaggttttccaacctattggtggtatgtctgacagtggatcacaacttggttcaatgggtagcctcaccatgaaatcacagcttcagatcactgtatcgttacccctgtgagtaaattacattttcgtgtgtggagtcaccagacactgaaatctgatgttttgttgggaactgctgcattagatatttatgaaacattaaagtcaaacaatatgaaacttgaagaagtagttgtgactttgcagcttggaggtgacaaagagccaacagagacaataggagacttgtcaatttgtcttgatgggctacagttagagtctgaagttgttaccaatggtgaaactacatgttcagaaagtgcttctcagaatgatgatggctccagatccaaggatgaaacaagagtgagcacaaatggatcagatgaccctgaagatgcaggagctggtgaaaataggagagtcagtgggaataattctccatcactctcaaatggtggttttaaaccttctagacctccaagaccttcacgaccaccaccacccaccccacgtagaccagcatctgtcaatggttcaccatctgccacttctgaaagtgatgggtctagtacaggctctctgccgccgacaaatacaaatacaaatacatctgaaggagcaacatctggattaataattcctcttactatatctggaggctcaggccctaggccattaaatcctgtaactcaagctcccttgccacctggttgggagcagagagtggaccagcacgggcgagtttactatgtagatcatgttgagaaaagaacaacatgggatagaccagaacctctacctcctggctgggaacggcgggttgacaacatgggacgtatttattatgttgaccatttcacaagaacaacaacgtggcagaggccaacactggaatccgtccggaactatgaacaatggcagctacagcgtagtcagcttcaaggagcaatgcagcagtttaaccagagattcatttatgggaatcaagatttatttgctacatcacaaagtaaagaatttgatcctcttggtccattgccacctggatgggagaagagaacagacagcaatggcagagtatatttcgtcaaccacaacacacgaattacacaatgggaagaccccagaagtcaaggtcaattaaatgaaaagcccttacctgaaggttgggaaatgagattcacagtggatggaattccatattttgtggaccacaatagaagaactaccacctatatagatccccgcacaggaaaatctgccctagacaatggacctcagatagcctatgttcgggacttcaaagcaaaggttcagtatttccggttctggtgtcagcaactggccatgccacagcacataaagattacagtgacaagaaaaacattgtttgaggattcctttcaacagataatgagcttcagtccccaagatctgcgaagacgtttgtgggtgatttttccaggagaagaaggtttagattatggaggtgtagcaagagaatggttctttcttttgtcacatgaagtgttgaacccaatgtattgcctgtttgaatatgcagggaaggataactactgcttgcagataaaccccgcttcttacatcaatccagatcacctgaaatattttcgttttattggcagatttattgccatggctctgttccatgggaaattcatagacacgggtttttctttaccattctataagcgtatcttgaacaaaccagttggactcaaggatttagaatctattgatccagaattttacaattctctcatctgggttaaggaaaacaatattgaggaatgtgatttggaaatgtacttctccgttgacaaagaaattctaggtgaaattaagagtcatgatctgaaacctaatggtggcaatattcttgtaacagaagaaaataaagaggaatacatcagaatggtagctgagtggaggttgtctcgaggtgttgaagaacagacacaagctttctttgaaggctttaatgaaattcttccccagcaatatttgcaatactttgatgcaaaggaattagaggtccttttatgtggaatgcaagagattgatttgaatgactggcaaagacatgccatctaccgtcattatgcaaggaccagcaaacaaatcatgtggttttggcagtttgttaaagaaattgataatgagaagagaatgagacttctgcagtttgttactggaacctgccgattgccagtaggaggatttgctgatctcatggggagcaatggaccacagaaattctgcattgaaaaagttgggaaagaaaattggctacccagaagtcatacctgttttaatcgcctggacctgccaccatacaagagctatgagcaactgaaggaaaagctgttgtttgccatagaagaaacagaaggatttggacaagagtaacttctgagaacttgcaccatgaatgggcaagaacttatttgcaatgtttgtccttctctgcctgttgcacatcttgtaaaattggacaatggctctttagagagttatctgagtgtaagtaaattaatgttctcatttagatttatctcccagtgatttctactcagcgtttccagaaatcaggtctgcaaatgactagtcagaaccttgcttaacatgagattttaacacaacaatgaaatttgccttgtcttattccactagtttattcctttaacaacaatattttatgtgtgtcaaaagtctcacttgggagtagtg

SEQ ID NO: 222045 - DNA, 2589 bp, Artificial Sequence
  derived and/or modified sequence
atgtctgacagcggcagccagctgggctccatgggcagcctgaccatgaagagccagctgcagatcaccgtcatcagcgccaagctgaaggagaacaagaagaactggtttggccccagcccctacgtggaggtgacagtggatggccagagcaagaagacagagaagtgcaacaacaccaacagccccaagtggaagcagcccctgaccgtcatcgtgacccctgtgtccaagctgcacttccgggtgtggagccaccagaccctgaagagtgatgtgctgctgggcacagctgccctggacatctatgagaccctgaagagcaacaacatgaagctggaggaggtggtggtgaccctgcagctgggcggggacaaggagcccacagagaccatcggggacctgagcatctgcctggatggcctgcagctggagagcgaggtggtgaccaatggagagaccacctgcagcgagagcgccagccagaatgatgatggcagccgcagcaaggatgagaccagggtgtccaccaacggcagtgatgatcctgaagatgctggggccggggagaacagaagagtgtctggcaacaacagccccagcctgagcaatggaggcttcaagcccagccggcccccccggcccagccggcccccaccacccaccccccggcggcctgcctctgtgaatggcagccccagcgccaccagcgagagtgatggcagcagcacaggcagcctgccccccaccaacaccaacaccaacaccagcgagggcgccaccagcggcctcatcatccccctgaccatcagcggcggcagcggcccccggcccctgaaccctgtgacccaggcccccctgcccccaggctgggagcagagggtggaccagcacggccgggtgtactacgtggaccacgtggagaagaggaccacctgggacaggcctgagcccctgcccccaggctgggagaggagagtggacaacatgggccgcatctactacgtggaccacttcaccaggaccaccacctggcagaggcccaccctggagagcgtgaggaactatgagcagtggcagctgcagaggagccagctgcagggcgccatgcagcagttcaaccagcgcttcatctacggcaaccaggacctgtttgccaccagccagagcaaggagtttgaccccctgggccccctgcccccaggctgggagaagaggacagacagcaatggccgggtgtactttgtgaaccacaacacccgcatcacccagtgggaggaccccaggagccagggccagctgaatgagaagcccctgcctgagggctgggagatgaggttcaccgtggatggcatcccctactttgtggaccacaacagaaggaccaccacctacatcgaccccaggacaggcaagagcgccctggacaatggcccccagatcgcctacgtgcgggacttcaaggccaaggtgcagtacttccgcttctggtgccagcagctggccatgccccagcacatcaagatcaccgtgaccaggaagaccctgtttgaggacagcttccagcagatcatgtccttcagcccccaggacctgcggcggcggctgtgggtgatcttccctggagaggagggcctggactatggaggagtggcccgggagtggttcttcctgctgagccatgaggtgctgaaccccatgtactgcctgtttgaatatgctgggaaggacaactactgcctgcagatcaacccagccagctacatcaacccagaccacctgaagtacttccgcttcatcggccgcttcatcgccatggccctcttccacggcaagttcatcgacaccggcttcagcctgcccttctacaagaggatcctgaacaagcctgtgggcctgaaggacctggagagcattgatcctgagttctacaacagcctcatctgggtgaaggagaacaacattgaagaatgtgacctggagatgtacttctctgtggacaaggagatcctgggggagatcaagagccatgacctgaagcccaacggcggcaacatcctggtgacagaggagaacaaggaggagtacatccgcatggtggccgagtggaggctgagccggggcgtggaggagcagacccaggccttctttgagggcttcaatgagatcctgccccagcagtacctgcagtactttgatgccaaggagctggaggtgctgctgtgtggcatgcaggagattgacctgaatgactggcagagacatgccatctaccgccactacgcccggaccagcaagcagatcatgtggttctggcagtttgtgaaggagattgacaatgagaagaggatgaggctgctgcagtttgtgacaggcacctgccgcctgcctgtgggcggctttgctgacctgatgggcagcaatggcccccagaagttctgcatcgagaaggtgggcaaggagaactggctgcccaggagccacacctgcttcaaccggctggacctgcccccctacaagagctatgagcagctgaaggagaagctgctgtttgccatcgaggagacagagggcttcggccaggagtag

SEQ ID NO: 222046 - DNA, 2589 bp, Artificial Sequence
  derived and/or modified sequence
atgagcgacagcggcagccagctgggcagcatgggcagcctgaccatgaagtctcaactccaaatcacagtaatctccgcaaagctgaaagaaaataagaagaactggttcggaccctccccttacgtcgaggtgaccgttgatgggcaaagtaaaaaaaccgagaaatgcaacaacactaactcacctaagtggaaacagcccttgactgtgattgtaaccccggtctccaagctgcattttagggtctggtcccatcaaactttgaagtcagacgtgctcctagggacggctgctctcgatatttatgaaactctgaaatctaacaacatgaaactcgaagaggtcgtggtaactctgcagctggggggcgataaggagcctactgagactatcggcgatctttcaatttgcctcgacggcctccaactggagagtgaagtagttactaacggcgaaaccacatgtagcgaaagtgccagccaaaacgatgatgggtccagaagcaaagacgaaacgcgggtgagcaccaatggaagtgacgatccggaggatgctggggctggggaaaatcgtagggtgagcgggaacaactctccgagtctgagcaatggaggatttaagccatctaggcctccacggccctcgcgccctccgcctcccactccaagacggcctgcttccgtaaacggctcaccctctgctacctccgagtctgacgggtccagtacgggttctcttccacccacaaataccaatacgaatacatctgagggggccacaagtggattaattattcctcttaccatttcaggcggtagcggaccacggcccctcaaccccgtcacccaggcccctctgcctcctggctgggaacagcgcgtggaccaacatgggcgcgtgtattacgtagaccacgtcgagaagagaactacttgggacagacctgagccactgccacccggctgggaacggagggtggataacatgggccgcatttattatgtggatcacttcactaggaccacgacctggcagcgccccacacttgagagcgtgcggaattacgagcagtggcaacttcagcgttcccagttgcaaggggccatgcagcagttcaaccaacggtttatttatggcaatcaggacctgttcgcaacctctcagtcaaaagagtttgaccccctggggcccttaccgccaggctgggagaaaaggaccgattcgaatggaagagtttacttcgtaaaccacaacactcggattacacaatgggaagatccgcgcagtcagggacagctgaacgagaaacctctgcccgaggggtgggagatgcgcttcacggtcgatggaattccatatttcgtcgaccataacagaaggactacaacttacattgaccccagaactggaaaaagtgccctggacaatggtcctcagatcgcatacgtgcgcgacttcaaagccaaagtccagtattttagattctggtgccagcagctggccatgccccagcatatcaaaataacggtgactcgcaaaacattgtttgaagattcttttcagcagataatgagcttcagcccccaggatttgcggcgtcggctctgggtgatcttccccggggaggaagggctggattatggaggcgtggccagggagtggttcttcctgctgtcacatgaagtgttgaacccaatgtactgtctgtttgaatatgcgggtaaggataactactgcctgcagatcaaccctgcttcctacattaaccctgatcatctgaaatacttccggttcattggacgatttattgctatggcgctctttcatgggaaatttatagacactggattcagcctcccattttacaagcggatactcaacaagccagtgggactgaaagaccttgagtccatagatcccgaattttacaacagtctcatttgggtgaaggagaataatatcgaggagtgcgatctggaaatgtacttttcagttgacaaagaaatcctgggagagatcaagtcacatgacttgaaaccgaatggagggaacatccttgtgactgaggagaacaaggaagagtatatccggatggttgccgaatggagactatcaaggggggtagaggagcaaacacaggccttcttcgagggctttaacgagatattgccccagcagtacctacagtactttgacgctaaggagctggaggtgctcttgtgtggtatgcaggagatcgacttaaacgactggcagcggcacgcaatttatagacactatgcccgcaccagcaaacagataatgtggttctggcagtttgtgaaagagatagacaacgagaaacggatgagactgctgcagtttgtgaccgggacctgccggttgccagtcggcgggttcgcggacctgatgggatctaacgggccacagaagttttgcattgagaaggttgggaaggagaattggttaccgaggagccacacctgcttcaataggttagacctcccgccttataagagctacgagcaattgaaggaaaagctcctttttgccatcgaagagaccgaggggtttggccaggagtag

SEQ ID NO: 222047 - DNA, 2589 bp, Artificial Sequence
  derived and/or modified sequence
atgagtgactccggcagtcagcttgggtctatgggatctctcacgatgaagtcccagttacaaataactgtgataagcgctaagttgaaggaaaataagaaaaactggttcggcccttcaccctatgtggaggtcaccgttgacggccagtccaagaaaactgaaaaatgtaacaacactaacagccccaaatggaagcaaccgttaaccgttatcgtgacacccgtaagtaaacttcactttcgggtctggtcccaccagaccctcaagtccgatgtgcttctggggaccgcggcactcgacatttatgagaccctcaagtccaacaacatgaaactagaggaggtcgtcgtcaccctgcagctgggtggtgataaagaacccaccgagaccattggtgacctaagcatctgcctcgatgggttgcagcttgagagcgaagtcgtcacgaatggagagactacgtgctccgagtccgcctcacagaatgatgacgggtcaaggagcaaggatgagactcgagtgtcaaccaatgggtcagacgatcctgaagatgctggcgcaggagaaaaccgccgtgtgtctgggaataattcccctagcctgagtaacggcggattcaaaccatcaaggccgcctcgccctagtcggcctccgccacccacaccacgacggcctgcaagcgtcaacggctcgcctagtgctaccagtgaaagcgatggtagttcaacggggtccttaccacccaccaacaccaacacgaatacttccgaaggtgctaccagcggccttataataccgcttacaatctctggcggatcgggaccccgaccattgaatcccgtgacccaggccccattgccgccaggatgggagcaacgggtagaccagcacggacgcgtctattacgttgatcatgttgagaaaaggacaacttgggatcggcctgagcccttacccccaggttgggaacggagagtggacaatatggggcgtatttactatgtggaccacttcactcgcacaaccacatggcaacgtccaactctcgaatccgtgcggaactacgaacagtggcagctccagcgctctcagcttcagggagccatgcagcagtttaatcagcgctttatttacggtaaccaggatctctttgctacttctcagagcaaggagtttgatccgctcggccctctccctcctgggtgggaaaagaggactgactctaacgggcgagtctacttcgtgaatcacaacacgcgcataacccagtgggaagaccctcggagtcagggacagctcaacgagaagcccctccctgagggctgggagatgaggtttacggtggatggcatcccttatttcgtcgaccacaatcggcgaactaccacctatattgacccgaggaccgggaagagcgctctggataacggacctcagatcgcctatgtgcgcgactttaaggccaaggttcagtatttcagattctggtgtcaacagttagctatgccacagcacattaagatcaccgtaacgaggaagaccctgtttgaagatagttttcagcaaatcatgtcattcagcccacaggacttgaggagacgtctgtgggtcattttccccggtgaagaaggtctcgactacggaggggtagctagggaatggttttttctgctctctcacgaggtcctgaacccaatgtattgcttgttcgaatatgcagggaaagacaactactgcttacaaattaacccggcaagctacatcaatcccgatcatctgaagtatttcaggttcattggacgcttcattgcgatggctctgtttcacggcaaatttatagataccggcttttccctgccattttacaagagaattttgaataagccagtggggctcaaggatctggagagcattgacccagagttttataattccctgatttgggtcaaagaaaacaatatcgaagaatgcgacctggaaatgtacttttccgtcgataaggagatcctgggtgagatcaagagtcacgacttgaaacccaacggcggaaacatactggtcactgaagagaacaaggaagagtatatccgaatggtagccgagtggcggctgagccggggagtggaagagcagacccaggctttttttgagggttttaacgagatcctgccccagcagtatctgcagtatttcgacgctaaggagctagaagtgctgctgtgcggaatgcaggaaattgatctgaatgactggcagcggcacgctatatatcgtcactatgctcggactagcaagcagatcatgtggttctggcaattcgtcaaagagattgacaatgagaagagaatgagactcttgcagtttgtgactggcacgtgccgcctccctgtcggtggattcgcagacctgatgggcagcaacggccctcagaagttctgcatcgaaaaagtcggcaaagaaaattggctgcctcgctcccacacgtgtttcaaccggttggatttgcctccctacaagtcctacgaacaactgaaggagaagctgctattcgcaattgaagagaccgagggcttcggccaggaatag

SEQ ID NO: 222048 - DNA, 2589 bp, Artificial Sequence
  derived and/or modified sequence
atgagcgacagcggcagccagctgggcagcatgggcagcctgaccatgaagagccagctgcagatcaccgtgatcagcgccaagctgaaggagaacaagaagaactggttcggccccagcccctacgtggaggtgaccgtggacggccagagcaagaagaccgagaagtgcaacaacaccaacagccccaagtggaagcagcccctgaccgtgatcgtgacccccgtgagcaagctgcacttcagagtgtggagccaccagaccctgaagagcgacgtgctgctgggcaccgccgccctggacatctacgagaccctgaagagcaacaacatgaagctggaggaggtggtggtgaccctgcagctgggcggcgacaaggagcccaccgagaccatcggcgacctgagcatctgcctggacggcctgcagctggagagcgaggtggtgaccaacggcgagaccacctgcagcgagagcgccagccagaacgacgacggcagcagaagcaaggacgagaccagagtgagcaccaacggcagcgacgaccccgaggacgccggcgccggcgagaacagaagagtgagcggcaacaacagccccagcctgagcaacggcggcttcaagcccagcagaccccccagacccagcagaccccccccccccacccccagaagacccgccagcgtgaacggcagccccagcgccaccagcgagagcgacggcagcagcaccggcagcctgccccccaccaacaccaacaccaacaccagcgagggcgccaccagcggcctgatcatccccctgaccatcagcggcggcagcggccccagacccctgaaccccgtgacccaggcccccctgccccccggctgggagcagagagtggaccagcacggcagagtgtactacgtggaccacgtggagaagagaaccacctgggacagacccgagcccctgccccccggctgggagagaagagtggacaacatgggcagaatctactacgtggaccacttcaccagaaccaccacctggcagagacccaccctggagagcgtgagaaactacgagcagtggcagctgcagagaagccagctgcagggcgccatgcagcagttcaaccagagattcatctacggcaaccaggacctgttcgccaccagccagagcaaggagttcgaccccctgggccccctgccccccggctgggagaagagaaccgacagcaacggcagagtgtacttcgtgaaccacaacaccagaatcacccagtgggaggaccccagaagccagggccagctgaacgagaagcccctgcccgagggctgggagatgagattcaccgtggacggcatcccctacttcgtggaccacaacagaagaaccaccacctacatcgaccccagaaccggcaagagcgccctggacaacggcccccagatcgcctacgtgagagacttcaaggccaaggtgcagtacttcagattctggtgccagcagctggccatgccccagcacatcaagatcaccgtgaccagaaagaccctgttcgaggacagcttccagcagatcatgagcttcagcccccaggacctgagaagaagactgtgggtgatcttccccggcgaggagggcctggactacggcggcgtggccagagagtggttcttcctgctgagccacgaggtgctgaaccccatgtactgcctgttcgagtacgccggcaaggacaactactgcctgcagatcaaccccgccagctacatcaaccccgaccacctgaagtacttcagattcatcggcagattcatcgccatggccctgttccacggcaagttcatcgacaccggcttcagcctgcccttctacaagagaatcctgaacaagcccgtgggcctgaaggacctggagagcatcgaccccgagttctacaacagcctgatctgggtgaaggagaacaacatcgaggagtgcgacctggagatgtacttcagcgtggacaaggagatcctgggcgagatcaagagccacgacctgaagcccaacggcggcaacatcctggtgaccgaggagaacaaggaggagtacatcagaatggtggccgagtggagactgagcagaggcgtggaggagcagacccaggccttcttcgagggcttcaacgagatcctgccccagcagtacctgcagtacttcgacgccaaggagctggaggtgctgctgtgcggcatgcaggagatcgacctgaacgactggcagagacacgccatctacagacactacgccagaaccagcaagcagatcatgtggttctggcagttcgtgaaggagatcgacaacgagaagagaatgagactgctgcagttcgtgaccggcacctgcagactgcccgtgggcggcttcgccgacctgatgggcagcaacggcccccagaagttctgcatcgagaaggtgggcaaggagaactggctgcccagaagccacacctgcttcaacagactggacctgcccccctacaagagctacgagcagctgaaggagaagctgctgttcgccatcgaggagaccgagggcttcggccaggagtag

SEQ ID NO: 222049 - protein, 173 aa, Artificial Sequence
  derived and/or modified sequence
MLPPPPRQPPPQARAARGAVRLQRPFLRSPLGVLRLLQLLAGAAFWITIATSKYQGPVHFALFVSVLFWLLTLGLYFLTLLGKHELVPVLGSRWLMVNVAHDVLAAALYGAATGIMSDQMQRHSYCNLKDYPLPCAYHAFLAAAVCGGVCHGLYLLSALYGCGRRCQGKQEVA

SEQ ID NO: 222050 - DNA, 522 bp, Artificial Sequence
  derived and/or modified sequence
atgctgccccccccccccagacagccccccccccaggccagagccgccagaggcgccgtgagactgcagagacccttcctgagaagccccctgggcgtgctgagactgctgcagctgctggccggcgccgccttctggatcaccatcgccaccagcaagtaccagggccccgtgcacttcgccctgttcgtgagcgtgctgttctggctgctgaccctgggcctgtacttcctgaccctgctgggcaagcacgagctggtgcccgtgctgggcagcagatggctgatggtgaacgtggcccacgacgtgctggccgccgccctgtacggcgccgccaccggcatcatgagcgaccagatgcagagacacagctactgcaacctgaaggactaccccctgccctgcgcctaccacgccttcctggccgccgccgtgtgcggcggcgtgtgccacggcctgtacctgctgagcgccctgtacggctgcggcagaagatgccagggcaagcaggaggtggcctag

SEQ ID NO: 222051 - DNA, 522 bp, Artificial Sequence
  derived and/or modified sequence
atgttgccaccaccccctcgccagccgccaccccaggcccgggccgctcgcggggctgttcggctccaacggcccttcctgcgtagtccccttggtgtcctgcggttgctgcaactgttggcaggcgctgctttctggataacaattgccactagtaaatatcagggtcctgtccatttcgccctcttcgtctccgtacttttctggcttctgacactaggcctttattttctaactttgttgggtaaacacgagcttgtcccggtgctcggttctcgctggctcatggtcaatgtagcccacgacgtgctggcagccgcgctctatggagcagcaacaggaatcatgagtgaccagatgcagcgccattcatattgcaacctcaaggactaccccctgccttgtgcctaccacgctttccttgccgcagccgtgtgcggtggcgtttgccatggactgtatttattgagtgcgctgtatggctgcggccgccggtgtcaaggaaagcaggaggttgcctag

SEQ ID NO: 222052 - DNA, 522 bp, Artificial Sequence
  derived and/or modified sequence
atgctgcccccaccaccccggcagcccccaccccaggcccgggccgcccggggagctgtgcggctgcagaggcccttcctgcggagccccctgggcgtgctgcggctgctgcagctgctggccggggccgccttctggatcaccatcgccaccagcaagtaccagggccctgtgcactttgccctgtttgtgtctgtgctcttctggctgctgaccctgggcctgtacttcctgaccctgctgggcaagcatgagctggtgcctgtgctgggcagccgctggctgatggtgaatgtggcccatgatgtgctggccgccgccctgtatggagctgccaccggcatcatgtctgaccagatgcagaggcacagctactgcaacctgaaggactaccccctgccctgtgcctaccacgccttcctggccgctgctgtgtgtggcggcgtgtgccacggcctgtacctgctgagcgccctgtatggctgcggccgccgctgccagggcaagcaggaggtggcctag

SEQ ID NO: 222053 - DNA, 3219 bp, Artificial Sequence
  derived and/or modified sequence
gaaaggaggagaggaagagaggactaagaggggagcaaggcgaggaggccgcggcgggcgcagcgggcacctgggccgtgctgcccccgcgagcaaggcgccgccattccgctgctcggggcgccgccgccgccgccaccgcgcccaggggccatgctcccgccgcccccgcgccagccgccgccccaggcgcgtgcggcccgcggcgcggtgcgcctgcagcggcccttcctgcgcagcccgctgggcgtgttgcggctgctgcagctgctggccggcgctgccttctggatcactatcgccaccagcaagtaccagggccccgtgcacttcgcgctcttcgtgtccgtgctcttctggctgctcaccctgggcctctacttcctcacgctgctgggcaagcacgagctggtccccgtgctgggctcgcgctggctcatggtcaacgtggcgcacgatgtgctggcggccgcgctctacggcgccgccaccggcatcatgagcgaccagatgcagcgccacagctactgcaacctcaaggattacccgctcccctgcgcctaccacgccttcctggcggccgccgtctgcggcggcgtctgccacggcctctacctgctttcggcgctctatggctgcgggcgtcgctgccagggcaagcaggaggtggcgtgaggccgcccgcgcccgccgcggccccgatcggggcgggggaatccccggagaccagcctccttaatcccttcccccgccgccgccccgcgcgggtgcgccctggcaccctctccctgccctccagcgtttccactgtcgcccgcgcccgggaaccctgacgctcagctcccgcccgacggcagcgccgccgccgcccagaatcccagcccagaatcccgaccgccgcgccggacgcgccgtctcccgggacaagcgcaggctgcgatccgaggggctgacacacactcgcagacgagccgccccgaggcgaaacctcgcggttcctcttcccttccctgctgagactaagacgtggacaggggccgcgcagatccgggggaggctcccaaattggaaccaggcttctggctgcccccttccctcccgccccgtggtcggaagagcactcccttccctggcccctcatccagcctccggtgctgtaaaacgcaggcgctgggccgcgggcggagctgaggacaggccttggctggtcccaggatgagcgacgagtttggttttagctggggattgtgctggcatcctgcgaagctcctcccagccggtctctctgtgctcggttgtcttggggtggggcccatccgccgaggtggggaccgataggagaagccggtgggttgtacccttacacttgtggagtctcctcttgcctctacctactccgcctttgtccttaaggtttttgcaggccagtgccaaacacacactaactgtcctggcctctccgtgacacaagtctcttcccagccttcctcacaggcttctgccgcccccctcatctccaccctcccccatatctgtttgcattaggagttccacgaccatggtggaatgttaaggtgaaccccaccccttcttacagatggggacccagagcctgctcttgggaacagccagagtaagattggaacccagacttgcagtccagcgctgtttgcattaaaagggtgggtgagtcaggacccctggctcaggagccgcctctcctaaaagagggtttcaaggccaaatgggtttgtcaacggtgctgtctccctttcttggagatgctcattagcttatcaaagactgagaagtcccgctgttacagaaataatttagtttgctgtattaactgctcctgggcctggagcagtattcccaccttaagattcccagcatccctgtgctgtcccggctctcattcatgccgaagggcccaacccattggctgtgttctgtttgaagatttggggggcgccttctctttcttccccagggaattctctagcagagggaggggacccaccccagtgaggaagtagattgctgcctctagccagagacctgaactggggaatttgaacattcctttacattgttggagaaatgaagccaaagttattcagatggttttcccaggctaaaggaaagtcacctgcaagagatcccggcactgatctggagcagctgacagggtgggtctcccttaccaaagagaagaaccactctctggcgctggggtgacctgctggctgggcctgtaaggtttccatgttgctgaggccatggagattcccagagctggtcacaccgaccgctctcagggcccgctgccctgggctggcaacaccattctggccttggcctgcagaagctttcagagtcttcactggcagtagggggagatggggagaggaatgatctctgcccagccccttcctttccaaaccatgcaatggaagagcccagatgggtgaagattgattttgccttaactcaagagaattcctgttctccttgtgctatgatttggacacaagattctggatacctggaacttagctgtgtactcctgtaccctaaacagtggatttgagttccagcgtttattcttttttccttttttcagatcaccatctaagttacatctttagctcaggtccatccttctcaagatctccttcttagccccccagcccctggtgctgtctgtggtcaggtgaccttactcaggagcagatatctccttggccgccatggagcctcatccatccacacgtgcctgtagcattccagagctcactgcccttctagatgtgccttcccgcttggcttccagcggcttgtgctcactctgtctgccaggtatgagaagaacacgtaagaccgccaccacactcaccctccctcaaggccctgtgccataggggtggccacccgacctgcccccagaacttttggatactggaggcagttgcataggtctccctctctgggcaccaggactcagtccagcccaagactactctgggcagctcccatcccagtctggggccatttgcagactcaggaaaggatttctacagtgttctataaaagccaaaagagagagtgggtttgggaagagtgagggtggttggggagaggggaccgatgtgcctcattgtttagtggtgattacaaatatgcttttctggataaagtttggttgtttgctcttgg

SEQ ID NO: 222054 - DNA, 522 bp, Artificial Sequence
  derived and/or modified sequence
atgctgcccccccccccccggcagccccccccccaggcccgggccgcccggggcgcagtgcgactacagaggccctttttgcgatcaccattgggggtgcttcggctgctccagcttctggctggggccgctttttggatcacaattgccacctctaaataccaaggccctgtgcattttgctctctttgttagtgtcctcttttggctgttaaccttaggcctttatttcctgaccctgctgggtaaacatgagttagtgcctgtgttggggtctcggtggctgatggtaaatgttgcccatgacgtcctggcagctgccctgtacggcgctgccaccgggatcatgagcgatcagatgcagcggcattcttactgtaatctgaaagattatccgcttccctgtgcatatcacgcgttcctggctgctgcagtttgtggtggtgtgtgtcacgggctgtatctcctcagtgccctttatggctgtggtagaagatgccaaggtaagcaggaggtcgcatag

SEQ ID NO: 222055 - DNA, 522 bp, Artificial Sequence
  derived and/or modified sequence
atgctgccaccacctcccaggcaacccccaccgcaggctagagccgctcgtggggctgtccgcctccagcgacccttcttgcgcagcccattgggtgtgctgagactacttcagctcctggctggagccgctttttggattacaattgcaaccagtaagtaccagggccctgttcattttgctcttttcgtgagcgttcttttttggctgctcactctcggcttgtactttcttacccttctcggcaagcacgaattggtgccggtactgggctcgagatggctcatggtgaacgtggcccacgatgtgcttgccgcagcgctgtatggagctgctaccggaattatgtctgaccagatgcagcgccactcatactgtaatctaaaagactatcccctgccgtgcgcctaccatgcctttctggccgcagctgtctgcggaggagtgtgtcatgggttgtacctgttatccgccctctatggctgcggcaggcgatgtcagggaaaacaggaagtggcctag

SEQ ID NO: 222056 - protein, 705 aa, Artificial Sequence
  derived and/or modified sequence
MEKPRSIEETPSSEPMEEEEDDDLELFGGYDSFRSYNSSVGSESSSYLEESSEAENEDREAGELPTSPLHLLSPGTPRSLDGSGSEPAVCEMCGIVGTREAFFSKTKRFCSVSCSRSYSSNSKKASILARLQGKPPTKKAKVLHKAAWSAKIGAFLHSQGTGQLADGTPTGQDALVLGFDWGKFLKDHSYKAAPVSCFKHVPLYDQWEDVMKGMKVEVLNSDAVLPSRVYWIASVIQTAGYRVLLRYEGFENDASHDFWCNLGTVDVHPIGWCAINSKILVPPRTIHAKFTDWKGYLMKRLVGSRTLPVDFHIKMVESMKYPFRQGMRLEVVDKSQVSRTRMAVVDTVIGGRLRLLYEDGDSDDDFWCHMWSPLIHPVGWSRRVGHGIKMSERRSDMAHHPTFRKIYCDAVPYLFKKVRAVYTEGGWFEEGMKLEAIDPLNLGNICVATVCKVLLDGYLMICVDGGPSTDGLDWFCYHASSHAIFPATFCQKNDIELTPPKGYEAQTFNWENYLEKTKSKAAPSRLFNMDCPNHGFKVGMKLEAVDLMEPRLICVATVKRVVHRLLSIHFDGWDSEYDQWVDCESPDIYPVGWCELTGYQLQPPVAAEPATPLKAKEATKKKKKQFGKKRKRIPPTKTRPLRQGSKKPLLEDDPQGARKISSEPVPGEIIAVRVKEEHLDVASPDKASSPELPVSVENIKQETDD

SEQ ID NO: 222057 - DNA, 2118 bp, Artificial Sequence
  derived and/or modified sequence
atggagaagccacgctccatcgaggagacaccgtctagtgaaccgatggaagaggaggaagatgatgacttagagctgtttgggggatacgactcattccggagctacaattcgtcggttgggagcgagagtagtagctacctggaagagtccagtgaagccgagaatgaagatagagaggctggcgaattgccgacatccccactgcacttactgtctcccggaaccccccgttccctcgatggtagcgggtccgagccagccgtgtgtgagatgtgtgggattgtaggcaccagagaagcgttcttttccaagaccaagcgcttttgttccgtgagctgctcacggtcttacagttcaaattcgaagaaagcctccattctcgcaagactccagggaaagccacccaccaagaaagctaaggtgctgcacaaggctgcttggagtgcaaagattggcgcatttctacactctcagggcaccgggcaactcgcagatggcacgcccacaggccaggatgctctcgttctgggcttcgactggggcaagttcctaaaggatcatagttataaagcagccccagtttcatgtttcaagcatgtgcccctttatgatcagtgggaagacgtgatgaaaggcatgaaggttgaagtgctcaatagtgatgctgttctacccagtcgtgtgtactggattgcttcagtaattcagacagccggttacagggtgctgctgcggtatgagggatttgaaaacgacgcttcccacgatttttggtgtaatctagggacggttgacgtccatcccatcggctggtgcgccatcaactcaaaaatcctcgtgcctccacggaccattcacgccaagtttaccgactggaaaggctacctgatgaagagactggtggggtctagaactctgcccgttgactttcacatcaagatggttgagtctatgaagtacccctttaggcaaggcatgcgcctggaagtggtggataaatcacaggtgtcacgcacgagaatggccgtcgtcgacacggtgatagggggtcggctgcgtctgctctatgaggacggggattccgatgacgacttctggtgccacatgtggtccccattaatccaccctgttggatggtcaagacgggtcggccacggaattaaaatgagcgagcggcgttcggatatggctcatcaccccacttttagaaagatatactgtgatgccgtaccttacctcttcaagaaggtccgagccgtgtatactgagggcggatggtttgaagagggcatgaagttggaggccatcgacccattgaatctgggcaacatctgcgttgctactgtctgtaaggttctcctggatggatacctgatgatatgtgtggacgggggacccagcacagatggcctcgattggttctgttatcatgcctcaagtcatgccatctttcccgcaaccttttgtcaaaagaatgacatagagctgacccctccaaaaggctacgaggctcagacttttaattgggagaattacctggaaaaaaccaaatctaaagccgcaccttcccggctgtttaacatggattgtcctaatcacggattcaaagtcggcatgaagctggaagctgtggatctgatggagcctagactgatctgcgttgccaccgtgaagagggtcgtgcaccgtctcctgtcaatccactttgatggatgggatagcgaatacgaccaatgggttgactgcgagtcccctgacatctaccctgtgggctggtgcgaactgaccggctaccagctgcagcctcctgtcgctgcagaacctgccacgcccctgaaggccaaggaggccaccaagaagaaaaagaaacagttcggcaaaaagagaaagaggatcccacccaccaagactcggccactcaggcaagggagtaagaagccccttttagaggatgacccccaaggtgccagaaaaatcagcagtgaacctgtgcctggcgaaataatcgccgtgcgggtgaaggaagagcacctggacgtggcctcaccggataaagctagctctccagaactgcccgtcagcgtagagaacattaaacaggaaacagatgattag

SEQ ID NO: 222058 - DNA, 2118 bp, Artificial Sequence
  derived and/or modified sequence
atggagaagcccagaagcatcgaggagacccccagcagcgagcccatggaggaggaggaggacgacgacctggagctgttcggcggctacgacagcttcagaagctacaacagcagcgtgggcagcgagagcagcagctacctggaggagagcagcgaggccgagaacgaggacagagaggccggcgagctgcccaccagccccctgcacctgctgagccccggcacccccagaagcctggacggcagcggcagcgagcccgccgtgtgcgagatgtgcggcatcgtgggcaccagagaggccttcttcagcaagaccaagagattctgcagcgtgagctgcagcagaagctacagcagcaacagcaagaaggccagcatcctggccagactgcagggcaagccccccaccaagaaggccaaggtgctgcacaaggccgcctggagcgccaagatcggcgccttcctgcacagccagggcaccggccagctggccgacggcacccccaccggccaggacgccctggtgctgggcttcgactggggcaagttcctgaaggaccacagctacaaggccgcccccgtgagctgcttcaagcacgtgcccctgtacgaccagtgggaggacgtgatgaagggcatgaaggtggaggtgctgaacagcgacgccgtgctgcccagcagagtgtactggatcgccagcgtgatccagaccgccggctacagagtgctgctgagatacgagggcttcgagaacgacgccagccacgacttctggtgcaacctgggcaccgtggacgtgcaccccatcggctggtgcgccatcaacagcaagatcctggtgccccccagaaccatccacgccaagttcaccgactggaagggctacctgatgaagagactggtgggcagcagaaccctgcccgtggacttccacatcaagatggtggagagcatgaagtaccccttcagacagggcatgagactggaggtggtggacaagagccaggtgagcagaaccagaatggccgtggtggacaccgtgatcggcggcagactgagactgctgtacgaggacggcgacagcgacgacgacttctggtgccacatgtggagccccctgatccaccccgtgggctggagcagaagagtgggccacggcatcaagatgagcgagagaagaagcgacatggcccaccaccccaccttcagaaagatctactgcgacgccgtgccctacctgttcaagaaggtgagagccgtgtacaccgagggcggctggttcgaggagggcatgaagctggaggccatcgaccccctgaacctgggcaacatctgcgtggccaccgtgtgcaaggtgctgctggacggctacctgatgatctgcgtggacggcggccccagcaccgacggcctggactggttctgctaccacgccagcagccacgccatcttccccgccaccttctgccagaagaacgacatcgagctgaccccccccaagggctacgaggcccagaccttcaactgggagaactacctggagaagaccaagagcaaggccgcccccagcagactgttcaacatggactgccccaaccacggcttcaaggtgggcatgaagctggaggccgtggacctgatggagcccagactgatctgcgtggccaccgtgaagagagtggtgcacagactgctgagcatccacttcgacggctgggacagcgagtacgaccagtgggtggactgcgagagccccgacatctaccccgtgggctggtgcgagctgaccggctaccagctgcagccccccgtggccgccgagcccgccacccccctgaaggccaaggaggccaccaagaagaagaagaagcagttcggcaagaagagaaagagaatcccccccaccaagaccagacccctgagacagggcagcaagaagcccctgctggaggacgacccccagggcgccagaaagatcagcagcgagcccgtgcccggcgagatcatcgccgtgagagtgaaggaggagcacctggacgtggccagccccgacaaggccagcagccccgagctgcccgtgagcgtggagaacatcaagcaggagaccgacgactag

SEQ ID NO: 222059 - DNA, 2118 bp, Artificial Sequence
  derived and/or modified sequence
atggagaagccaaggtctatcgaggaaacgccaagcagcgagccaatggaggaagaagaagacgacgatctcgaactgttcgggggctacgattcatttaggagttataactcttctgttggttccgaaagcagttcgtacttagaagaaagctcggaagcggaaaacgaagacagggaggccggagagctgccaacctctccgctgcacctattgtccccaggcacccccaggagcctcgatggttccggctcagagcccgcggtctgcgagatgtgtggaattgtgggtacccgcgaggccttcttttccaagaccaaacgattttgctcagtaagctgcagtcgctcctacagctcgaactcaaagaaagcctcaatccttgcccgactgcaggggaagccgccaaccaaaaaagcaaaagtgctgcacaaggctgcctggagtgcgaagattggagccttcttacattctcaggggacaggtcagctggcggacgggacacccactggtcaggacgccctagtgctggggtttgactgggggaagtttctgaaggatcattcctacaaagcagcgccagtttcatgctttaaacacgtcccactctatgatcagtgggaggatgtcatgaaaggaatgaaggtcgaggtgctgaattctgacgccgtgctgccgtcacgagtttactggattgcttcagtgattcagaccgcaggttacagagtattgctccgctatgagggcttcgaaaacgacgccagccatgatttttggtgcaacctgggcacagtagatgtgcaccctatcggatggtgcgccatcaattccaagattctggtgcctcctaggactatccacgcaaaatttaccgattggaagggctatctcatgaaacgtctggtgggcagtagaacgctgccagtggatttccatataaaaatggtggaaagcatgaaatacccttttagacagggcatgagactcgaagtggtggataagagccaggtatctagaacgcgtatggccgtggtagatacagtcatcggaggacgactgcgtctactgtacgaagacggtgacagtgacgatgacttctggtgtcacatgtggagtcccctaattcatccagtaggttggagcagaagggtaggtcatggcattaagatgagcgagaggcggagtgacatggcccatcaccccacattcaggaagatctactgcgatgccgtgccttacctatttaagaaggttcgggcggtctataccgaaggaggttggtttgaggagggaatgaagctggaggccattgacccattaaacttgggaaatatttgtgtggccactgtttgtaaggtgttgctagacggatatctgatgatatgcgttgacggggggccttctactgatggtttggactggttttgctaccatgccagcagtcacgccattttccctgccacattctgtcagaagaatgacatcgagttaacaccccccaagggctatgaggcccagaccttcaactgggagaactatcttgagaaaacaaagagtaaagccgcgccatcccggctctttaacatggactgccccaaccacggcttcaaagtgggaatgaagctggaggctgtagatctaatggaacctcgcctcatctgcgtggcgaccgtgaaaagagtggtgcatcgactgctatcaatccacttcgatggctgggattcagagtatgatcagtgggtggactgtgagtcacctgatatctaccccgtgggctggtgcgaactcaccggctaccaactgcagccaccagtcgcagccgaacccgcgacgccattgaaggcaaaagaggccaccaaaaaaaagaagaagcagtttgggaaaaaacggaaacggattccgcccacaaagacacgccccctgcggcagggcagcaagaagccgctgctggaagacgacccgcagggggcccgcaagatttcctctgagccagttcccggggaaataatagctgtacgggtcaaggaagaacatttagatgtggctagtcccgacaaggcgagttcacctgaacttccagttagcgtggagaatattaagcaggaaacagatgactag

SEQ ID NO: 222060 - DNA, 2118 bp, Artificial Sequence
  derived and/or modified sequence
atggagaagcccaggagcattgaggagacccccagcagcgagcccatggaggaggaggaggatgatgacctggagctgtttggaggctatgacagcttccgcagctacaacagctctgtgggcagcgagagcagcagctacctggaggagagcagcgaggctgaaaatgaagatcgggaggccggggagctgcccaccagccccctgcacctgctgagccctggcacccccaggagcctggatggcagcggcagcgagcctgctgtgtgtgagatgtgtggcatcgtgggcacccgggaggccttcttcagcaagaccaagcgcttctgcagcgtgtcctgcagccgcagctacagcagcaacagcaagaaggccagcatcctggcccggctgcagggcaagccacccaccaagaaggccaaggtgctgcacaaggccgcctggagcgccaagatcggggccttcctgcacagccagggcaccggccagctggctgatggcacccccaccggccaggatgccctggtgctgggctttgactggggcaagttcctgaaggaccacagctacaaggccgcccctgtgtcctgcttcaagcacgtgcccctgtatgaccagtgggaggatgtgatgaagggcatgaaggtggaggtgctgaacagtgatgctgtgctgcccagccgggtgtactggatcgccagcgtcatccagacagctggctacagagtgctgctgcgctatgagggctttgaaaatgatgccagccatgacttctggtgcaacctgggcaccgtggatgtgcaccccatcggctggtgtgccatcaacagcaagatcctggtgccccccaggaccatccacgccaagttcacagactggaagggctacctgatgaagaggctggtgggcagcaggaccctgcctgtggacttccacatcaagatggtggagagcatgaagtaccccttccggcagggcatgaggctggaggtggtggacaagagccaggtgtccaggaccaggatggctgtggtggacacagtgattggaggccgcctgcggctgctgtatgaagatggagacagtgatgatgacttctggtgccacatgtggagccccctcatccaccctgtgggctggagccggcgggtgggccacggcatcaagatgtctgaaagaagaagtgacatggcccaccaccccaccttcaggaagatctactgtgatgctgtgccctacctgttcaagaaggtgcgggctgtgtacacagaaggaggctggtttgaggagggcatgaagctggaggccatcgaccccctgaacctgggcaacatctgtgtggccaccgtgtgcaaggtgctgctggatggctacctgatgatctgtgtggatggcggccccagcacagatggcctggactggttctgctaccacgccagcagccacgccatcttccctgccaccttctgccagaagaatgacatcgagctgaccccacccaagggctatgaggcccagaccttcaactgggagaactacctggagaagaccaagagcaaggccgcccccagccgcctcttcaacatggactgccccaaccacggcttcaaggtgggcatgaagctggaggccgtggacctgatggagcccaggctcatctgtgtggccaccgtgaagagggtggtgcaccggctgctgagcatccactttgatggctgggacagtgaatatgaccagtgggtggactgtgagagcccagacatctaccctgtgggctggtgtgagctgaccggctaccagctgcagccccctgtggccgctgagcccgccacccccctgaaggccaaggaggccaccaagaagaagaagaagcagtttgggaagaagaggaagaggatcccccccaccaagacccggcccctgcggcagggcagcaagaagcccctgctggaggatgacccccagggcgccaggaagatcagcagcgagcctgtgcctggagagatcatcgctgtgcgggtgaaggaggagcacctggatgtggccagcccagacaaggccagcagccctgagctgcctgtgtctgtggagaacatcaagcaggagacagatgactag

SEQ ID NO: 222061 - DNA, 2118 bp, Artificial Sequence
  derived and/or modified sequence
atggagaagccccggagcatcgaggagacccccagcagcgagcccatggaagaggaagaggatgacgatctggagctgttcgggggatacgactcattcaggagttacaacagcagtgttgggtccgagagcagttcatatcttgaggagtcaagcgaagccgaaaatgaggaccgggaagcaggcgaactcccaacttcccccctgcacctgttatctcccggcacaccacgtagcctggacggcagcggcagcgagcccgcggtatgcgagatgtgcggaatagtcggtacgagggaggcctttttctcaaagaccaagagattctgtagcgttagctgcagcagatcttatagttcaaacagcaaaaaggcctctatactcgcccgactacagggcaaacctcccacaaagaaagcgaaggtgctgcataaggctgcctggtcagcgaaaatcggtgcatttctacactcgcaaggaactggacagctggccgacggcacccctaccgggcaggatgcgctcgtactggggtttgactggggaaaattcctgaaggaccacagctacaaagccgcccccgtctcctgtttcaagcatgtacctctatacgatcaatgggaagacgttatgaaggggatgaaggttgaggtgcttaatagcgacgccgtgctgccctcaagggtctattggattgccagtgtaatccaaacagccggttatagggtgttgcttcgctacgaaggtttcgagaatgatgcctctcatgacttttggtgcaatctgggtaccgtggacgtgcatcccatcggttggtgcgcaatcaactccaaaattctcgtacccccaaggacaatacatgcaaagttcactgattggaagggatatctaatgaagcgcctggtcggtagtagaaccttacccgttgatttccacattaaaatggtggaatcaatgaagtaccctttccgacaaggaatgcgactggaggtggtagacaaatcacaggttagccgcacaagaatggctgtggtggacactgtcatcggtgggagactaaggttgctgtatgaggacggtgactctgacgacgatttttggtgtcacatgtggagtcctctcatacatccagtgggctggtcgcgcagggtgggtcacggaattaagatgtcggagcgcagatcagacatggcgcaccatccaacattcagaaaaatttattgtgatgctgtcccttatctttttaaaaaagtgcgtgccgtatacacggagggcggatggtttgaagagggaatgaagctagaagcaatcgaccccctcaatctgggaaatatatgcgtggctactgtgtgcaaagtcctgctggacgggtatctgatgatctgcgtggacggaggcccaagtactgatggactggactggttttgctaccacgcatctagccatgccatctttcctgctaccttttgccagaaaaatgacattgagctaactcctccgaaaggctatgaagcacaaacttttaattgggagaattacttggagaagacgaagagtaaagctgctccttcgagactgttcaatatggattgccctaatcatggcttcaaagtgggcatgaaactggaagccgtcgatcttatggagccaagacttatatgtgtggccactgtgaaaagggtggtccacagactgcttagcattcactttgacggctgggactcagagtatgatcagtgggttgattgcgagtctccagatatatatcctgtcggctggtgcgagcttaccggctatcaactgcagcctcctgtggccgcagagcctgccacgcccttaaaagcgaaagaggccacgaaaaagaaaaaaaagcaattcggcaaaaagaggaaacggatccctccgaccaagacccggcccctgcgccagggatctaaaaaacctctgttggaagatgacccgcagggggcacgcaagatctcatccgagcccgtcccaggcgagatcatagccgtgcgtgtcaaggaagaacatctggatgtggcttcacctgacaaggcctcgtccccggaactgcccgtcagtgttgagaatattaaacaagagactgatgattag

SEQ ID NO: 222062 - DNA, 3296 bp, Artificial Sequence
  derived and/or modified sequence
gaatggcgggagcaggcacggaaccggcttttcctccttcctgcagcgtgattggcccgcggctcagggaggcgaccaatgagtgctctcgcggagagcgacggggcaggccaatatggcttcctgcacctggtgacgcttggcgaaactgaggtctcatggagaagccccggagtattgaggagaccccatcttcagaaccaatggaggaagaggaagatgacgacttggagctgtttggtggctatgatagtttccggagttataacagcagtgtgggcagtgagagcagctcctatctggaggagtcaagtgaagcagaaaatgaggatcgggaagcaggggaactgccgacctccccgctgcatttgctcagccctgggactcctcgctccttggatggcagtggttctgagccagctgtctgtgagatgtgtggtatcgtgggtacaagggaagccttcttctccaagaccaagaggttctgcagcgtctcctgctccaggagctactcctccaactccaagaaagccagtatcttggctaggttacagggaaaaccaccgaccaaaaaagccaaagtcctgcacaaggctgcctggtctgccaaaattggagccttcctccactctcaagggacaggacagctggcagatgggacaccaacaggacaagacgctctggtcttgggcttcgactgggggaagttcctgaaggatcacagttacaaggctgctcccgtcagctgtttcaagcacgtcccactctatgaccagtgggaggatgtgatgaaagggatgaaggtggaggtgctcaacagtgatgctgtgctccccagccgggtgtactggatcgcctctgtcatccagacagcagggtatcgggtgctgcttcggtatgaaggctttgaaaatgacgccagccatgacttctggtgcaacctgggaacagtggatgtccaccccattggctggtgtgccatcaacagcaagatcctagtgcccccacggaccatccatgccaagttcaccgactggaagggctacctcatgaaacggctggtgggctccaggacgcttcccgtggatttccacatcaagatggtggagagcatgaagtacccctttaggcagggcatgcggctggaagtggtggacaagtcccaggtgtcacgcactcgcatggctgtggtggacacagtaatcgggggtcgcctacggctcctctacgaggatggtgacagtgacgacgacttctggtgccacatgtggagccccctgatccacccagtgggttggtcacgacgtgtgggccacggcatcaagatgtcagagaggcgaagtgacatggcccatcaccccaccttccggaagatctactgtgatgccgttccttacctcttcaagaaggtacgagcagtctacacagaaggcggttggtttgaggaagggatgaagctggaggccattgaccccctgaatctgggcaacatctgcgtggcaactgtctgtaaggttctcctggatggatacctgatgatctgtgtggacggggggccctccacagatggcttggactggttctgctaccatgcctcttcccacgccatcttcccggccaccttctgtcagaagaatgacattgagctcacaccgccaaaaggttatgaggcacagactttcaactgggagaactacttggagaagaccaagtcgaaagccgctccatcgagactctttaacatggattgcccaaaccatggcttcaaggtgggcatgaagctggaggccgtggacctgatggagccccggctcatctgtgtggccacggtgaaacgagtggtgcatcggctcctcagcatccactttgacggctgggacagcgagtacgaccagtgggtggactgcgagtccccagacatctaccccgtcggctggtgtgagctcaccggctaccagctccagcctcctgtggccgcagaaccggccacaccgctgaaggccaaagaggccacaaagaagaaaaagaaacagtttgggaagaaaaggaaaagaatcccgcccactaagacgcgacccctcagacaggggtccaagaagcccctgctggaggacgaccctcagggtgccaggaagatctcgtcggagcctgttcctggcgagatcattgctgtgcgtgtgaaggaagagcatctagacgtggcctcgcccgacaaggcttcaagtccagagctgcctgtctccgtcgagaacatcaagcaggaaacagacgactgagccttcctgcctccagcctggcttctagctggaagccagcccagcgtttctctaccaccaccaccatgcctccacctgactttggcttggagactgatcctctctgtgtaaattctgcccggtgctgtgaaggctggacggtggaggacctgctggggtctcctgggacccgcctgttgcttctgccctcccctgtggaaaggtctatatgacgggccgcctgaggccccagaactcgtctgtgaaccaccttttccagccagagttcccaaagctggaacgctagctgcctgctcttccttaagatggcctccccccgacccgccacggccctcagttgccagggatggggccaccactgtcacactgtggaatacaagacagtgaactctgtctgcctgaacgagccatgtaaattaagttctagagcagctctctgagcaggataaggtcccctgacagtgagttgtgtggtgggggcagcctctgcctcaaaaattcaccaagcagaatgcctctcagcctcatgtgttggtcctctgctcctcctagctccccagggatgttggggacccagcttgtctcggcagctaagaagcagtgaccaggatgtggattttggcgacctgtgtggtggccttgagctgctttctgtgtttgtgaggactgactcccatttcctaaaggaaatgcccccggggaggacattgggaggaagatggcctgagtgtgcactttggctctgctacctgctcctgaagccccgctaaaaataattcatccaagattcctttgtagttaaagggtccagttctgactggagcctctagagagctgggcttgtatgttcttttggccttttgttcctacctaaatgaagaaaccatgcctggaggggccgtgaacacagaaccctcaagacaaggatgacagagctggaggacacatctagctgccattgcaacctcactgggctccccagactctgtgtgtgagaaattaaaccccctgcttgcttga

SEQ ID NO: 222063 - protein, 798 aa, Artificial Sequence
  derived and/or modified sequence
MEFSWGSGQESRRLLLLLLLLAAWEAGNGQLHYSVSEEAKHGTFVGRIAQDLGLELAELVPRLFRVASKGRGGLLEVNLQNGILFVNSRIDREELCRRSAECSIHLEVIVDRPLQVFHVDVEVRDINDNPPVFPATQKNLSIAESRPLDSRFPLEGASDADIGENALLTYRLSPNEYFSLEKPPDDELVKGLGLILRKSLDREEAPEIFLVLTATDGGKPELTGTVQLLITVLDANDNAPAFDRTIYKVRLLENVPNGTLVIKLNASDLDEGLNGDIVYSFSNDISPNVKSKFHIDPITGQIIVKGYIDFEESKSYEIIVEGIDKGQLPLSGHCRVIVEVEDNNDNVPDLEFKSLSLPIREDAPLGTVIALISVSDKDMGVNGLVTCSLTSHVPFKLVSTFKNYYSLVLDSALDRESVSAYELVVTARDGGSPSLWATASVSVEVADVNDNAPAFAQPEYTVFVKENNPPGCHIFTVSAWDADAQENALVSYSLVERRVGERALSSYVSVHAESGKVYALQPLDHEELELLQFQVTARDAGVPPLGSNVTLQVFVLDENDNAPALLAPRAGGTGGAVSELVPWSVGVGHVVAKVRAVDADSGYNAWLSYELQPGTGGARIPFRVGLYTGEISTTRALDETDAPRHRLLVLVKDHGEPALTATATVLVSLVESGQAPKASSRALVGAVGPDAALVDVNVYLIIAICAVSSLLVLTLLLYTALRCSALPTEGACAPGKPTLVCSSAVGSWSYSQQRRPRVCSGEGPPKTDLMAFSPSLPDSRDREDQLQTTEESFAKVSV

SEQ ID NO: 222064 - DNA, 2397 bp, Artificial Sequence
  derived and/or modified sequence
atggagttcagctggggcagcggccaggagagcagaagactgctgctgctgctgctgctgctggccgcctgggaggccggcaacggccagctgcactacagcgtgagcgaggaggccaagcacggcaccttcgtgggcagaatcgcccaggacctgggcctggagctggccgagctggtgcccagactgttcagagtggccagcaagggcagaggcggcctgctggaggtgaacctgcagaacggcatcctgttcgtgaacagcagaatcgacagagaggagctgtgcagaagaagcgccgagtgcagcatccacctggaggtgatcgtggacagacccctgcaggtgttccacgtggacgtggaggtgagagacatcaacgacaacccccccgtgttccccgccacccagaagaacctgagcatcgccgagagcagacccctggacagcagattccccctggagggcgccagcgacgccgacatcggcgagaacgccctgctgacctacagactgagccccaacgagtacttcagcctggagaagccccccgacgacgagctggtgaagggcctgggcctgatcctgagaaagagcctggacagagaggaggcccccgagatcttcctggtgctgaccgccaccgacggcggcaagcccgagctgaccggcaccgtgcagctgctgatcaccgtgctggacgccaacgacaacgcccccgccttcgacagaaccatctacaaggtgagactgctggagaacgtgcccaacggcaccctggtgatcaagctgaacgccagcgacctggacgagggcctgaacggcgacatcgtgtacagcttcagcaacgacatcagccccaacgtgaagagcaagttccacatcgaccccatcaccggccagatcatcgtgaagggctacatcgacttcgaggagagcaagagctacgagatcatcgtggagggcatcgacaagggccagctgcccctgagcggccactgcagagtgatcgtggaggtggaggacaacaacgacaacgtgcccgacctggagttcaagagcctgagcctgcccatcagagaggacgcccccctgggcaccgtgatcgccctgatcagcgtgagcgacaaggacatgggcgtgaacggcctggtgacctgcagcctgaccagccacgtgcccttcaagctggtgagcaccttcaagaactactacagcctggtgctggacagcgccctggacagagagagcgtgagcgcctacgagctggtggtgaccgccagagacggcggcagccccagcctgtgggccaccgccagcgtgagcgtggaggtggccgacgtgaacgacaacgcccccgccttcgcccagcccgagtacaccgtgttcgtgaaggagaacaacccccccggctgccacatcttcaccgtgagcgcctgggacgccgacgcccaggagaacgccctggtgagctacagcctggtggagagaagagtgggcgagagagccctgagcagctacgtgagcgtgcacgccgagagcggcaaggtgtacgccctgcagcccctggaccacgaggagctggagctgctgcagttccaggtgaccgccagagacgccggcgtgccccccctgggcagcaacgtgaccctgcaggtgttcgtgctggacgagaacgacaacgcccccgccctgctggcccccagagccggcggcaccggcggcgccgtgagcgagctggtgccctggagcgtgggcgtgggccacgtggtggccaaggtgagagccgtggacgccgacagcggctacaacgcctggctgagctacgagctgcagcccggcaccggcggcgccagaatccccttcagagtgggcctgtacaccggcgagatcagcaccaccagagccctggacgagaccgacgcccccagacacagactgctggtgctggtgaaggaccacggcgagcccgccctgaccgccaccgccaccgtgctggtgagcctggtggagagcggccaggcccccaaggccagcagcagagccctggtgggcgccgtgggccccgacgccgccctggtggacgtgaacgtgtacctgatcatcgccatctgcgccgtgagcagcctgctggtgctgaccctgctgctgtacaccgccctgagatgcagcgccctgcccaccgagggcgcctgcgcccccggcaagcccaccctggtgtgcagcagcgccgtgggcagctggagctacagccagcagagaagacccagagtgtgcagcggcgagggcccccccaagaccgacctgatggccttcagccccagcctgcccgacagcagagacagagaggaccagctgcagaccaccgaggagagcttcgccaaggtgagcgtgtag

SEQ ID NO: 222065 - DNA, 2397 bp, Artificial Sequence
  derived and/or modified sequence
atggaattttcttggggatcaggtcaggagagcaggcggctgcttctgctgctgcttctcttagccgcatgggaggccggcaacggtcagctgcactattctgtgagcgaggaggctaaacatggtacatttgtgggccgtattgctcaggacctgggactggagctagccgagctggtgccccggctgttcagagtggcgtctaaaggtaggggcgggcttttggaggtgaacctccagaacgggatcctctttgttaactcacggatcgacagagaagagctgtgccggcgtagcgccgaatgtagcatccacctggaggtgatcgtggaccgccctctgcaagtgttccacgtcgatgtggaggtgcgggacatcaatgacaatcctccagtttttccagctacccagaaaaatctttcaattgctgagagtcggccccttgattcccgcttccccttagaaggcgctagtgacgctgacattggcgaaaatgccctgcttacatacagactctctccaaatgaatacttttcgctggagaagcccccggacgacgagttggtcaaggggctcggcttgatactcagaaaaagtctggatcgagaggaagcacccgaaatattccttgtccttacggctaccgatggcggcaaacctgagctgaccggcacggtccagttactgatcaccgtgctggacgccaatgataacgctcctgcattcgaccgtactatctataaggtgcgcctcctcgagaatgtgcccaacggcactctggtgatcaaacttaacgcctcggaccttgatgagggactgaatggtgatattgtatactcctttagcaacgacattagtcccaatgtgaagtcgaagttccatattgatcccatcaccggccagatcatcgtgaaaggctacatcgattttgaggagagtaaaagctacgagattattgtggaggggattgataaagggcagttacctctgtctgggcattgtcgggtcatagtggaggtggaggataacaacgataatgtcccagatttagaatttaagagcctgtctctccccattagggaggacgcccccctcgggaccgtgatcgcattgatatctgttagtgacaaggatatgggtgtcaacgggttggttacttgcagtctgacgtctcacgttccttttaagcttgtctctacgttcaaaaattattactcactggttctagatagtgcattggaccgcgaatccgtatccgcttacgaactggttgttacagccagagacggaggatccccatccctttgggctacggcaagcgtatccgtggaggtcgctgacgtgaacgacaatgcgcctgcttttgcccagcctgaatataccgtgtttgtgaaggaaaataatccccccggatgtcatattttcacagttagcgcttgggacgctgatgcccaggagaacgcactggtgtcttactctctagtcgagcgccgcgtgggggagcgggccctgtcaagctatgtgagtgtccacgccgaatctggcaaagtttacgccctacagcctcttgaccacgaggagctggaattgctgcagttccaggtcactgctcgtgacgcaggcgttccacctttaggaagtaacgtcacgctacaagttttcgtccttgacgagaatgacaatgcccctgccctactcgctccacgggccggcgggaccggaggcgccgtttccgagctggtgccatggagcgtcggcgtcgggcacgtggtggccaaggtacgggcagtggacgccgactccgggtataacgcatggttatcatacgaattgcagcctggaaccggcggtgcaagaatcccgttcagggtgggcctgtacacgggcgaaataagcaccacaagggccctggacgagacagatgcaccgcggcaccgtctccttgtgctggttaaagatcatggcgagcctgccctgaccgctaccgctactgtacttgtctcgcttgtggaaagcggtcaagccccaaaagcttcgtctcgcgccctggtaggagctgtgggacctgacgccgctcttgtagacgtgaatgtctacctgatcatcgcaatctgtgctgtatcttcactgttggtgctgaccctgctgctgtacaccgcgctccgctgctccgcactgcctacggaaggtgcgtgtgcgccaggcaagcctaccttggtgtgctccagtgccgttggaagttggtcctactctcagcagcgtaggcccagagtgtgcagcggcgagggtccccccaaaaccgacctgatggcctttagcccaagtctgccggattcacgggaccgtgaggaccagctgcaaaccaccgaagagtcctttgccaaagtgtctgtgtag

SEQ ID NO: 222066 - DNA, 2397 bp, Artificial Sequence
  derived and/or modified sequence
atggagttctcctggggcagcggccaggagagccggcggctgctgctgctgctgctgctgctggccgcctgggaggccggaaatggccagctgcactacagcgtgtctgaggaggccaagcacggcacctttgtgggccgcatcgcccaggacctgggcctggagctggccgagctggtgcccaggctcttccgggtggccagcaagggccggggcggcctgctggaggtgaacctgcagaatggcatcctgtttgtgaacagcagaattgaccgggaggagctgtgcagaagatctgcagaatgttccatccacctggaggtgattgtggaccggcccctgcaggtgttccacgtggatgtggaggtgcgggacatcaatgacaacccccctgtgtttcctgccacccagaagaacctgagcattgctgagagccggcccctggacagccgcttccccctggagggcgccagtgatgctgacatcggggagaatgccctgctgacctaccgcctgagccccaatgagtacttcagcctggagaagcccccagatgatgagctggtgaagggcctgggcctcatcctgaggaagagcctggaccgggaggaggcccctgagatcttcctggtgctgacagccacagatggcggcaagccagagctgactggaacagtgcagctgctgatcaccgtgctggatgccaatgacaatgccccagcctttgacaggaccatctacaaggtgcggctgctggagaatgtgcccaacggcaccctggtgatcaagctgaatgccagtgacctggatgagggcctgaatggagacatcgtgtacagcttcagcaatgacatcagccccaacgtgaagagcaagttccacatcgaccccatcaccggccagatcatcgtgaagggctacatcgactttgaggagagcaagagctatgagatcatcgtggagggcatcgacaagggccagctgcccctgagcggccactgccgggtgattgtggaggtggaggacaacaatgacaacgtgcctgacctggagttcaagagcctgagcctgcccatcagagaagatgcccccctgggcaccgtgattgccctgatctctgtgtctgacaaggacatgggcgtgaatggcctggtgacctgcagcctgaccagccacgtgcccttcaagctggtgtccaccttcaagaactactacagcctggtgctggacagcgccctggaccgggagagcgtgtctgcctatgagctggtggtgacagccagagatggcggcagccccagcctgtgggccacagcctctgtgtctgtggaggtggctgatgtgaatgacaatgccccagcctttgcccagcctgagtacacagtgtttgtgaaggagaacaaccccccaggctgccacatcttcaccgtgtctgcctgggatgctgatgcccaggagaatgccctggtgtcctacagcctggtggagaggagagtgggggagcgggccctgagcagctatgtgtctgtgcacgccgagagcggcaaggtgtatgccctgcagcccctggaccacgaggagctggagctgctgcagttccaggtgacagccagagatgctggggtgccccccctgggcagcaatgtgaccctgcaggtgtttgtgctggatgaaaatgacaatgccccagccctgctggccccccgggccggcggcactggaggagctgtgtctgagctggtgccctggagcgtgggcgtgggccacgtggtggccaaggtgcgggctgtggatgctgacagcggctacaatgcctggctgtcctatgagctgcagcccggcactggaggagcccgcatccccttccgggtgggcctgtacaccggggagatcagcaccacccgggccctggatgaaacagatgcccccaggcaccggctgctggtgctggtgaaggaccacggggagcccgccctgacagccacagccaccgtgctggtgtccctggtggagagcggccaggcccccaaggccagcagccgggccctggtgggcgctgtgggcccagatgctgccctggtggatgtgaatgtgtacctgatcatcgccatctgtgctgtgagcagcctgctggtgctgaccctgctgctgtacacagccctgcgctgcagcgccctgcccacagagggcgcctgtgcccctgggaagcccaccctggtgtgcagcagcgctgtgggctcctggagctacagccagcagaggcggccccgggtgtgcagcggggagggcccccccaagacagacctgatggccttcagccccagcctgcctgacagccgggaccgggaggaccagctgcagaccacagaggagagctttgccaaggtgtctgtgtag

SEQ ID NO: 222067 - DNA, 2397 bp, Artificial Sequence
  derived and/or modified sequence
atggagttcagctggggcagcggccaggagagccggcggctgctgctgttgttgctgctcctcgctgcgtgggaggcgggaaatggacagttacactattccgtctccgaggaggccaaacacggcactttcgtaggcagaattgcccaggacctcggcctcgagctggcggagttagttcctcggctgttcagggtcgcttcaaaaggccgcggaggcctgttagaggttaacctacagaatggaattttgtttgttaattctagaatcgaccgggaagagctatgtaggcgctctgctgagtgttcaattcacttggaggttattgtggataggcccttacaggtttttcacgtcgatgtggaggtgagggacatcaacgacaatccccctgttttcccagcgactcaaaagaacttatccatcgccgaatcacgaccactcgatagtcgcttccccctggagggcgcctcagacgccgatataggagagaacgccttactgacctacaggctgagccctaatgaatacttctccctcgaaaagcctcccgacgacgagctggtgaagggcctcgggctcattttgagaaaaagtcttgatcgggaggaggcacctgagatctttttagtgctgacagctacagacgggggcaagcccgagctcacaggaactgtccaattgctaatcactgtgctcgatgccaatgacaatgcacccgcatttgacaggacgatctacaaggtgcgtctgctagagaatgtgccaaatggcacattggttatcaagctgaacgcgagtgatctcgatgagggactcaacggagatattgtgtatagcttcagcaatgatatcagcccgaatgtgaagtctaaatttcacatcgatccaataactgggcagatcatcgttaaagggtacattgattttgaggagtccaaatcatacgagatcattgtggagggcatcgacaagggacagttaccgctgagcggacactgccgagtaatcgtggaggtggaggacaacaacgacaatgttcctgatctcgagttcaaaagcttgtccctccccataagggaggatgccccattgggaacagtcattgctcttatcagtgtctctgacaaggacatgggtgtgaacggactggtgacgtgctctctgacctcccatgtcccctttaaactagtgagtacattcaagaactattattcactggtgttagattcggccctcgatagggagtctgtgagtgcctacgaactggttgttactgcccgggacggagggtctccatcactgtgggctactgcttccgtatctgtagaggttgccgatgtaaatgacaatgcgcccgcatttgcccaaccagaatacacagtcttcgtgaaggagaacaacccacccgggtgccacatatttaccgtgagcgcctgggatgccgacgcacaggagaacgcccttgtcagttactcactggttgagagaagggttggtgagcgagctctctcctcttacgtttccgtccatgcagagagcggtaaggtctatgctctccagcccttagatcacgaggagttggagctgcttcagttccaagtgaccgcccgcgacgccggcgtgccgcccttagggtccaatgtgacgcttcaagtgtttgtcctcgatgaaaacgacaacgctcccgcccttctagccccacgggcaggcggaactggcggcgcagtttctgagctggtcccttggtcggtgggagttggccacgttgtagccaaggtgcgggcagttgatgccgactccggttacaacgcctggctcagctacgaactacagcccgggacgggcggggccaggattccgttccgggtgggactgtacacaggagagatctccaccaccagggccctcgacgagaccgacgccccccggcatagactcttagtgctggtaaaagatcacggagagcccgctttaacagccactgctaccgtcctggtgagccttgttgagtctgggcaggccccaaaagccagtagccgagcactggtaggagcagtgggcccagatgccgctctggttgacgtgaatgtgtacttgatcattgctatttgcgccgtgtctagtttattggtgctaactctgctactttacaccgctctacgctgctccgctctcccaaccgaaggcgcctgcgcccctggtaagcccaccttagtgtgctctagcgccgtggggagctggtcttacagccaacaaaggaggccacgagtctgctcaggagagggaccacctaagactgacctgatggccttttcaccatctcttcctgatagccgcgaccgcgaggaccagctgcagacaactgaagaatcatttgctaaggtgagtgtatag

SEQ ID NO: 222068 - DNA, 2498 bp, Artificial Sequence
  derived and/or modified sequence
tgaaatatggaggatgcagctgcacttgactgaccgattaaaagatttcccttgactttgagaaacgatatttaatcagaacaaaatactgtgcactaaagatggagttttcctggggaagcggccaggaatcccggcgtctgctgctcttacttcttctcctcgcagcctgggaggcagggaacggtcagctccactactcggtctccgaggaggccaaacacggcaccttcgtgggccgcatcgcgcaggacctgggactggagctggcggagctggtgccgcgcctgttccgggtggcgtccaagggccgcggaggccttctggaggtaaatctgcagaatggcattttgtttgtgaattctcggatcgaccgggaggagctgtgccggcggagcgcggagtgcagcatccacctggaggtgatcgtagacaggccgctgcaggttttccatgtggacgtggaggtgagggacattaacgataacccgccggtgttcccagcaacacaaaagaacctgtccatcgcggaatccaggccgcttgactctcggtttccactagagggcgcctcggatgcagatatcggggagaacgccctgctcacttacagactgagcccaaatgaatacttttctctggaaaaaccacctgatgacgagctggtaaaaggtcttgggcttatattacggaaatctttagacagagaagaagctccggagatttttttagtgctcacagccactgatggaggcaaacccgagttgactggcaccgttcagttactcatcacagtactggatgccaatgacaatgccccagcttttgacagaaccatttataaggtgagattactagaaaatgttcctaatggaacattggtaattaaacttaacgcctcagatttagacgaaggattgaatggggacattgtttattcattctcaaatgatatttcgccaaatgtgaaatccaagtttcacatagatccaattactggacaaattattgtaaagggatatattgactttgaagaaagcaaatcctatgaaattattgtagagggcattgataagggacagctcccactttctggccattgtagagttattgtggaagtagaagacaacaacgataatgtcccagatttggaattcaagtctttatcacttccaattagagaggacgctccactgggtacagtcatcgccctgatcagcgtgtccgacaaagacatgggtgtcaatgggctggtcacctgctccttgacgtcccacgtccccttcaagctggtgtccaccttcaagaattactactcgttggtgctggacagtgccctggaccgcgagagcgtgtcagcctatgagctggtggtgaccgcgcgagacgggggctcgccttcgctgtgggccacggccagtgtttctgtggaggtggctgatgtgaacgacaacgctccggcgttcgcgcagcccgagtacacagtgttcgtgaaggagaacaacccgccgggctgccacatcttcactgtgtctgcgtgggacgcggacgcgcaggagaacgcgctggtgtcctactcgctggtagagcggcgggtaggggagcgcgcgctgtcgagctacgtttcggtgcatgcggagagcggcaaggtgtacgcgctgcagccgctggaccacgaggagctagagctgctgcagtttcaggtgaccgctcgcgatgccggcgtgccacctctgggcagcaacgtgacgctgcaggtgttcgtgctggacgaaaacgacaacgcgccagcactgctagcgcctcgggcgggtggcactggtggcgcagtgagcgagctggtgccatggtcggtgggtgtgggccacgtggtggcaaaggtgcgcgcggtggatgctgactcgggctacaacgcgtggctttcgtacgagctgcagccggggactggtggcgcgcgcatcccgttccgcgtggggctgtacactggcgagatcagcacaacgcgtgccctggacgaaacggacgctccgcgccaccgcctactggtactggtgaaggaccacggcgagcccgcgctgacggccacggccactgtgctggtgtcacttgtggagagtggacaggcgccaaaggcctcctcacgggcgttggtgggcgctgtgggtcccgatgctgcgctggtggatgtcaacgtatacctgatcattgccatctgcgcggtgtccagccttttggtgctcacgctgctgctgtacaccgcgctgcggtgctctgcgctgcccaccgagggcgcgtgcgctccgggcaagcccacgctggtgtgctccagtgcggtggggagctggtcatactcgcagcagaggaggccgagggtgtgctctggtgagggcccacccaagaccgacctcatggccttcagccccagtttacctgactctagggacagagaagatcagctgcagacaactgaggaatcctttgcaaaggttagtgtataa

SEQ ID NO: 222069 - DNA, 2397 bp, Artificial Sequence
  derived and/or modified sequence
atggagttctcttggggttcagggcaggagtcccgacgactcctgcttctgcttttattactagccgcatgggaggccggaaacggacagctccactactccgtgtccgaagaagccaaacatggtacattcgtaggacggatcgctcaggacttaggtttggagctcgcggagctagtaccccgactttttcgtgtagcttcaaaggggagagggggacttctggaggtcaatttgcagaacgggatcctcttcgtaaattccagaatcgaccgagaagaactctgtagaaggagcgctgagtgtagtattcacttggaggtcatagtagaccgcccacttcaagtgttccacgttgacgtggaggtccgcgacatcaacgataatcccccagtgttccctgcaacgcagaaaaacctgagcatcgctgagtcacggccactcgactcacgatttcccctggaaggcgcatctgacgccgatattggggaaaatgctcttctgacctaccgtctcagccctaacgaatacttctcgctcgaaaaacctccggacgacgagctggtgaaaggtcttggactgatccttaggaaatccctggaccgagaagaagcacctgagatatttctggtgttgactgccactgacggtggcaagcccgagttgaccggcacagtgcagctgttaataaccgttcttgatgctaacgataatgcgcctgccttcgatagaacgatatacaaagttcgactgttggagaacgtcccaaatggaactttggtcattaagttgaatgcctccgacctggacgaaggtttaaacggcgatatagtgtatagcttcagcaacgatatttcacccaatgtgaagtctaaattccacattgatccaattaccggccagattatcgtcaaagggtacatcgattttgaggaatcaaagagttatgaaattattgtcgagggcattgataaaggccagcttccactcagtggccactgccgtgtgatagtggaggtggaggataacaacgacaacgtccccgacctggagttcaagtctctctcacttcccattagagaagatgctcctctgggaacagtaatagcccttatcagtgtgagcgataaggatatgggagtaaatggactcgtgacatgctccctgacttcacacgttccttttaaactcgttagtaccttcaaaaactactactctttggttctggatagcgctctggaccgtgagtccgtgagcgcctacgagctggtcgtcaccgcacgcgatggaggttcccccagcctttgggctaccgcctctgtgagcgtagaagtcgcagacgttaatgacaatgcaccagcctttgcgcaaccggagtacactgtgtttgtaaaagaaaataatccccctgggtgccatatctttaccgttagcgcctgggacgctgatgcacaggaaaatgcactcgtatcttatagtctagtcgagcgccgtgtgggagagcgtgctctttcctcatatgtgagtgtccatgccgaaagtggtaaggtttatgctctgcagcctctggaccacgaggaactggaactgttgcagttccaggttaccgcgagggacgcgggagtgccacctcttgggagtaatgttactctgcaagtctttgtactcgacgaaaatgataacgcccctgcactgttggctcctcgggctggaggaaccgggggagcagtgagcgagcttgtcccctggagcgtcggtgtcggccatgtcgtggctaaagttcgggctgttgacgcagattccggctataacgcatggttgagttatgagctgcagcccggtacaggcggagccagaataccttttagagtcggcctgtacaccggcgagatctccactaccagagccctggatgaaaccgacgcgcctagacacagactgcttgtgctcgtgaaggatcacggtgaaccagctctcaccgcgaccgccactgtgctggtttcactcgtcgaaagcggccaggcacccaaggccagctctcgagccctggtaggagccgtcggaccagacgctgccctggtcgacgtgaacgtgtatttgatcattgccatctgtgctgtgtccagtctgctagttttaacgttacttttgtatacggccctgagatgttccgcactgccaacagagggggcatgcgccccagggaagcctacactcgtgtgctcttcagctgtcgggagctggtcttacagtcaacaaaggcggcctcgggtctgttctggcgaggggccacctaagaccgatcttatggccttttcaccatcattaccggactctagggatagagaagaccaacttcagacaacagaagaaagtttcgctaaagtctcggtctag

SEQ ID NO: 222070 - protein, 825 aa, Artificial Sequence
  derived and/or modified sequence
MSSSPVNVKKLKVSELKEELKKRRLSDKGLKAELMERLQAALDDEEAGGRPAMEPGNGSLDLGGDSAGRSGAGLEQEAAAGGDEEEEEEEEEEEGISALDGDQMELGEENGAAGAADSGPMEEEEAASEDENGDDQGFQEGEDELGDEEEGAGDENGHGEQQPQPPATQQQQPQQQRGAAKEAAGKSSGPTSLFAVTVAPPGARQGQQQAGGKKKAEGGGGGGRPGAPAAGDGKTEQKGGDKKRGVKRPREDHGRGYFEYIEENKYSRAKSPQPPVEEEDEHFDDTVVCLDTYNCDLHFKISRDRLSASSLTMESFAFLWAGGRASYGVSKGKVCFEMKVTEKIPVRHLYTKDIDIHEVRIGWSLTTSGMLLGEEEFSYGYSLKGIKTCNCETEDYGEKFDENDVITCFANFESDEVELSYAKNGQDLGVAFKISKEVLAGRPLFPHVLCHNCAVEFNFGQKEKPYFPIPEEYTFIQNVPLEDRVRGPKGPEEKKDCEVVMMIGLPGAGKTTWVTKHAAENPGKYNILGTNTIMDKMMVAGFKKQMADTGKLNTLLQRAPQCLGKFIEIAARKKRNFILDQTNVSAAAQRRKMCLFAGFQRKAVVVCPKDEDYKQRTQKKAEVEGKDLPEHAVLKMKGNFTLPEVAECFDEITYVELQKEEAQKLLEQYKEESKKALPPEKKQNTGSKKSNKNKSGKNQFNRGGGHRGRGGFNMRGGNFRGGAPGNRGGYNRRGNMPQRGGGGGGSGGIGYPYPRAPVFPGRGSYSNRGNYNRGGMPNRGNYNQNFRGRGNNRGYKNQSQGYNQWQQGQFWGQKPWSQHYHQGYY

SEQ ID NO: 222071 - protein, 750 aa, Artificial Sequence
  derived and/or modified sequence
MSSSPVNVKKLKVSELKEELKKRRLSDKGLKAELMERLQAALDDEEAGGRPAMEPGNGDDQGFQEGEDELGDEEEGAGDENGHGEQQPQPPATQQQQPQQQRGAAKEAAGKSSGPTSLFAVTVAPPGARQGQQQAGGKKKAEGGGGGGRPGAPAAGDGKTEQKGGDKKRGVKRPREDHGRGYFEYIEENKYSRAKSPQPPVEEEDEHFDDTVVCLDTYNCDLHFKISRDRLSASSLTMESFAFLWAGGRASYGVSKGKVCFEMKVTEKIPVRHLYTKDIDIHEVRIGWSLTTSGMLLGEEEFSYGYSLKGIKTCNCETEDYGEKFDENDVITCFANFESDEVELSYAKNGQDLGVAFKISKEVLAGRPLFPHVLCHNCAVEFNFGQKEKPYFPIPEEYTFIQNVPLEDRVRGPKGPEEKKDCEVVMMIGLPGAGKTTWVTKHAAENPGKYNILGTNTIMDKMMVAGFKKQMADTGKLNTLLQRAPQCLGKFIEIAARKKRNFILDQTNVSAAAQRRKMCLFAGFQRKAVVVCPKDEDYKQRTQKKAEVEGKDLPEHAVLKMKGNFTLPEVAECFDEITYVELQKEEAQKLLEQYKEESKKALPPEKKQNTGSKKSNKNKSGKNQFNRGGGHRGRGGFNMRGGNFRGGAPGNRGGYNRRGNMPQRGGGGGGSGGIGYPYPRAPVFPGRGSYSNRGNYNRGGMPNRGNYNQNFRGRGNNRGYKNQSQGYNQWQQGQFWGQKPWSQHYHQGYY

SEQ ID NO: 222072 - protein, 242 aa, Artificial Sequence
  derived and/or modified sequence
MGLVCVLGDGKTEQKGGDKKRGVKRPREDHGRGYFEYIEENKYSRAKSPQPPVEEEDEHFDDTVVCLDTYNCDLHFKISRDRLSASSLTMESFAFLWAGGRASYGVSKGKVCFEMKVTEKIPVRHLYTKDIDIHEVRIGWSLTTSGMLLGEEEFSYGYSLKGIKTCNCETEDYGEKFDENDVITCFANFESDEVELSYAKNGQDLGVAFKISKEVLAGRPLFPHVLCHNCAVEFNFGQKEKP

SEQ ID NO: 222073 - DNA, 2253 bp, Artificial Sequence
  derived and/or modified sequence
atgagcagcagccccgtgaacgtgaagaagctgaaggtgagcgagctgaaggaggagctgaagaagagaagactgagcgacaagggcctgaaggccgagctgatggagagactgcaggccgccctggacgacgaggaggccggcggcagacccgccatggagcccggcaacggcgacgaccagggcttccaggagggcgaggacgagctgggcgacgaggaggagggcgccggcgacgagaacggccacggcgagcagcagccccagccccccgccacccagcagcagcagccccagcagcagagaggcgccgccaaggaggccgccggcaagagcagcggccccaccagcctgttcgccgtgaccgtggccccccccggcgccagacagggccagcagcaggccggcggcaagaagaaggccgagggcggcggcggcggcggcagacccggcgcccccgccgccggcgacggcaagaccgagcagaagggcggcgacaagaagagaggcgtgaagagacccagagaggaccacggcagaggctacttcgagtacatcgaggagaacaagtacagcagagccaagagcccccagccccccgtggaggaggaggacgagcacttcgacgacaccgtggtgtgcctggacacctacaactgcgacctgcacttcaagatcagcagagacagactgagcgccagcagcctgaccatggagagcttcgccttcctgtgggccggcggcagagccagctacggcgtgagcaagggcaaggtgtgcttcgagatgaaggtgaccgagaagatccccgtgagacacctgtacaccaaggacatcgacatccacgaggtgagaatcggctggagcctgaccaccagcggcatgctgctgggcgaggaggagttcagctacggctacagcctgaagggcatcaagacctgcaactgcgagaccgaggactacggcgagaagttcgacgagaacgacgtgatcacctgcttcgccaacttcgagagcgacgaggtggagctgagctacgccaagaacggccaggacctgggcgtggccttcaagatcagcaaggaggtgctggccggcagacccctgttcccccacgtgctgtgccacaactgcgccgtggagttcaacttcggccagaaggagaagccctacttccccatccccgaggagtacaccttcatccagaacgtgcccctggaggacagagtgagaggccccaagggccccgaggagaagaaggactgcgaggtggtgatgatgatcggcctgcccggcgccggcaagaccacctgggtgaccaagcacgccgccgagaaccccggcaagtacaacatcctgggcaccaacaccatcatggacaagatgatggtggccggcttcaagaagcagatggccgacaccggcaagctgaacaccctgctgcagagagccccccagtgcctgggcaagttcatcgagatcgccgccagaaagaagagaaacttcatcctggaccagaccaacgtgagcgccgccgcccagagaagaaagatgtgcctgttcgccggcttccagagaaaggccgtggtggtgtgccccaaggacgaggactacaagcagagaacccagaagaaggccgaggtggagggcaaggacctgcccgagcacgccgtgctgaagatgaagggcaacttcaccctgcccgaggtggccgagtgcttcgacgagatcacctacgtggagctgcagaaggaggaggcccagaagctgctggagcagtacaaggaggagagcaagaaggccctgccccccgagaagaagcagaacaccggcagcaagaagagcaacaagaacaagagcggcaagaaccagttcaacagaggcggcggccacagaggcagaggcggcttcaacatgagaggcggcaacttcagaggcggcgcccccggcaacagaggcggctacaacagaagaggcaacatgccccagagaggcggcggcggcggcggcagcggcggcatcggctacccctaccccagagcccccgtgttccccggcagaggcagctacagcaacagaggcaactacaacagaggcggcatgcccaacagaggcaactacaaccagaacttcagaggcagaggcaacaacagaggctacaagaaccagagccagggctacaaccagtggcagcagggccagttctggggccagaagccctggagccagcactaccaccagggctactactag

SEQ ID NO: 222074 - DNA, 2478 bp, Artificial Sequence
  derived and/or modified sequence
atgagttcttcccccgtcaacgtcaaaaaactgaaagtgagcgagttgaaagaagagctaaaaaaaaggagactgtccgacaaagggctgaaggccgaattgatggagagactccaggcagctctggatgatgaagaggccggaggacggcccgctatggaacctgggaatgggtcactcgatcttggtggcgatagtgcgggccgctctggcgccggactggaacaggaggcagctgctggaggagatgaggaagaggaagaagaggaggaagaagaggaagggatttctgccctcgacggcgaccagatggaactcggagaagaaaatggtgccgcaggagcggcagactctggtccgatggaagaagaggaggccgctagtgaggatgagaacggggacgaccagggcttccaggagggggaggatgagctgggcgatgaggaggagggagcgggcgatgagaacggtcatggagaacagcagccacagccccctgcaacgcagcagcagcagccccagcagcagaggggcgccgctaaggaggcagccggaaaatcttctgggcccacctcacttttcgcagtcacagtcgccccgccaggggcccggcagggacaacaacaagcgggaggcaagaagaaagcagaaggcggcggcgggggcggacgtcccggcgcccccgctgccggggacggcaagacagaacagaagggaggtgacaagaagcggggagttaagaggcctcgtgaagatcatgggcgcggatatttcgagtacatcgaagaaaataaatattctcgcgccaaatccccacagcctccagtggaagaagaggatgaacatttcgatgacacagtggtgtgccttgatacgtacaattgcgaccttcactttaaaattagcagggataggctgagcgcgagtagcctcacaatggagagtttcgccttcctgtgggccgggggccgggcctcatacggagttagtaaaggcaaagtctgtttcgagatgaaggtcacagagaagatccctgtgagacatctctacacaaaggacatcgacattcacgaagtaagaattggttggagcctgacaacttcggggatgcttctgggagaagaagagttctcgtacggttattcccttaagggtatcaagacttgtaattgtgaaaccgaggactacggggaaaaattcgatgagaatgacgttataacatgttttgctaattttgagtcggatgaagtggagttgtcatatgcaaagaatggacaggacctgggggtggcctttaagatcagcaaagaagtgctcgccggccggcctctgtttcctcatgtgctgtgtcataattgtgcagtggaattcaattttggacagaaggagaaaccctacttccctatcccagaagagtataccttcattcagaatgttcctctggaggatcgcgtgcgggggccaaagggtccagaggaaaagaaggactgcgaagtggtaatgatgatcggcctcccaggagccggcaagacgacctgggtaaccaagcacgcagccgagaatcctgggaaatacaacatcctcggaacaaatacaataatggataagatgatggttgcaggcttcaagaaacagatggccgacactggcaagctgaataccctgctgcagcgagcccctcagtgccttggcaaatttatagaaattgctgctcgaaagaaacgcaactttatcctcgatcagactaacgtgtccgcagccgcacaacggcgcaaaatgtgcctgtttgcagggtttcagcgcaaagccgtggtagtgtgtccaaaggatgaagattacaaacagaggacccagaagaaggcagaggttgagggcaaggacctgcctgagcacgccgtattgaagatgaaggggaattttaccttgcccgaagtggccgaatgctttgatgagatcacttatgttgagctacaaaaagaagaggcccaaaagctgctggagcagtacaaggaggagtcgaaaaaagccctgcctcctgagaagaagcagaacactggctccaagaagtccaacaagaataaatctggaaagaatcaattcaaccgaggcggaggccacagagggagaggtggatttaacatgcgcggaggtaatttcaggggaggagccccgggtaatcgcggtggttataacaggagaggcaacatgccccagagaggaggaggcggaggcggtagtggaggaatcggctacccatacccacgagcaccagtgtttcccgggcgtggctcgtatagcaacaggggcaactacaacagaggggggatgcctaacaggggcaactataatcagaattttcggggccgaggtaacaaccgaggatacaaaaaccagtcacaggggtataatcagtggcaacaggggcagttttggggccagaagccatggtcccagcattatcatcagggttattactag

SEQ ID NO: 222075 - DNA, 2253 bp, Artificial Sequence
  derived and/or modified sequence
atgtcgtcttcaccagtcaatgtcaagaagctgaaagtgtccgagctgaaggaagagctcaagaaacgcagactatctgacaaagggctgaaggcagagctcatggaaagactgcaggcggctttagacgatgaggaagccggcggacggccagctatggagcccggaaacggggatgaccagggcttccaagagggagaggacgagctcggggacgaagaggagggcgccggcgatgagaacgggcatggggagcagcaacctcagccccctgctactcagcaacagcagccccagcagcagcggggagcggctaaggaggccgccggcaaatcatcaggccctacttctctcttcgccgtgacagtggcccctcctggggcgcgtcaaggtcaacaacaggccggtggcaaaaaaaaagccgaggggggaggcgggggcggtagacctggcgcaccagctgccggcgatggcaagacggagcaaaaagggggcgacaagaaacggggtgtcaaaaggccccgcgaagaccacgggaggggttacttcgaatacattgaggagaacaaatactctcgcgccaaatcccctcaaccaccggtggaggaggaagacgaacactttgacgacaccgtcgtgtgtctggatacctacaattgcgacttgcattttaagatatctagggataggctctccgccagcagcctcacaatggaatcctttgcattcttgtgggcaggaggcagggcttcttatggggtgagcaaaggtaaagtttgcttcgaaatgaaagtgaccgagaagatccctgtgaggcatctttacaccaaagatattgatattcatgaagtccgcataggctggtccttaactacgagtggaatgctccttggcgaagaggagttttcctacggttactcgctgaaaggtattaagacatgtaactgtgagacggaagactatggtgaaaagttcgatgaaaatgacgttatcacatgcttcgccaacttcgagtctgatgaggtcgagttgagctacgccaaaaatggacaggatctgggggttgcattcaaaatctcaaaggaggttctggccgggaggcctctgtttcctcacgtgctgtgtcataactgcgccgtggaatttaatttcggtcagaaggagaagccctacttccctattcccgaggagtacacgtttattcagaatgttcctctggaggacagagtgaggggcccaaagggcccagaagaaaaaaaagactgtgaagtggtgatgatgatcggtctcccgggcgctggtaaaacaacctgggtgacgaaacatgccgcagagaaccccgggaagtacaatatccttggaacgaacaccataatggacaagatgatggtcgcagggttcaaaaagcagatggctgacactgggaaactgaataccctcctccaacgggcgccacaatgcctcggaaaattcattgagatcgccgctcgcaaaaagcgtaatttcatcctcgatcaaactaatgtgtccgccgctgcacagagacggaagatgtgcctcttcgctggcttccagagaaaggcagtggtcgtatgccccaaggacgaagactacaaacagagaactcagaaaaaggccgaggttgagggcaaggatctccccgagcatgctgtattgaaaatgaaggggaattttacacttccagaggtcgccgaatgctttgacgagatcacttacgtggagctgcagaaagaggaggctcagaaacttcttgaacagtacaaggaggagagtaaaaaggctcttccacctgagaagaaacaaaataccggttctaaaaagagtaacaagaataagtctggcaagaaccagttcaaccgcggaggcggacataggggaagaggcggcttcaacatgcgcggcggtaacttccgaggcggggcgccaggaaaccgcggcggatacaatcgacgtggcaacatgccccaaaggggaggcggggggggagggtcgggcgggatcggatatccctacccccgggctccagtctttcccggccgcggttcctatagcaatcggggaaattacaataggggggggatgcctaaccgggggaattacaaccagaactttcgcggtcgtggaaacaatcgtggatataagaatcagtctcagggctataatcagtggcaacagggacaattctgggggcagaagccgtggagccaacactaccatcaggggtattattag

SEQ ID NO: 222076 - DNA, 2478 bp, Artificial Sequence
  derived and/or modified sequence
atgagcagcagccctgtgaatgtgaagaagctgaaggtgtctgagctgaaggaggagctgaagaagaggcggctgagtgacaagggcctgaaggccgagctgatggagcggctgcaggccgccctggatgatgaggaggccggcggccgcccagccatggagcctggaaatggcagcctggacctgggcggggacagcgctggccgcagcggggccggcctggagcaggaggccgctgctggaggagatgaggaggaggaggaggaggaggaggaggaggagggcatcagcgccctggatggagaccagatggagctgggggaggagaatggagctgctggagctgctgacagcggccccatggaggaggaggaggccgcctctgaagatgaaaatggagatgaccagggcttccaggagggggaggatgagctgggagatgaggaggagggcgctggagatgaaaatggccacggggagcagcagccccagcccccagccacccagcagcagcagccccagcagcagagaggagctgccaaggaggccgccggcaagagcagcggccccaccagcctgtttgctgtgacagtggcccctcctggggcccggcagggccagcagcaggccggcggcaagaagaaggccgagggcggcggcggcggcggccggcctggggccccagctgctggagatggcaagacagagcagaagggcggggacaagaagaggggcgtgaagaggcccagagaagatcatggccggggctactttgagtacatcgaggagaacaagtacagccgggccaagagcccccagccccctgtggaggaggaggatgagcactttgatgacacagtggtgtgcctggacacctacaactgtgacctgcacttcaagatcagccgggaccggctgagcgccagcagcctgaccatggagagctttgccttcctgtgggccggcggccgggccagctatggagtgtccaagggcaaggtgtgctttgagatgaaggtgacagagaagatccctgtgcgccacctgtacaccaaggacatcgacatccacgaggtgagaattggctggagcctgaccaccagcggcatgctgctgggggaggaggagttctcctatggctacagcctgaagggcatcaagacctgcaactgtgaaacagaggactatggagagaagtttgatgaaaatgatgtgatcacctgctttgccaactttgaaagtgatgaggtggagctgtcctatgccaagaatggccaggacctgggcgtggccttcaagatcagcaaggaggtgctggccggccggcccctcttcccccacgtgctgtgccacaactgtgctgtggagttcaactttggccagaaggagaagccctacttccccatccctgaggagtacaccttcatccagaatgtgcccctggaggacagagtgcggggccccaagggccctgaggagaagaaggactgtgaggtggtgatgatgattggcctgcccggggccggcaagaccacctgggtgaccaagcacgccgctgagaaccctgggaagtacaacatcctgggcaccaacaccatcatggacaagatgatggtggccggcttcaagaagcagatggctgacaccgggaagctgaacaccctgctgcagagggccccccagtgcctgggcaagttcattgaaattgctgccaggaagaagaggaacttcatcctggaccagaccaacgtgtctgctgctgcccagaggaggaagatgtgcctgtttgctggcttccagaggaaggctgtggtggtgtgccccaaggatgaggactacaagcagaggacccagaagaaggccgaggtggagggcaaggacctgcctgagcacgctgtgctgaagatgaagggcaacttcaccctgcctgaggtggctgaatgttttgatgagatcacctacgtggagctgcagaaggaggaggcccagaagctgctggagcagtacaaggaggagagcaagaaggccctgcccccagagaagaagcagaacacaggcagcaagaagagcaacaagaacaagagcggcaagaaccagttcaacagaggaggcggccaccggggccggggcggcttcaacatgaggggcggcaacttccggggcggggcccctggcaacagaggaggctacaacagaagaggcaacatgccccagaggggcggcggcggcggcggcagcggcggcatcggctacccctacccccgggcccctgtgtttcctggccggggcagctacagcaacagaggcaactacaacagaggaggcatgcccaacagaggcaactacaaccagaacttccggggccggggcaacaacagaggctacaagaaccagagccagggctacaaccagtggcagcagggccagttctggggccagaagccctggagccagcactaccaccagggctactactag

SEQ ID NO: 222077 - DNA, 2253 bp, Artificial Sequence
  derived and/or modified sequence
atgagcagcagccctgtgaatgtgaagaagctgaaggtgtctgagctgaaggaggagctgaagaagaggcggctgagtgacaagggcctgaaggccgagctgatggagcggctgcaggccgccctggatgatgaggaggccggcggccgcccagccatggagcctggaaatggagatgaccagggcttccaggagggagaagatgagctgggagatgaggaggagggcgctggagatgaaaatggacatggagagcagcagccccagcccccagccacccagcagcagcagccccagcagcagagaggagctgccaaggaggccgccggcaagagcagcggccccaccagcctgtttgctgtgacagtggcccctcctggggcccggcagggccagcagcaggccggcggcaagaagaaggccgagggcggcggcggcggcggccggcctggggccccagctgctggagatggcaagacagagcagaagggcggggacaagaagaggggcgtgaagaggccccgggaggaccacggccggggctactttgagtacatcgaggagaacaagtacagccgggccaagagcccccagccccctgtggaggaggaggatgagcactttgatgacacagtggtgtgcctggacacctacaactgtgacctgcacttcaagatcagccgggaccggctgagcgccagcagcctgaccatggagagctttgccttcctgtgggccggcggccgggccagctatggagtgtccaagggcaaggtgtgctttgagatgaaggtgacagagaagatccctgtgcgccacctgtacaccaaggacatcgacatccacgaggtgcgcatcggctggagcctgaccaccagcggcatgctgctgggggaggaggagttctcctatggctacagcctgaagggcatcaagacctgcaactgtgaaacagaagattatggagagaagtttgatgaaaatgatgtgatcacctgctttgccaactttgaaagtgatgaggtggagctgtcctatgccaagaatggccaggacctgggcgtggccttcaagatcagcaaggaggtgctggccggccggcccctcttcccccacgtgctgtgccacaactgtgctgtggagttcaactttggccagaaggagaagccctacttccccatccctgaggagtacaccttcatccagaatgtgcccctggaggacagagtgcggggccccaagggccctgaggagaagaaggactgtgaggtggtgatgatgattggcctgcctggagctgggaagaccacctgggtgaccaagcatgctgctgaaaatcctgggaagtacaacatcctgggcaccaacaccatcatggacaagatgatggtggccggcttcaagaagcagatggctgacaccgggaagctgaacaccctgctgcagagggccccccagtgcctgggcaagttcatcgagattgctgccaggaagaagaggaacttcatcctggaccagaccaacgtgtctgctgctgcccagaggaggaagatgtgcctgtttgctggcttccagaggaaggctgtggtggtgtgccccaaggatgaggactacaagcagaggacccagaagaaggccgaggtggagggcaaggacctgcctgagcacgctgtgctgaagatgaagggcaacttcaccctgcctgaggtggccgagtgctttgatgagatcacctacgtggagctgcagaaggaggaggcccagaagctgctggagcagtacaaggaggagagcaagaaggccctgcccccagagaagaagcagaacacaggcagcaagaagagcaacaagaacaagagcggcaagaaccagttcaacagaggaggcggccaccggggccggggcggcttcaacatgagaggaggcaacttccggggcggggcccctggcaacagaggaggctacaacagaagaggcaacatgccccagagaggaggcggcggcggcggcagcggcggcatcggctacccctacccccgggcccctgtgtttcctggccggggcagctacagcaacagaggcaactacaacagaggaggcatgcccaacagaggcaactacaaccagaacttccggggccggggcaacaacagaggctacaagaaccagagccagggctacaaccagtggcagcagggccagttctggggccagaagccctggagccagcactaccaccagggctactactag

SEQ ID NO: 222078 - DNA, 2478 bp, Artificial Sequence
  derived and/or modified sequence
atgagcagcagccccgtgaacgtgaagaagctgaaggtgagcgagctgaaagaggagctcaaaaaacggcgtctctccgataaagggttgaaagcagagttgatggagcgcctgcaagctgctttagacgatgaagaagcgggagggcggcctgccatggaaccaggaaacggatcactagacctcggtggggactccgccggaagatctggggctggcctggagcaggaggctgccgctgggggtgatgaggaagaggaggaggaggaggaagaagaggaaggcatcagcgccctggacggcgatcagatggagctgggggaggagaatggcgcagccggcgcagccgatagtggccctatggaggaagaggaggccgcctctgaagacgagaatggcgatgaccagggatttcaggagggagaggacgagcttggggacgaagaagagggtgcaggagatgaaaacggtcatggagagcagcagcctcagccccctgctactcagcagcagcagcctcaacagcagcgaggcgccgctaaggaggcagcaggaaagtcttcaggaccaacttcattgttcgccgtaactgtcgccccacctggtgcccggcaggggcagcagcaggctggagggaagaaaaaagctgagggtggaggtggcggaggacgacccggggcgccggctgccggagatgggaagactgaacagaagggaggggacaagaaacgaggcgtcaagcgcccacgagaagatcacgggcgaggatattttgagtacattgaggagaataagtatagccgcgccaagtcaccgcaacccccagtggaggaagaggacgagcatttcgatgacacagtggtttgcctggacacttacaactgcgacctgcacttcaaaatttctagggaccgactctctgcatctagcctcacgatggagtcgtttgccttcctttgggctggtggcagagcgtcctacggggtctccaagggaaaggtgtgttttgagatgaaggtgacagaaaagatacccgttagacacctgtatacgaaggacattgacattcacgaggtgaggattggatggagtctaaccacatctggtatgctgctcggtgaagaagaattttcttacggctatagcttaaaggggattaaaacttgtaattgcgagaccgaggactacggagaaaaatttgacgaaaatgatgtgattacctgctttgctaatttcgagagcgacgaagtggagctgtcctatgcaaaaaatggacaggaccttggcgtcgcttttaaaatcagcaaggaggtgctagctggaaggcccctcttccctcacgtgctctgccacaattgcgcagtggagttcaactttggtcagaaggagaaaccttacttccccatccctgaagagtataccttcatccagaatgtcccactcgaagacagagtgaggggaccaaagggtcccgaggagaagaaggattgcgaggtcgtgatgatgataggcttgccaggagctgggaagaccacctgggtgaccaaacacgcggcagagaacccgggcaagtataatatcctgggaaccaatacaatcatggacaagatgatggtggccgggtttaaaaagcagatggcggataccggtaaacttaataccctgcttcaaagagctccacagtgcctggggaagttcattgaaatcgccgcgaggaagaagaggaactttatacttgaccagaccaatgtctccgctgcggcacagagacggaaaatgtgtcttttcgcagggtttcaacggaaagctgtggtcgtgtgtccaaaggatgaggactataaacagcgcactcagaaaaaggcagaagtcgaaggaaaagatctgccagaacacgctgttctcaaaatgaaagggaatttcactttgcctgaggtggcggagtgttttgatgagatcacctacgtcgagctgcagaaggaagaggctcagaagctcctggagcagtacaaagaagaatccaagaaggccctgcctccagaaaagaaacagaacacaggtagcaagaaatcaaacaagaacaagagtggaaagaaccagttcaatcggggcggcggacacagaggacgtggcggcttcaatatgcgcggggggaatttccgcggcggagcacccggtaacaggggagggtacaataggcggggaaacatgccccagagaggcggcggaggcgggggttctggggggattggctatccttaccctagagcaccagtgttcccaggccgggggagctatagcaatagagggaactacaacagaggtggcatgccgaaccgtggtaattataatcagaacttccgtggacgtgggaataacagaggttacaagaaccagagccaggggtacaatcaatggcagcaaggccagttttggggacaaaaaccctggtcacaacactatcatcaggggtattactag

SEQ ID NO: 222079 - DNA, 2253 bp, Artificial Sequence
  derived and/or modified sequence
atgagcagcagccccgtgaacgtgaagaagctgaaggtgagcgagctgaaggaagaactgaagaaacgcagactctccgataaggggctgaaggccgagcttatggaaaggctgcaggctgctctggacgatgaggaggcgggaggacgccctgcaatggagccggggaatggggacgaccagggatttcaagagggagaggatgaactgggcgacgaggaggaaggggcaggcgacgaaaatgggcacggcgagcagcagcctcagcctcctgccacccagcagcagcagccccagcagcagcgcggggccgccaaagaagctgccggcaagagcagcggcccgacatcgctgttcgccgttaccgtcgcccccccaggggcccgccagggccagcagcaagctgggggaaagaagaaagccgaaggcggcggcggcgggggaagaccgggcgctcctgccgccggggatggcaagaccgagcagaagggtggagataaaaaacggggggtaaagcgccccagagaagaccatggtcgcgggtatttcgagtacatcgaagaaaacaagtactcccgagcaaaaagcccacagcctcctgtggaggaggaggacgaacatttcgacgacactgtcgtgtgccttgatacttataattgcgacttgcactttaaaatcagtcgcgacagactgagtgcgtcctcgctgacaatggagagcttcgccttcctgtgggcggggggcagggccagctacggtgtgagtaaaggcaaggtttgtttcgaaatgaaagtcacagagaagattcccgttcgccatttgtacaccaaagacattgatatccacgaagtacgtataggctggtccttgaccaccagcggtatgcttcttggtgaggaagaattcagttacgggtactctcttaagggcattaaaacatgtaattgcgagaccgaagattatggggagaaattcgacgaaaacgacgttattacctgctttgctaacttcgagagtgatgaggttgagctttcatatgctaagaatggccaagatctcggtgtggcattcaaaataagcaaagaggtcctggccggtaggccgctgttcccccacgtcttgtgccacaactgcgccgtggagtttaattttggccaaaaagagaaaccatacttcccgatacctgaagaatataccttcattcagaacgttcctctcgaagaccgcgtccggggcccaaagggaccggaggagaagaaggattgcgaagtcgtgatgatgattggtctgccgggcgcagggaagactacatgggtaaccaaacacgccgcggagaacccgggcaaatataatatcctggggacaaatacaatcatggacaaaatgatggtggctggttttaagaagcaaatggcagacacggggaagctgaatacattgctgcagcgagctcctcaatgtctcggtaagtttattgaaattgctgcacggaagaagaggaatttcattctggaccagactaatgtgtctgctgccgcccagcggagaaagatgtgcctgttcgccgggtttcaacggaaagctgtggtcgtctgcccaaaagacgaagattataaacagcggactcagaagaaggctgaagtcgaaggcaaggacttaccagaacacgccgtgctcaagatgaagggaaacttcacgcttcctgaagtggccgagtgtttcgatgaaattacgtacgtcgagctgcagaaagaagaagctcagaaactgctggaacagtacaaagaggaatcaaagaaagcactccccccagaaaaaaaacagaacacagggtctaagaagtccaataagaataagtccggcaagaatcaatttaacagaggcgggggccataggggccgcggggggtttaatatgcggggtggaaatttccggggtggcgcacctggtaatagaggagggtataacaggagaggcaatatgccccagcggggtggtgggggcggaggcagcggcggaataggttatccctacccgcgggcacccgtgttccccggtcgtggctcgtactccaataggggcaactacaatcgtggagggatgccgaacagggggaactacaaccaaaatttcaggggacggggcaacaaccgcgggtacaagaatcaaagtcaggggtataaccagtggcagcagggtcagttttggggacagaagccttggtcccagcactatcaccaaggctattactag

SEQ ID NO: 222080 - DNA, 2478 bp, Artificial Sequence
  derived and/or modified sequence
atgtcaagcagcccagtgaacgtaaaaaaactgaaagtgtcagagctgaaagaggagctgaaaaagcggcgtctgtccgacaaaggactcaaggccgagctgatggagaggttgcaagccgctcttgacgacgaggaagcgggaggcaggccagcaatggagcctggcaatgggagccttgacctcgggggtgactcagccggtcgcagcggggctggcctcgagcaggaggcagctgctggaggcgatgaggaggaggaagaggaggaggaggaggaggaaggaatctctgctctcgacggggatcaaatggagctcggcgaggaaaatggagcagcgggtgcagccgatagtggaccaatggaggaggaggaggccgcaagcgaggatgaaaatggcgacgatcaaggctttcaggagggtgaggacgagctcggcgatgaagaggaaggggctggggatgagaacggccacggagagcaacaaccccagcctcccgcaacacagcagcagcagccgcagcagcagaggggcgctgcaaaagaggcagcaggcaagagcagtggccctacaagcctgtttgctgtgaccgtggcgcctccgggtgctcggcagggccaacagcaagccggagggaaaaagaaagccgagggagggggaggcggaggcaggcccggtgcacccgctgcgggagatgggaaaacggagcaaaaagggggagacaaaaagcgaggggtaaagcgtcctagagaagaccacggcagaggctacttcgagtacatcgaggagaacaagtattccagagccaagagtccccagccccctgtcgaagaagaagacgagcactttgatgatacagttgtctgtctcgacacatacaattgtgatctccactttaagattagcagagatcgtcttagcgccagctctttaacaatggaatctttcgcctttctctgggctgggggtcgcgcatcctacggtgtcagtaagggcaaggtatgctttgaaatgaaagttactgagaaaattcccgtccgacacctctacactaaagacatcgatatccacgaggtcaggatcggctggtcgctcacaactagcggcatgctgctgggggaagaggaattttcatacgggtattctctcaaaggcattaagacatgcaactgcgaaacagaggactacggcgagaagtttgacgagaacgatgttattacctgtttcgccaactttgagtccgacgaggtcgagctaagttacgctaagaacggtcaggatctcggcgtggccttcaagatttccaaggaagtgctggctggcaggcccctgttcccccatgtgctctgccataattgcgcagtcgaatttaatttcggccagaaagagaagccatactttcccattcctgaagaatataccttcatccagaatgttcccctggaggatagagtccgtgggccaaaaggacccgaagaaaaaaaggactgcgaagtggtgatgatgatcggacttccgggagccggaaagaccacttgggtgaccaaacatgcagccgagaacccaggtaagtataacatcctcgggactaacacaattatggacaagatgatggtggctggctttaaaaagcaaatggctgatacaggtaaactaaatactttgttgcagcgggctcctcagtgtctcggaaagtttatcgagatcgccgcacggaagaaaagaaacttcatactggatcaaactaatgttagtgccgctgctcagagaagaaagatgtgcttattcgctggatttcagcgcaaagctgtcgtggtgtgccccaaagatgaagactataaacagagaacccagaagaaagccgaagtagaagggaaggaccttccggaacacgccgttcttaagatgaaaggtaatttcactttacccgaagtcgccgagtgtttcgatgagattacctatgtcgaactgcagaaagaggaggcccaaaagctcctggaacagtacaaagaagagagcaagaaggctctcccacctgagaagaagcagaacactggcagtaagaagtccaacaaaaataagtccggtaaaaatcagtttaatagaggagggggacatcggggaaggggtggctttaatatgaggggtggaaactttcgaggtggggctccagggaatagaggaggctacaaccgacggggtaacatgccccaacgcggagggggtggcggaggttcaggaggaatcgggtacccttacccccgtgcacccgtgtttcccggtagagggagctattctaaccggggaaactataatagagggggaatgccgaaccgcggaaattataatcaaaacttcagaggtcgcggaaataataggggatataaaaatcagtcacaagggtataatcagtggcaacagggacagttctgggggcagaagccctggtcccaacattaccatcagggatattactag

SEQ ID NO: 222081 - DNA, 2253 bp, Artificial Sequence
  derived and/or modified sequence
atgagtagctccccagttaacgtcaaaaaattgaaggtttccgagctgaaggaggagctcaagaaacgtcgcctgtccgacaaaggacttaaggcggagctcatggagcgattgcaagcagctctggatgacgaagaagccggtggcagacctgctatggagcccggtaatggcgatgaccagggctttcaggagggagaggacgaactcggagacgaggaagagggagctggagatgaaaacggccacggcgagcaacagccccagccaccagcaactcaacagcagcagcctcagcagcagagaggtgctgccaaggaggccgctggtaagagctctgggccaacatctttatttgctgtgaccgttgccccaccaggagccagacagggacaacagcaggccggaggaaaaaagaaggctgaaggaggtgggggaggaggaagacctggtgctccagctgcgggtgacggaaagacagagcagaagggcggagataagaagaggggcgtgaagagaccccgagaggaccatggaaggggctattttgagtatatcgaggagaataagtatagtcgggctaagtcgcctcagccacccgttgaagaagaagacgagcactttgatgatacggtcgtctgtctcgacacctataactgcgatctgcattttaaaatctcacgggatagactgagcgccagttccttgactatggaaagtttcgcatttctctgggccggagggagagccagctacggcgtgtcaaaaggtaaggtgtgctttgaaatgaaggtgaccgaaaagatccctgtgcgtcatctgtacactaaggatatcgacatacacgaagtgcgtattggctggtctttgacaacttcggggatgttgttaggagaagaagaattctcttacgggtattcgctgaaaggcattaagacttgcaattgcgagactgaagattacggcgagaagttcgatgaaaatgacgttatcacatgctttgcaaactttgagagtgacgaggtcgagctgtcctatgcgaaaaatggtcaggatctgggtgtggcctttaaaatctccaaggaagtcctggcaggcagaccattgttcccccatgtgttatgccataactgtgccgttgagttcaactttggccagaaagaaaagccctatttccccatacctgaggagtataccttcattcagaacgtgccactggaggacagagtcaggggccctaaggggcctgaagaaaagaaggattgcgaggtcgtgatgatgatcggcttgcccggagcagggaagactacctgggtgactaagcatgccgctgagaatccaggcaagtacaatattttggggacaaacaccatcatggataagatgatggtagcaggctttaagaaacagatggcagacaccgggaaactaaatacactgttgcaacgcgctcctcagtgcctaggaaagttcattgagattgccgcacgaaaaaaacggaatttcatcctcgaccagaccaacgtttctgccgctgctcagcgacggaaaatgtgtctatttgctggcttccagcgaaaagccgtcgtggtctgccccaaggatgaggattacaagcagaggacacaaaagaaggccgaagtggagggcaaagatctgccggagcatgccgtgctgaaaatgaagggcaatttcaccctgccagaagtggccgaatgctttgacgaaatcacctatgttgagctacaaaaggaagaagctcagaaacttctggagcagtacaaggaggagagtaaaaaggccctaccccctgagaagaaacagaatactggaagcaaaaaatctaataaaaacaagtccggcaaaaaccagtttaacagggggggtgggcacaggggccgagggggatttaatatgcggggaggcaatttcagaggaggtgcccctggcaatcggggtggttacaacagacggggaaatatgccgcagagggggggtggagggggaggctcgggcggtatcggctacccctatcctcgggctccagtgtttcctggtcggggatcttactcgaacaggggcaattacaaccggggaggtatgcctaatagaggcaattacaaccaaaacttccgcggtcgtgggaacaatcggggatataagaaccaatcccagggctacaaccagtggcaacagggacaattctgggggcagaaaccttggtcccaacactaccaccaggggtattattag

SEQ ID NO: 222082 - DNA, 3498 bp, Artificial Sequence
  derived and/or modified sequence
aactcggtgaaaggaattggcgccgttcgacaccaggcggatccgctctgcagcacgaacccatctccagccgcagccgcagccgccgcccgggccgaggagcagccgcagcagccgccaccagtggccgagtgagcggagccgagtttgaggcagcgcctagcggtgaatcggggccctcaccatgagttcctcgcctgttaatgtaaaaaagctgaaggtgtcggagctgaaagaggagctcaagaagcgacgcctttctgacaagggtctcaaggccgagctcatggagcgactccaggctgcgctggacgacgaggaggccgggggccgccccgccatggagcccgggaacggcgacgatcagggtttccaggaaggggaagatgagctcggggacgaagaggaaggcgcgggcgacgagaacgggcacggggagcagcagcctcaaccgccggcgacgcagcagcaacagccccaacagcagcgcggggccgccaaggaggccgcggggaagagcagcggccccacctcgctgttcgcggtgacggtggcgccgcccggggcgaggcagggccagcagcaggcgggaggtaagaagaaggcggaaggcggcggaggcggcggtcgccccggggctccggcggcgggggacggcaaaacagaacagaaaggcggagataaaaagaggggtgttaaaagaccacgagaagatcatggccgtggatattttgagtacattgaagagaacaagtatagcagagccaaatctcctcagccacctgttgaagaagaagatgaacacttcgatgacacagtggtttgtcttgatacttataattgtgatctacattttaaaatatcaagagatcgtctcagtgcttcttcccttacaatggagagttttgcttttctttgggctggaggaagagcatcctatggtgtgtcaaaaggcaaagtgtgttttgagatgaaggttacagagaagatcccagtaaggcatttatatacaaaagatattgacatacatgaagttcgtattggctggtcactaactacaagtggaatgttacttggtgaagaagaattttcttatgggtattctctaaaaggaataaaaacatgcaactgtgagactgaagattatggagaaaagtttgatgaaaatgatgtgattacatgttttgctaactttgaaagtgatgaagtagaactctcgtatgctaagaatggacaagatcttggcgttgccttcaaaatcagtaaggaagttcttgctggacggccactgttcccgcatgttctctgccacaactgtgcagttgaatttaattttggtcagaaggaaaagccatattttccaatacctgaagagtatactttcatccagaacgtccccttagaggatcgagttagaggaccaaaggggcctgaagagaagaaagattgtgaagttgtgatgatgattggcttgccaggagctggaaaaactacctgggttactaaacatgcagcagaaaatccagggaaatataacattcttggcacaaatactattatggataagatgatggtggcaggttttaagaagcaaatggcagatactggaaaactgaacacactgttgcagagagccccccagtgtcttgggaaatttattgagattgctgcccgaaagaagcgaaattttattctggatcagacaaatgtgtctgctgctgcccagaggagaaaaatgtgcctgtttgcaggcttccagcgaaaagctgttgtagtttgcccaaaagatgaagactataagcaaagaacacagaagaaagcagaagtagaggggaaagacctaccagaacatgcggtcctcaaaatgaaaggaaactttaccctcccagaggtagctgagtgctttgatgaaataacctatgttgaacttcagaaggaagaagcccaaaaactcttggagcaatataaggaagaaagcaaaaaggctcttccaccagaaaagaaacagaacactggctcaaagaaaagcaataaaaataagagtggcaagaaccagtttaacagaggtggtggccatagaggacgtggaggattcaatatgcgtggtggaaatttcagaggaggagcccctgggaatcgtggcggatataataggaggggcaacatgccacagagaggtggtggcggtggaggaagtggtggaatcggctatccataccctcgtgcccctgtttttcctggccgtggtagttactcaaacagagggaactacaacagaggtggaatgcccaacagagggaactacaaccagaacttcagaggacgaggaaacaatcgtggctacaaaaatcaatctcagggctacaaccagtggcagcagggtcaattctggggtcagaagccatggagtcagcattatcaccaaggatattattgaatacccaaataaaacgaactgatacatatttctccaaaaccttcacaagaagtcgactgttttctttagtaggctaactttttaaacattccacaagaggaagtgcctgcgggttccttttttagaagctttgtgggttgattttttttcttttcttttttgtacatttttaattgcagtttaaaagtgaatcgtaagagaacctcagcattgtgcacgataagagaatgtgtcagtatttcagggttctacattttatctgtaaaatgtgacttttttttttttttatcacaacagaagtaaaatgttgctttgtacctggtgtcttttattaagaatttactccccccatttctcacagagaataacagtcgggagtcattgtcacaatataatagaaatgttagcaaccagattcatgtaaggactaagtggtcctcatgaattgcattaagactctgtactgctcatattacactccatcctctctgtagtttgctgggtagtggagggggtaagctaaatcatagtttctgacaataactgggaaggttttttcttaaaataacaatggaattggtataattgggattgaaaactaaaacttggaactaagatagagaagatggagtgtatgtagaagggctgttaaaaatgtaaaacttggttgcattatttgtggaggctcaaacttgtgaaggttaataccataatttttccatttgttctgcattttgattctgaaaagaaagctggctttgcccatttcttattaaaaaaacttgttgtaaatccagttgtctaatgggatctatatgaagttagccatgtctgtatgcccttctcccacaaaatactgtataactagtgtgcttgtagtagttaactccaccatctttgtaagctaatgaaattgtgagtcacccatttatatcttaatttttaatcatgtcagttcttgaatgggtatctccttagcctgctgatttctttttctttctaaagaaagtgggtggagaaattaatttagacgtttgtttgcaataaaaagaattcatttt

SEQ ID NO: 222083 - DNA, 3704 bp, Artificial Sequence
  derived and/or modified sequence
cgccgttcgacaccaggcggatccgctctgcagcacgaacccatctccagccgcagccgcagccgccgcccgggccgaggagcagccgcagcagccgccaccagtggccgagtgagcggagccgagtttgaggcagcgcctagcggtgaatcggggccctcaccatgagttcctcgcctgttaatgtaaaaaagctgaaggtgtcggagctgaaagaggagctcaagaagcgacgcctttctgacaagggtctcaaggccgagctcatggagcgactccaggctgcgctggacgacgaggaggccgggggccgccccgccatggagcccgggaacggcagcctagacctgggcggggattccgctgggcgctcgggagcaggcctcgagcaggaggccgcggccggcggcgatgaagaggaggaggaagaggaagaggaggaggaaggaatctccgctctggacggcgaccagatggagctaggagaggagaacggggccgcgggggcggccgactcgggcccgatggaggaggaggaggccgcctcggaagacgagaacggcgacgatcagggtttccaggaaggggaagatgagctcggggacgaagaggaaggcgcgggcgacgagaacgggcacggggagcagcagcctcaaccgccggcgacgcagcagcaacagccccaacagcagcgcggggccgccaaggaggccgcggggaagagcagcggccccacctcgctgttcgcggtgacggtggcgccgcccggggcgaggcagggccagcagcaggcgggaggtaagaagaaggcggaaggcggcggaggcggcggtcgccccggggctccggcggcgggggacggcaaaacagaacagaaaggcggagataaaaagaggggtgttaaaagaccacgagaagatcatggccgtggatattttgagtacattgaagagaacaagtatagcagagccaaatctcctcagccacctgttgaagaagaagatgaacacttcgatgacacagtggtttgtcttgatacttataattgtgatctacattttaaaatatcaagagatcgtctcagtgcttcttcccttacaatggagagttttgcttttctttgggctggaggaagagcatcctatggtgtgtcaaaaggcaaagtgtgttttgagatgaaggttacagagaagatcccagtaaggcatttatatacaaaagatattgacatacatgaagttcgtattggctggtcactaactacaagtggaatgttacttggtgaagaagaattttcttatgggtattctctaaaaggaataaaaacatgcaactgtgagactgaagattatggagaaaagtttgatgaaaatgatgtgattacatgttttgctaactttgaaagtgatgaagtagaactctcgtatgctaagaatggacaagatcttggcgttgccttcaaaatcagtaaggaagttcttgctggacggccactgttcccgcatgttctctgccacaactgtgcagttgaatttaattttggtcagaaggaaaagccatattttccaatacctgaagagtatactttcatccagaacgtccccttagaggatcgagttagaggaccaaaggggcctgaagagaagaaagattgtgaagttgtgatgatgattggcttgccaggagctggaaaaactacctgggttactaaacatgcagcagaaaatccagggaaatataacattcttggcacaaatactattatggataagatgatggtggcaggttttaagaagcaaatggcagatactggaaaactgaacacactgttgcagagagccccccagtgtcttgggaaatttattgagattgctgcccgaaagaagcgaaattttattctggatcagacaaatgtgtctgctgctgcccagaggagaaaaatgtgcctgtttgcaggcttccagcgaaaagctgttgtagtttgcccaaaagatgaagactataagcaaagaacacagaagaaagcagaagtagaggggaaagacctaccagaacatgcggtcctcaaaatgaaaggaaactttaccctcccagaggtagctgagtgctttgatgaaataacctatgttgaacttcagaaggaagaagcccaaaaactcttggagcaatataaggaagaaagcaaaaaggctcttccaccagaaaagaaacagaacactggctcaaagaaaagcaataaaaataagagtggcaagaaccagtttaacagaggtggtggccatagaggacgtggaggattcaatatgcgtggtggaaatttcagaggaggagcccctgggaatcgtggcggatataataggaggggcaacatgccacagagaggtggtggcggtggaggaagtggtggaatcggctatccataccctcgtgcccctgtttttcctggccgtggtagttactcaaacagagggaactacaacagaggtggaatgcccaacagagggaactacaaccagaacttcagaggacgaggaaacaatcgtggctacaaaaatcaatctcagggctacaaccagtggcagcagggtcaattctggggtcagaagccatggagtcagcattatcaccaaggatattattgaatacccaaataaaacgaactgatacatatttctccaaaaccttcacaagaagtcgactgttttctttagtaggctaactttttaaacattccacaagaggaagtgcctgcgggttccttttttagaagctttgtgggttgattttttttcttttcttttttgtacatttttaattgcagtttaaaagtgaatcgtaagagaacctcagcattgtgcacgataagagaatgtgtcagtatttcagggttctacattttatctgtaaaatgtgacttttttttttttttatcacaacagaagtaaaatgttgctttgtacctggtgtcttttattaagaatttactccccccatttctcacagagaataacagtcgggagtcattgtcacaatataatagaaatgttagcaaccagattcatgtaaggactaagtggtcctcatgaattgcattaagactctgtactgctcatattacactccatcctctctgtagtttgctgggtagtggagggggtaagctaaatcatagtttctgacaataactgggaaggttttttcttaaaataacaatggaattggtataattgggattgaaaactaaaacttggaactaagatagagaagatggagtgtatgtagaagggctgttaaaaatgtaaaacttggttgcattatttgtggaggctcaaacttgtgaaggttaataccataatttttccatttgttctgcattttgattctgaaaagaaagctggctttgcccatttcttattaaaaaaacttgttgtaaatccagttgtctaatgggatctatatgaagttagccatgtctgtatgcccttctcccacaaaatactgtataactagtgtgcttgtagtagttaactccaccatctttgtaagctaatgaaattgtgagtcacccatttatatcttaatttttaatcatgtcagttcttgaatgggtatctccttagcctgctgatttctttttctttctaaagaaagtgggtggagaaattaatttagacgtttgtttgcaataaaaagaattcatttta

SEQ ID NO: 222084 - DNA, 2478 bp, Artificial Sequence
  derived and/or modified sequence
atgagcagcagccccgtgaacgtgaagaagctgaaggtgagcgagctgaaggaggagctgaagaagagaagactgagcgacaagggcctgaaggccgagctgatggagagactgcaggccgccctggacgacgaggaggccggcggcagacccgccatggagcccggcaacggcagcctggacctgggcggcgacagcgccggcagaagcggcgccggcctggagcaggaggccgccgccggcggcgacgaggaggaggaggaggaggaggaggaggaggagggcatcagcgccctggacggcgaccagatggagctgggcgaggagaacggcgccgccggcgccgccgacagcggccccatggaggaggaggaggccgccagcgaggacgagaacggcgacgaccagggcttccaggagggcgaggacgagctgggcgacgaggaggagggcgccggcgacgagaacggccacggcgagcagcagccccagccccccgccacccagcagcagcagccccagcagcagagaggcgccgccaaggaggccgccggcaagagcagcggccccaccagcctgttcgccgtgaccgtggccccccccggcgccagacagggccagcagcaggccggcggcaagaagaaggccgagggcggcggcggcggcggcagacccggcgcccccgccgccggcgacggcaagaccgagcagaagggcggcgacaagaagagaggcgtgaagagacccagagaggaccacggcagaggctacttcgagtacatcgaggagaacaagtacagcagagccaagagcccccagccccccgtggaggaggaggacgagcacttcgacgacaccgtggtgtgcctggacacctacaactgcgacctgcacttcaagatcagcagagacagactgagcgccagcagcctgaccatggagagcttcgccttcctgtgggccggcggcagagccagctacggcgtgagcaagggcaaggtgtgcttcgagatgaaggtgaccgagaagatccccgtgagacacctgtacaccaaggacatcgacatccacgaggtgagaatcggctggagcctgaccaccagcggcatgctgctgggcgaggaggagttcagctacggctacagcctgaagggcatcaagacctgcaactgcgagaccgaggactacggcgagaagttcgacgagaacgacgtgatcacctgcttcgccaacttcgagagcgacgaggtggagctgagctacgccaagaacggccaggacctgggcgtggccttcaagatcagcaaggaggtgctggccggcagacccctgttcccccacgtgctgtgccacaactgcgccgtggagttcaacttcggccagaaggagaagccctacttccccatccccgaggagtacaccttcatccagaacgtgcccctggaggacagagtgagaggccccaagggccccgaggagaagaaggactgcgaggtggtgatgatgatcggcctgcccggcgccggcaagaccacctgggtgaccaagcacgccgccgagaaccccggcaagtacaacatcctgggcaccaacaccatcatggacaagatgatggtggccggcttcaagaagcagatggccgacaccggcaagctgaacaccctgctgcagagagccccccagtgcctgggcaagttcatcgagatcgccgccagaaagaagagaaacttcatcctggaccagaccaacgtgagcgccgccgcccagagaagaaagatgtgcctgttcgccggcttccagagaaaggccgtggtggtgtgccccaaggacgaggactacaagcagagaacccagaagaaggccgaggtggagggcaaggacctgcccgagcacgccgtgctgaagatgaagggcaacttcaccctgcccgaggtggccgagtgcttcgacgagatcacctacgtggagctgcagaaggaggaggcccagaagctgctggagcagtacaaggaggagagcaagaaggccctgccccccgagaagaagcagaacaccggcagcaagaagagcaacaagaacaagagcggcaagaaccagttcaacagaggcggcggccacagaggcagaggcggcttcaacatgagaggcggcaacttcagaggcggcgcccccggcaacagaggcggctacaacagaagaggcaacatgccccagagaggcggcggcggcggcggcagcggcggcatcggctacccctaccccagagcccccgtgttccccggcagaggcagctacagcaacagaggcaactacaacagaggcggcatgcccaacagaggcaactacaaccagaacttcagaggcagaggcaacaacagaggctacaagaaccagagccagggctacaaccagtggcagcagggccagttctggggccagaagccctggagccagcactaccaccagggctactactag

SEQ ID NO: 222085 - protein, 471 aa, Artificial Sequence
  derived and/or modified sequence
MADERKDEAKAPHWTSAPLTEASAHSHPPEIKDQGGAGEGLVRSANGFPYREDEEGAFGEHGSQGTYSNTKENGINGELTSADRETAEEVSARIVQVVTAEAVAVLKGEQEKEAQHKDQTAALPLAAEETANLPPSPPPSPASEQTVTVEEAAGGESALAPSVFKQAKDKVSDGVTKSPEKRSSLPRPSSILPPRRGVSGDRDENSFSLNSSISSSARRTTRSEPIRRAGKSGTSTPTTPGSTAITPGTPPSYSSRTPGTPGTPSYPRTPHTPGTPKSAILVPSEKKVAIIRTPPKSPATPKQLRLINQPLPDLKNVKSKIGSTDNIKYQPKGGQVQIVTKKIDLSHVTSKCGSLKNIRHRPGGGRVKIESVKLDFKEKAQAKVGSLDNAHHVPGGGNVKIDSQKLNFREHAKARVDHGAEIITQSPGRSSVASPRRLSNVSSSGSINLLESPQLATLAEDVTAALAKQGL

SEQ ID NO: 222086 - DNA, 1416 bp, Artificial Sequence
  derived and/or modified sequence
atggctgacgagcgcaaggacgaggcaaaggcacctcactggacctccgctcccctgaccgaggcctcggcccacagccaccctccagaaataaaggatcagggtggagccggagaagggcttgtccgctcagcaaacggctttccctatcgggaagatgaggagggggctttcggcgaacatggcagccaggggacttactctaacacaaaggagaatggcataaacggcgagctgacttcggcagatcgcgaaacagccgaagaggtgtcagctaggatagtacaggtcgtgaccgcagaggccgtggccgtactaaaaggagaacaggagaaggaggctcagcacaaggatcagacggctgccctgccattggccgccgaggaaacggctaacttgcccccaagccctccaccaagccctgcaagtgagcaaactgtgacagtcgaggaggccgctgggggcgaatcagcgctggcaccctctgtgtttaagcaggctaaagacaaggttagcgacggggtgactaagagccccgagaaacggagctcccttccacgcccctcctcaattctgcccccaagacggggagtgtctggggaccgagacgaaaactccttctccctgaatagcagcattagttcgtctgcgcggcggaccactagaagtgaaccaatccggagggcagggaagtcgggcacctctacgcccactactcccggctctaccgccatcactcctggcactccccccagttacagctctcgcacgcctgggacaccaggaacaccatcttatccacggactccacatacccccgggactccaaagtcagccatcttagttccctccgagaagaaggtcgcaatcatccggacgccccccaagagcccagcaacgcccaaacaacttcggcttattaaccagcctttaccagatttgaagaacgtgaaatctaaaattggatccacagataacattaagtaccaacccaagggcggtcaggtccagatcgtcacaaagaaaatcgacctgagccatgttacaagcaagtgtgggtccctcaaaaatatcagacaccgaccagggggcgggcgtgttaaaattgaatcggtgaaactggactttaaggagaaggctcaggctaaagtcggcagcctagacaacgctcaccacgtccccgggggcggcaatgtgaagattgattctcagaagctgaattttcgagaacacgctaaggcccgcgtagatcacggcgcggaaattatcacccagtcacccgggcgcagctccgtggcctcccccagaagactatccaacgtctccagctctggatccatcaatctgctggaatctcctcaactcgctacattggccgaggatgttacagcggctcttgctaaacaggggctttag

SEQ ID NO: 222087 - DNA, 321 bp, Artificial Sequence
  derived and/or modified sequence
atggctgacgaacgtaaagacgaagccaaggctcctcattggacgagcgcccctttgaccgaggccagtgcgcattcccacccaccggagattaaagaccaggggggcgctggcgaaggactcgtgcggagtgccaatggtttcccgtaccgcgaggacgaggagggggcatttggcgagcatggctctcaaggcacatacagtaacaccaaggagaacggtattaatggcgagctgacttccgctgaccgggagaccgccgaggaagtgtccgcgaggatcgtgcaagtggtgaccgcagaagctgttgccgtgctgtag

SEQ ID NO: 222088 - DNA, 1416 bp, Artificial Sequence
  derived and/or modified sequence
atggctgacgagaggaaagatgaggcgaaggcgcctcactggacgagcgcccccctcacagaggctagcgcgcattcgcaccccccagagatcaaggaccaaggcggggctggcgaggggctcgtaaggagtgccaatggtttcccataccgtgaggacgaagagggggctttcggagagcatgggagtcagggcacctacagcaacacaaaggagaatggcattaacggagaactgaccagcgctgaccgtgagactgcagaggaggtgagtgcccggattgtgcaagtggtgacagcggaagctgtggcggtgttaaagggcgaacaggaaaaggaagcgcaacataaggaccaaaccgcagcacttccccttgccgcagaggagaccgctaacttgccaccaagtccacctccctcacctgccagcgaacagacagtcaccgtcgaggaggccgctggcggagaaagcgccctggccccgtccgtgttcaagcaagccaaggacaaagtttcggatggggtgacaaagagcccagagaagcgtagcagcctccctcgccccagttcaattctcccgcctagaaggggcgtgagcggagatcgggatgaaaactccttctcactcaactccagcatctcatcgtcagcccggagaacaacacgatctgaacccatcaggcgagcaggtaagagtggcaccagtacccctacaacacctgggtctactgccatcactcctggcacccctccctcctactcatctcggacacctgggacccccggcaccccaagttacccacgtacccctcacacacctggaacacctaagagcgccattcttgtccccagcgagaaaaaggtagccattataaggacgcccccaaaaagccctgccactcctaaacagctgagacttatcaatcagccattgcccgaccttaaaaatgtaaaatcaaaaataggcagtaccgacaatatcaaataccagcctaaaggaggccaggttcaaatcgtgacaaaaaagatagatctttctcatgtgaccagcaagtgcggctctttaaagaacattcggcaccgacccggcggcggccgcgtgaagattgaatctgttaagctcgacttcaaagaaaaagctcaggccaaagtcggaagtctcgataatgctcatcacgtgccaggcggagggaacgtgaagatagatagccagaaactgaattttcgggaacacgccaaggcccgggtcgaccacggagcagagattatcactcagtctccaggcagaagctctgttgcctccccgaggaggctttctaatgtttcatcatctgggagtatcaatctgctggagagccctcagttggccacgctcgccgaggacgtcaccgccgcgctagctaagcaagggttgtag

SEQ ID NO: 222089 - DNA, 1416 bp, Artificial Sequence
  derived and/or modified sequence
atggctgatgagaggaaggatgaggccaaggccccccactggaccagcgcccccctgacagaggccagcgcccacagccaccccccagagatcaaggaccagggcggggccggggagggcctggtgcgcagcgccaacggcttcccctaccgggaggatgaggagggcgccttcggggagcacggcagccagggcacctacagcaacaccaaggaaaatggcatcaacggggagctgaccagcgctgaccgggagacagctgaggaggtgtctgcccgcatcgtgcaggtggtgacagctgaggccgtggccgtgctgaagggggagcaggagaaggaggcccagcacaaggaccagacagctgccctgcccctggccgctgaggagacagccaacctgccccccagccccccacccagccctgccagcgagcagacagtgacagtggaggaggccgccggcggggagagcgccctggcccccagcgtcttcaagcaggccaaggacaaggtgtctgatggagtgaccaagagccctgagaagaggagcagcctgccccggcccagcagcatcctgcccccaagaagaggagtgtctggggacagagatgagaacagcttcagcctgaacagcagcatcagcagcagcgcccggaggaccaccaggtctgagcccatcagaagagctgggaagagcggcaccagcacccccaccaccccaggcagcacagccatcaccccaggcaccccacccagctacagcagcaggaccccaggcaccccaggcacccccagctaccccaggaccccccacaccccaggcacccccaagagcgccatcctggtgcccagcgagaagaaggtggccatcatccgcaccccacccaagagccctgccacccccaagcagctgcggctcatcaaccagcccctgcctgacctgaagaatgtgaagagcaagattggcagcacagacaacatcaagtaccagcccaagggcggccaggtgcagatcgtgaccaagaagattgacctgagccacgtgaccagcaaatgtggcagcctgaagaacatccgccacaggcctgggggcggccgggtgaagattgaatctgtgaagctggacttcaaggagaaggcccaggccaaggtgggcagcctggacaatgcccaccacgtgcctgggggcggcaatgtgaagattgacagccagaagctgaacttccgggagcacgccaaggcccgggtggaccacggggctgagatcatcacccagagccctggccgcagctctgtggccagcccccggcggctgagcaatgtgagcagcagcggcagcatcaacctgctggagagcccccagctggccaccctggccgaggatgtgacagctgccctggccaagcagggcctgtag

SEQ ID NO: 222090 - DNA, 321 bp, Artificial Sequence
  derived and/or modified sequence
atggctgatgagaggaaggatgaggccaaggccccccactggaccagcgcccccctgacagaggccagcgcccacagccaccccccagagatcaaggaccagggcggggccggggagggcctggtgcgcagcgccaacggcttcccctaccgggaggatgaggagggcgccttcggggagcacggcagccagggcacctacagcaacaccaaggaaaatggcatcaacggggagctgaccagcgctgaccgggagacagctgaggaggtgtctgcccgcatcgtgcaggtggtgacagctgaggccgtggccgtgctgtag

SEQ ID NO: 222091 - DNA, 2038 bp, Artificial Sequence
  derived and/or modified sequence
gctaaatcgtaagtgagggctgcatcctattgtcagtgaatgatggcggagctgagtggcttgtcatcattctcgaaaattctgagactagtgagctctctccctctctcccactcgccttattttcctgttcgccactgcggggacttctaatttgcagcttccctttccccggcacacacagacacgagctggtggcttgcagactgcgtctgtctggagctagagagccagagagccagcctgtggggataatgctcccggagaaggattctgcagcagttctcaaaggctagacttgagtggtattgctgcatatgcgctgattcttcagcttgtctctaaccgaggaagcattgattgggagctactcattcagaaaattaaaagaaagaagccagaaaatattatcaaccctttgagaacacgacacaacgaactttatattttaccacttccttgaatagttgcaggagaaataacaaggcattgaagaatggcagatgaacggaaagatgaagcaaaggcacctcactggacctcagcaccgctaacagaggcatctgcacactcacatccacctgagattaaggatcaaggcggagcaggggaaggacttgtccgaagcgccaatggattcccatacagggaggatgaagagggtgcctttggagagcatgggtcacagggcacctattcaaataccaaagagaatgggatcaacggagagctgacctcagctgacagagaaacagcagaggaggtgtctgcaaggatagttcaagtagtcactgctgaggctgtagcagtcctgaaaggtgaacaagagaaagaagctcaacataaagaccagactgcagctctgcctttagcagctgaagaaacagctaatctgcctccttctccacccccatcacctgcctcagaacagactgtcacagtggaggaagcagcaggtggggaatcagctctggctcccagtgtatttaaacaggcaaaggacaaagtctctgacggagtaaccaagagcccagaaaagcgctcttctctcccaagaccttcctccattctccctcctcggcgaggtgtgtcaggagacagagatgagaattccttctctctcaacagttctatctcttcttcagcacggcggaccaccaggtcagagccaattcgcagagcagggaagagtggtacctcaacacccactacccctgggtctactgccatcactcctggcaccccaccaagttattcttcacgcacaccaggcactcctggaacccctagctatcccaggacccctcacacaccaggaacccccaagtctgccatcttggtgccgagtgagaagaaggtcgccatcatacgtactcctccaaaatctcctgcgactcccaagcagcttcggcttattaaccaaccactgccagacctgaagaatgtcaaatccaaaatcggatcaacagacaacatcaaataccagcctaaaggggggcaggtacaaattgttaccaagaaaatagacctaagccatgtgacatccaaatgtggctctctgaagaacatccgccacaggccaggtggcggacgtgtgaaaattgagagtgtaaaactagatttcaaagaaaaggcccaagctaaagttggttctcttgataatgctcatcatgtacctggaggtggtaatgtcaagattgacagccaaaagttgaacttcagagagcatgctaaagcccgtgtggaccatggggctgagatcattacacagtccccaggcagatccagcgtggcatcaccccgacgactcagcaatgtctcctcgtctggaagcatcaacctgctcgaatctcctcagcttgccactttggctgaggatgtcactgctgcactcgctaagcagggcttgtgaatatttctcatttagcattgaaataataatatttaggcatgagctcttggcaggagtgggctctgagcagttgttatattcattctttataaaccataaaataaataatctcatccccaaactgta

SEQ ID NO: 222092 - DNA, 614 bp, Artificial Sequence
  derived and/or modified sequence
ggagaccagatgatgacattcataggctgatagactcgactcctggggacacacttggatggaggcaattaaaatgcctgtcaggcatttggtaccagaagcccctatggcaaaccgctaaatcattcttcagcttgtctctaaccgaggaagcattgattgggagctactcattcagaaaattaaaagaaagaagccagaaaatattatcaaccctttgagaacacgacacaacgaactttatattttaccacttccttgaatagttgcaggagaaataacaaggcattgaagaatggcagatgaacggaaagatgaagcaaaggcacctcactggacctcagcaccgctaacagaggcatctgcacactcacatccacctgagattaaggatcaaggcggagcaggggaaggacttgtccgaagcgccaatggattcccatacagggaggatgaagagggtgcctttggagagcatgggtcacagggcacctattcaaataccaaagagaatgggatcaacggagagctgacctcagctgacagagaaacagcagaggaggtgtctgcaaggatagttcaagtagtcactgctgaggctgtagcagtcctga

SEQ ID NO: 222093 - DNA, 5303 bp, Artificial Sequence
  derived and/or modified sequence
tcagcttgtctctaaccgaggaagcattgattgggagctactcattcagaaaattaaaagaaagaagccagaaaatattatcaaccctttgagaacacgacacaacgaactttatattttaccacttccttgaatagttgcaggagaaataacaaggcattgaagaatggcagatgaacggaaagatgaagcaaaggcacctcactggacctcagcaccgctaacagaggcatctgcacactcacatccacctgagattaaggatcaaggcggagcaggggaaggacttgtccgaagcgccaatggattcccatacagggaggatgaagagggtgcctttggagagcatgggtcacagggcacctattcaaataccaaagagaatgggatcaacggagagctgacctcagctgacagagaaacagcagaggaggtgtctgcaaggatagttcaagtagtcactgctgaggctgtagcagtcctgaaaggtgaacaagagaaagaagctcaacataaagaccagactgcagctctgcctttagcagctgaagaaacagctaatctgcctccttctccacccccatcacctgcctcagaacagactgtcacagtggaggaagcagcaggtggggaatcagctctggctcccagtgtatttaaacaggcaaaggacaaagtctctgacggagtaaccaagagcccagaaaagcgctcttctctcccaagaccttcctccattctccctcctcggcgaggtgtgtcaggagacagagatgagaattccttctctctcaacagttctatctcttcttcagcacggcggaccaccaggtcagagccaattcgcagagcagggaagagtggtacctcaacacccactacccctgggtctactgccatcactcctggcaccccaccaagttattcttcacgcacaccaggcactcctggaacccctagctatcccaggacccctcacacaccaggaacccccaagtctgccatcttggtgccgagtgagaagaaggtcgccatcatacgtactcctccaaaatctcctgcgactcccaagcagcttcggcttattaaccaaccactgccagacctgaagaatgtcaaatccaaaatcggatcaacagacaacatcaaataccagcctaaaggggggcaggtacaaattgttaccaagaaaatagacctaagccatgtgacatccaaatgtggctctctgaagaacatccgccacaggccaggtggcggacgtgtgaaaattgagagtgtaaaactagatttcaaagaaaaggcccaagctaaagttggttctcttgataatgctcatcatgtacctggaggtggtaatgtcaagattgacagccaaaagttgaacttcagagagcatgctaaagcccgtgtggaccatggggctgagatcattacacagtccccaggcagatccagcgtggcatcaccccgacgactcagcaatgtctcctcgtctggaagcatcaacctgctcgaatctcctcagcttgccactttggctgaggatgtcactgctgcactcgctaagcagggcttgtgaatatttctcatttagcattgaaataataatatttaggcatgagctcttggcaggagtgggctctgagcagttgttatattcattctttataaaccataaaataaataatctcatccccaaactgtagtaattgttacaattttctatttaaaaaatgaatagtacatgcagaaattgacctgatttccatttgcaacaggaagacactggctttacatgggttcaattggacaattatttttgctctgctctgttttgcatggagtattattattttaaaaattgcatttttacctttcatgtgcctgaaggctatccactacattctgaaggccttgttaaaatccaagctgctcatttcactattctgtttctgagtgagaagataaaaactgcccattgtaacttatttcaggttaaattaaaccaaggagtctgattgcaggaagggaagagcatgtaagaaataagtttttttaaagtgttattttgtataaatgggaagaaagattcaattaagttattaacatttgggacctggataattatatcagagtatgtcagtccaataaattatttaactaattaaaaaatagttgcaaagcatttgagctgtggttgaggaagtggtgtaaaagtgcatccattaggaatgatgcactttcattaggatggactcgtgtctgattagaatgtcagttgatcagctagatttgtgtccacactaccagtttcacaccccctttccatctgtttgatacagtattatagatataaatatatatatatttctctgtggccatttgtgatacttcctcatatacttgaatattatacttctttattcacagtatctgtgtctcctgcaccctttggtgttgcaattttagatatgtgaaagtagatgttagcagggttctctccctatttaaaaaaaatacattaaaaaagacaaaaaattttagcatgaagttgctttctgtaacaactcaaagccgtaaccctgttttagtgccagatacaagtctctcccgtgatgctagacaaaaaattatttttctttgctttcaccaacatggagtttgtgggggtgggtccagttatacatgaaagggtttacagattgttggtttaagattatggatttatctcatttttaatcacaggatagtttggggtttattcctattattattcatgaaaccgacttaagattttttctttatttttctttttttttccatttgctaaagttgaaagttgaaactaactataatagtttgaaacatgttttctcatttttccaaatagtatctgtttattaaattctctaatagaagatgtttgtctttcttacccaaagtaaagatcccctgatcagaaagaaaaaatacaatactttgggaagctatagctataaaacacttgagacacagatatctaaatcagtttttttccaagactccaacattgcactctgtaaagtaacacactgtgatctagtattatttatcagtagataatactgttctgactgtatatacagtctagaactcacaaatcaattagttcctctcacaaatcattcatcttagacttacaaataaggaatgaaatagtcaatggcctgattaaggcaaagagctaccaggctagatggacactttttaaaaattttatctgttctttttcttgctcagggctggtaggttggatctgaaccattaaaatcaaatggtccactaggcgtatgatctctttgagccaaatcagttcctgaatataaaggaggaaatgatgaggatgtactgaggcaacggggaagtatagaaacatccaagacaaaagccaagggatgcaaaggcagagacacaggtgctttttggtgacccagtggatatggcaaccagtgtaactgccatacaagaaaccctaggagcaaacccacaccactcattctcagctaagagattttacacaggcaaacgtgtcttaaaccatctataaatcagttattttatatgacagtcaaaaccttagaaaccttaggatcattatatctattttctgcctattaattgctgtgaggtttgatttgaccaatctgggcaatttattcatcagcttcccttgaagtgcaccagaaaatagaagaaaggtgtgtggagacttagggtattttattacatgttttcatagtcttaaatagtgattaaatttctctagaaagaagttaacagctcattagaaaagttttaacctgtgaaataagtatttttctcaacattctttaaagtttttatataagttaacactaggtaaacattctgcatactagaagtcagtttattacaaatacatgtcaaaaataaagattatacaaggcaccaaactactagatttggcattaaaacaaatgtttatttctaatcacaacaaaattataatgaataaatgttcttgctttgtatggaaatacaattctttattaaagttaacagaaaggaactgatcgtttgtaccagtaaaagagagaaacacacaggttaaatatcttcttgtggggttaaggggtagaacctatcttgccttcactctcaagataacgactcaaattaagctttttgagcaccactcttgtggggacacacatacgctgatctaggaatgaaatcttcgtggtctcaattctagatctactatgccagtttctctctggctttagcctttgagaacctgtataagaatacgtaagtaatccagagctgtgaagagtttaaaggccaacttctccagtgaactcaacctctgggtcacttgcaaccagaaattggatacctcataatgatgcaggaaagacccgagttcatgatgagtttcaaaggccacgttcatttaggaaccaactctctctggatttacctgctgagttccagcagcgtgatgggctgacatcccacctacaagtatgacacctgtgtaacaccagctaggtacggctggagaaggctgaagagagaatgccattaaatggaagaatgtactgattgtagtgaccttctccacacacacacacacacacacacacacacacacctacagtaatacagcaagcgtggaataatcagccaatatataacattccatcagtattttattaaggaaataacctgaatgtggttgattttgacatagctgcaattacagttttcttctatttttcaagccacaataaggaaaataaactactcatggtctaaatactagagataaagtagattcatggcttggtaaggaaattttaagcattccttcaaagattgacgtgctaaaataagcattgatgttttgagtttttttacacctaggatttttagcttgggtgtgtaggtgaaggccaagactctctgcaggaaaaagcttattttcaaactcagaaaataaaatgtcaatcataaaaatctacttcaactttagcaaaaagaaaaaaaaatcaacaaaaagtatactctgtatgctgggattccgaggttccaacacactgttacaaatctgtggggggtttctttcttctgataattctagagcctgttaccatagaaaggcatttcttcaatggctggttgtagttagttcatgtttttcaatcaaatttgcaaatgtatttgttgctgtatagtgattgttttgcaaaataaaattgcttgtcacctaactgcta

SEQ ID NO: 222094 - DNA, 1416 bp, Artificial Sequence
  derived and/or modified sequence
atggccgacgagcggaaggacgaggccaaggccccccactggaccagcgcgccattgaccgaggcatcagcccactcacatcctcctgaaattaaagaccagggcggggccggcgagggtttggtccggtcggcgaacggattcccttatcgggaggacgaagaaggtgcttttggagaacacggaagtcaggggacatatagcaacaccaaggagaatggaataaacggtgagttgacatcagccgatcgtgaaacggcagaggaggtgtccgcccgcattgtccaagtggtgacggccgaagccgtcgccgtgttaaaaggcgaacaagaaaaggaagcacaacataaagaccaaacagccgcactgccactggcagcggaagagacggcaaacctccccccatctcccccaccctctccagccagtgaacagactgtgaccgtcgaagaggcagctgggggggaaagcgccctggccccttcggtgttcaagcaagcaaaagacaaggtatccgatggagtaacaaagtcccctgagaagcggagctccctgccaaggccgtcttccattctccccccacgacgcggtgtgtccggggacagggatgaaaactcattcagcctaaatagctctatatcttcaagcgctcggagaaccacccggtccgagcccatcagaagagccggcaagtctggcacaagtacaccaactacccctgggagtacggccattacaccagggactcctcccagctacagctccaggaccccgggtacgccaggtacaccctcttatccacgcacgccacacacccccggaacgccgaaatccgctattttagtaccctctgaaaagaaagtggccattatcaggacaccacccaagtcgcctgccacacctaagcagctacggctgataaatcagccattacccgacttgaaaaacgtcaagagcaaaattgggagtaccgacaacataaagtaccaacctaaagggggacaagtacagatagtgacaaaaaaaatcgacctgagccacgtgacatcaaagtgcggttccctaaagaacatccggcatcgtccaggaggaggcagggtgaaaattgaatcagtgaaactcgattttaaggagaaggcgcaggctaaagtaggatccctggacaatgcgcatcacgtgcccggaggaggaaacgtgaagatagattctcagaaattgaacttccgcgaacacgctaaggcgagagtggatcacggggcggagatcattacacagagtccagggaggtcttcagtcgcgtcaccaagacgcctttctaacgtgagctcatccggtagtattaacctgctcgagtctcctcagctagcgactctagctgaggacgtgacagcagcactggccaagcagggactttag

SEQ ID NO: 222095 - DNA, 321 bp, Artificial Sequence
  derived and/or modified sequence
atggccgacgagcggaaggacgaggccaaggccccccactggacctccgctcccctgacagaggcctcagcacactcccacccccctgaaatcaaggaccaaggtggagcgggagaggggctggttagatccgccaatgggttcccctacagggaggatgaagaaggcgcttttggtgaacacggctctcaaggtacctatagcaacaccaaggagaatggcatcaatggcgagctgacatccgctgaccgcgagactgccgaggaagtgtcagccagaatagtccaagtcgtcacggctgaggccgttgcagtgctgtag

SEQ ID NO: 222096 - DNA, 1416 bp, Artificial Sequence
  derived and/or modified sequence
atggccgacgagcggaaggacgaggccaaggccccccactggacctcagcgcccctgactgaagccagcgcgcactcccacccacccgagataaaggaccagggaggcgcaggtgagggcctcgtccgctccgccaatggttttccctatagagaagacgaagaaggcgcgtttggagagcatggcagccagggcacttactctaataccaaagaaaacggcatcaatggtgagctgacctccgccgatagggaaactgcggaagaagtctctgcccgaatagtgcaggtggttaccgccgaggctgtcgcagtcctgaagggagaacaagaaaaggaagcccaacacaaggatcagactgctgccctgccactggcagctgaagaaaccgctaatctgcccccttccccaccaccgtctcccgcttctgagcaaacagtaaccgtggaggaagccgcaggtggggagtccgcattggcccccagcgttttcaagcaggcgaaagacaaagtatctgatggggtgaccaaaagtccagagaagcgtagtagcctgccgaggccaagcagtatattacctcctagacgcggggtgtccggagatcgagacgaaaacagcttttctttaaactccagtattagcagctccgcaaggcgcaccaccagatcagaaccgattagacgggctggtaaatctggcacgagcactccaacgacacccggatctaccgcgataacccctggcactccaccctcctactcatcgcggacccctggaactcctggaactcccagttacccacgtacgccccataccccgggtactcctaaaagcgctattttggtgcccagcgagaaaaaggtggccattattaggaccccacctaaatctcctgccacacctaagcagcttcggctcattaatcagccgttgcccgatctgaagaacgtgaagtctaagatcggcagtacggacaacattaagtaccagcctaaaggcgggcaggttcagattgtcactaagaagatagacttgtcacacgtgacttcgaaatgtggctccttgaaaaacatcagacaccgacccggcgggggccgggtgaaaattgaatctgttaaacttgattttaaggaaaaggctcaggccaaggtggggtccctcgataatgcccaccatgtgccaggcggcggaaatgtaaagattgatagccagaaactcaatttccgggagcacgcaaaagcgcgcgtggaccatggggctgaaatcatcacgcagtcgccaggtaggtccagtgtggcctcccctcgccgactctcaaacgtgtcatcttctggttccatcaaccttctagagtctccgcaactcgccactctggcggaggacgttaccgcagccttggccaagcagggcttgtag

SEQ ID NO: 222097 - DNA, 1416 bp, Artificial Sequence
  derived and/or modified sequence
atggctgatgagaggaaagacgaggccaaagcccctcattggacctccgcgcctctgactgaggcatctgctcattctcacccgccagaaattaaggaccaaggcggtgccggagagggtttggtccggagcgccaatggctttccttatcgggaagatgaagagggcgctttcggagaacacggaagccaaggcacatacagtaataccaaagagaacgggatcaacggggaactgacctccgccgatagggagactgctgaggaagttagtgctcggatcgtccaggtggttactgccgaggccgtggctgttttgaaaggcgaacaggagaaagaggcccaacacaaggatcaaaccgcagccctgcccctggcagccgaggaaaccgctaacctccctcccagccctcctccaagtcccgcttcagagcagaccgtgaccgtggaggaagcggctggcggagagtctgccctggccccttctgtatttaagcaggctaaggacaaggtctccgatggagtgactaagagccccgagaaacgctctagcctgccccgaccgagcagcatcctacctccccgtcggggtgtgtctggcgaccgtgacgaaaactcatttagcctgaacagcagcatatcctcatccgccagacgaacaactcgcagcgaacctattcgtagggccggtaagtctggaacttctacccctacaacacctggatcaaccgccatcactcctggcacgcctccctcatactcttcaagaacacccggtacaccgggtacaccctcttacccaaggacgccacacacgccgggaactcccaaaagtgccattctggtgccgagtgagaagaaagttgccattatcagaactccacccaagtctcctgcaacccctaagcaactcaggttaatcaatcagcccttgcctgacctgaagaacgtgaagagcaagataggatcaactgacaatatcaagtaccagccaaagggaggtcaggtacagattgttaccaaaaaaattgacctgtctcacgtgacaagcaaatgtggaagtttgaaaaatattaggcaccggccagggggaggtcgcgtaaagatagagtccgtgaagctggacttcaaagagaaggcgcaggccaaggtgggcagtctcgacaatgcccaccacgtccctggagggggaaacgtgaaaattgattctcagaagctcaatttccgggaacacgcaaaggcccgtgttgatcatggtgcggaaattatcacacagtcccctggcagatcctccgtggccagcccacggcgtctgagtaatgtcagctcttctggatctattaatctgctcgagtctccgcagctggccactctagccgaggacgtgacagccgcactcgccaaacagggtctgtag

SEQ ID NO: 222098 - DNA, 321 bp, Artificial Sequence
  derived and/or modified sequence
atggcggacgaaagaaaagacgaagctaaggctcctcactggacctcagcaccccttaccgaggcctctgcacattcacaccctccagagatcaaagaccagggtggtgctggagaaggtctagtgcgctcagccaatggatttccgtatagggaggatgaagagggcgcatttggtgagcacggctcccagggcacctatagcaacaccaaggagaacggaatcaacggcgaactgaccagcgccgatcgggaaaccgccgaagaggtgtccgcccgtatcgtccaggtggtgactgctgaggccgtagcagtcctgtag

SEQ ID NO: 222099 - DNA, 1416 bp, Artificial Sequence
  derived and/or modified sequence
atggccgacgagcggaaagacgaggccaaagctccacactggacaagcgctcctctaacggaggcctctgcccactctcacccaccggagataaaggaccaaggcggtgccggtgaaggcctggtccgctcagccaacggtttcccatatcgagaggacgaggagggggcattcggagaacacgggagtcagggcacctattctaataccaaagagaatggcattaatggggaactcacttccgcggatcgggaaactgcagaggaagtcagtgcccgaatcgtgcaggtagtaaccgcggaagctgtggcggtgttaaaaggtgaacaagaaaaggaagcccagcacaaggatcagactgccgctctacctttggctgctgaggaaacggcaaacctcccccctagtcccccaccctcgcctgctagcgaacagactgttaccgtggaggaagcagcgggtggggagagcgccttggccccttccgttttcaagcaagctaaggacaaagtcagcgatggtgtgactaagagtccagagaagagatctagcctaccaagaccttctagcatcttacccccacgcagaggcgtgtccggcgatcgggacgaaaattcattttccctgaacagtagtatctcttcttccgctagacgaactacgagaagtgagccaattaggagggctggtaagtcaggtacatccacgcccactacccccggttcaaccgccataacccctggaacaccgccaagttactcaagtagaactcctggcacccccggaacaccatcctacccaagaactccccatacacccggaaccccaaagtcagcgatcctcgttccgtccgaaaagaaagtcgccatcatccggactcccccaaaatcaccagccactcctaagcagctgcgcctgataaatcagcctctgccggacctaaagaatgtgaagagcaagattggcagcactgacaatatcaagtaccagccaaaaggaggtcaagtgcagattgtcacaaaaaaaatcgatctcagccatgtcaccagtaaatgtggcagccttaaaaacattcgacacaggcccggtggaggtcgggtcaaaatcgagtctgtgaagctcgactttaaggaaaaggcccaagctaaagtcggctccctggacaacgcccaccacgtcccagggggaggcaacgtcaagattgactcccagaagctgaattttagagagcatgcaaaggccagagtagaccacggcgctgagatcattacgcagtctccagggaggagctctgtggcttctcctcgaagactgagcaacgttagttcatccggctctattaacctcctcgagtccccccagctggcaaccctcgccgaagacgtgactgccgctctagcaaaacagggcttatag

SEQ ID NO: 222100 - DNA, 1416 bp, Artificial Sequence
  derived and/or modified sequence
atggccgacgagagaaaggacgaggccaaggccccccactggaccagcgcccccctgaccgaggccagcgcccacagccacccccccgagatcaaggaccagggcggcgccggcgagggcctggtgagaagcgccaacggcttcccctacagagaggacgaggagggcgccttcggcgagcacggcagccagggcacctacagcaacaccaaggagaacggcatcaacggcgagctgaccagcgccgacagagagaccgccgaggaggtgagcgccagaatcgtgcaggtggtgaccgccgaggccgtggccgtgctgaagggcgagcaggagaaggaggcccagcacaaggaccagaccgccgccctgcccctggccgccgaggagaccgccaacctgccccccagccccccccccagccccgccagcgagcagaccgtgaccgtggaggaggccgccggcggcgagagcgccctggcccccagcgtgttcaagcaggccaaggacaaggtgagcgacggcgtgaccaagagccccgagaagagaagcagcctgcccagacccagcagcatcctgccccccagaagaggcgtgagcggcgacagagacgagaacagcttcagcctgaacagcagcatcagcagcagcgccagaagaaccaccagaagcgagcccatcagaagagccggcaagagcggcaccagcacccccaccacccccggcagcaccgccatcacccccggcaccccccccagctacagcagcagaacccccggcacccccggcacccccagctaccccagaaccccccacacccccggcacccccaagagcgccatcctggtgcccagcgagaagaaggtggccatcatcagaaccccccccaagagccccgccacccccaagcagctgagactgatcaaccagcccctgcccgacctgaagaacgtgaagagcaagatcggcagcaccgacaacatcaagtaccagcccaagggcggccaggtgcagatcgtgaccaagaagatcgacctgagccacgtgaccagcaagtgcggcagcctgaagaacatcagacacagacccggcggcggcagagtgaagatcgagagcgtgaagctggacttcaaggagaaggcccaggccaaggtgggcagcctggacaacgcccaccacgtgcccggcggcggcaacgtgaagatcgacagccagaagctgaacttcagagagcacgccaaggccagagtggaccacggcgccgagatcatcacccagagccccggcagaagcagcgtggccagccccagaagactgagcaacgtgagcagcagcggcagcatcaacctgctggagagcccccagctggccaccctggccgaggacgtgaccgccgccctggccaagcagggcctgtag

SEQ ID NO: 222101 - DNA, 321 bp, Artificial Sequence
  derived and/or modified sequence
atggccgacgagagaaaggacgaggccaaggccccccactggaccagcgcccccctgaccgaggccagcgcccacagccacccccccgagatcaaggaccagggcggcgccggcgagggcctggtgagaagcgccaacggcttcccctacagagaggacgaggagggcgccttcggcgagcacggcagccagggcacctacagcaacaccaaggagaacggcatcaacggcgagctgaccagcgccgacagagagaccgccgaggaggtgagcgccagaatcgtgcaggtggtgaccgccgaggccgtggccgtgctgtag

SEQ ID NO: 222102 - protein, 686 aa, Artificial Sequence
  derived and/or modified sequence
MVFTPEDRLGKQCLLLPLLLLAAWKVGSGQLHYSVPEEAKHGTFVGRIAQDLGLELAELVPRLFRMASKDREDLLEVNLQNGILFVNSRIDREELCGRSAECSIHLEVIVDRPLQVFHVDVEVRDINDNPPLFPVEEQRVLIYESRLPDSVFPLEGASDADVGSNSILTYKLSSSEYFGLDVKINSDDNKQIGLLLKKSLDREEAPAHNLFLTATDGGKPELTGTVQLLVTVLDVNDNAPTFEQSEYEVRIFENADNGTTVIRLNASDRDEGANGAISYSFNSLVAAMVIDHFSIDRNTGEIVIRGNLDFEQENLYKILIDATDKGHPPMAGHCTVLVRILDKNDNVPEIALTSLSLPVREDAQFGTVIALISVNDLDSGANGQVNCSLTPHVPFKLVSTFKNYYSLVLDSALDRESVSAYELVVTARDGGSPSLWATASLSVEVADMNDNAPAFAQPEYTVFVKENNPPGCHIFTVSARDADAQENALVSYSLVERRVGERALSSYISVHAESGKVYALQPLDHEELELLQFQPRQPNPDWRYSASLRAGMHSSVHLEEAGILRAGPGGPDQQWPTVSSATPEPEAGEVSPPVGAGVNSNSWTFKYGPGNPKQSGPGELPDKFIIPGSPAIISIRQEPTNSQIDKSDFITFGKKEETKKKKKKKKGNKTQEKKEKGNSTTDNSDQ

SEQ ID NO: 222103 - DNA, 2061 bp, Artificial Sequence
  derived and/or modified sequence
atggttttcacccccgaagataggttgggaaagcaatgtctgttgctaccacttctactgctggcagcttggaaagtggggagcggacagcttcactactcagtgcccgaggaggcaaaacatggcacattcgtcggcaggatcgcgcaggatttgggattggaactcgctgaactggtgccccgcttgttccggatggcttctaaagaccgcgaagatcttctggaggtgaatctacagaacggaattctcttcgtgaattctagaatcgatcgggaggagctctgcggtcgttcggccgagtgtagcatccaccttgaggtgatcgtggatagacctctccaggtctttcatgtcgatgtcgaagtgcgggacataaacgataatcccccgttattcccggtagaggaacagcgcgtactcatctacgagtcccgcctccccgatagcgtgtttcctctggaaggtgcatccgatgcagatgtgggatctaattctattctgacctataaattgagctcaagcgagtactttgggcttgacgtgaaaatcaactcggatgataacaaacagattggtctgttgctcaaaaagagcctagaccgggaagaggcccctgcccacaacctctttctgactgccaccgatgggggtaagccggaactgacagggacagtacagctattggtgaccgtgcttgatgtgaacgacaatgcaccaacatttgaacaatccgagtatgaggtgaggatttttgagaatgctgacaacggcactactgtgatcagactaaacgcttctgaccgggacgagggagcaaacggagccatctcttactcattcaattctctggttgcagctatggtcattgatcatttctctatcgacaggaatactggcgagatcgtgattaggggtaaccttgatttcgaacaggagaacctgtacaaaatccttatagacgcaacagacaaagggcatcctcctatggcaggacattgcactgtgctggtaagaatcctggacaagaatgataacgttccagagatagctctcacctcactctcactgccagtgcgcgaagatgctcagttcggcacagtgattgctctcatcagtgttaatgatctggatagcggtgctaacggccaggtgaactgctccttaacgccgcacgtgccattcaaactcgtgtccaccttcaagaattattacagcttggtccttgattctgcactggaccgggaatccgtgagtgcttatgaattggttgttacggcaagggacggtggaagtccctccctgtgggccactgcctcattatctgtggaggtggcagacatgaacgataacgctccagcattcgcccagcccgaatataccgtgttcgtgaaggagaacaatccacccggctgtcatatatttactgtgagtgctcgtgacgccgatgcccaagagaatgcgctggtgtcctatagtttagtggaaagacgcgtgggtgagagagctctgtcatcctatattagtgtgcatgctgaatccggtaaggtatacgcactccagccgctagatcacgaggagctggagctgctgcagttccagccccgtcagccaaaccctgactggcgctattcagcaagcctcagagctggaatgcactcaagcgtccatctggaagaggcgggtatacttagggcaggccctggcggtccagaccaacagtggcctacagtttcaagcgccaccccagaacccgaggctggcgaggtctcccctcctgtgggtgcaggcgtcaatagcaacagttggacattcaaatacggacccgggaatcctaagcaatctggtccaggagaattacctgacaagttcattatccctggcagtcccgccataatctctatcaggcaggagcccacaaatagccagattgataagtcagattttattacatttgggaaaaaggaggagactaagaaaaagaaaaagaaaaagaaaggcaacaaaacccaggaaaagaaggagaaagggaactcaaccacggataactccgaccagtag

SEQ ID NO: 222104 - DNA, 2061 bp, Artificial Sequence
  derived and/or modified sequence
atggtgttcaccccagaggaccggctgggcaagcagtgcctgctgctgcccctgctgctgctggccgcctggaaggtgggcagcggccagctgcactacagcgtgcctgaggaggccaagcacggcacctttgtgggccgcatcgcccaggacctgggcctggagctggccgagctggtgcccaggctcttcaggatggccagcaaggaccgggaggacctgctggaggtgaacctgcagaatggcatcctgtttgtgaacagcagaattgaccgggaggagctgtgtggccgctctgcagaatgttccatccacctggaggtgattgtggaccggcccctgcaggtgttccacgtggatgtggaggtgcgggacatcaatgacaaccccccactcttccctgtggaggagcagagggtgctgatctatgagagccggctgcctgacagcgtcttccccctggagggcgccagtgatgctgatgtgggcagcaacagcatcctgacctacaagctgagcagcagcgagtacttcggcctggatgtgaagatcaacagtgatgacaacaagcagatcggcctgctgctgaagaagagcctggaccgggaggaggccccagcccacaacctcttcctgacagccacagatggcggcaagccagagctgactggaacagtgcagctgctggtgacagtgctggatgtgaatgacaatgcccccacctttgagcagagtgaatatgaggtgcgcatctttgaaaatgctgacaatggcaccaccgtcatccggctgaatgccagtgacagagatgagggcgccaacggggccatctcctacagcttcaacagcctggtggccgccatggtgattgaccacttcagcattgacagaaatactggagagatcgtcatccggggcaacctggactttgagcaggagaacctgtacaagatcctgattgatgccacagacaagggccacccccccatggccggccactgcaccgtgctggtgcgcatcctggacaagaatgacaacgtgcctgagatcgccctgaccagcctgagcctgcctgtgagagaagatgcccagtttggaacagtgattgccctgatctctgtgaatgacctggacagcggggccaacggccaggtgaactgcagcctgaccccccacgtgcccttcaagctggtgtccaccttcaagaactactacagcctggtgctggacagcgccctggaccgggagagcgtgtctgcctatgagctggtggtgacagccagagatggcggcagccccagcctgtgggccacagccagcctgtctgtggaggtggccgacatgaatgacaatgccccagcctttgcccagcctgagtacacagtgtttgtgaaggagaacaaccccccaggctgccacatcttcaccgtgtctgccagagatgctgatgcccaggagaatgccctggtgtcctacagcctggtggagaggagagtgggggagcgggccctgagcagctacatctctgtgcacgccgagagcggcaaggtgtatgccctgcagcccctggaccacgaggagctggagctgctgcagttccagccccggcagcccaacccagactggagatacagcgccagcctgcgggccggcatgcacagctctgtgcacctggaggaggccggcatcctgcgggccggccctgggggccctgaccagcagtggcccaccgtgagcagcgccaccccagagcctgaggccggggaggtgagcccccctgtgggcgctggggtgaacagcaacagctggaccttcaagtatggccctggcaaccccaagcagagcggccctggagagctgcctgacaagttcatcatccctggcagccctgccatcatcagcatccggcaggagcccaccaacagccagattgacaagagtgacttcatcaccttcggcaagaaggaggagaccaagaagaagaagaagaagaagaagggcaacaagacccaggagaagaaggagaagggcaacagcaccacagacaacagcgaccagtag

SEQ ID NO: 222105 - DNA, 2061 bp, Artificial Sequence
  derived and/or modified sequence
atggtgttcacccccgaggaccggctgggcaagcagtgcctgctgctacctctcctgctgctggccgcctggaaggtgggcagcgggcagctacactacagcgtacctgaggaagctaagcacggtaccttcgtaggcaggatcgcacaggatctgggcttggaacttgccgagcttgtgccccggctgtttcgcatggcgagtaaggatcgtgaggatctgctcgaagtgaatcttcaaaacggcatcctgtttgtcaactcgcgaatcgatcgcgaggaactttgtggaagaagcgcggagtgtagcatccatcttgaagtgattgtggataggccactccaagtatttcatgtggacgtggaagtccgcgacataaatgataacccacctctgttccccgtggaggagcagagggtgttaatttatgaatcccggcttcctgactcagtcttccctctagaaggcgcctccgatgccgatgtgggatcaaatagtatcctgacctataagctgagctcttcggaatatttcgggctggatgttaagatcaatagtgatgataacaaacaaattggactcctgcttaagaagtcccttgacagagaagaggccccagcccataaccttttcttgaccgcaaccgatggcgggaagcctgagctgaccgggaccgtgcaattgctggtaacagtgttggacgttaacgacaacgccccaaccttcgagcagtccgagtatgaagtgcgcatcttcgagaacgccgataacgggactacagtgattagactgaacgctagcgatagggatgaaggcgcaaatggggccatatcctatagttttaactctctggttgccgcgatggtgatcgaccatttctcaattgacagaaatacaggggagatcgtgattcgcgggaatttggatttcgagcaggaaaacctgtataagattttaatcgacgcgacagacaagggacaccctcctatggccggtcactgcacagtactagtgagaatactagacaaaaacgacaacgtgcctgaaatcgctctcactagcctcagcctgcctgtgagggaagacgcgcaattcggaaccgttattgccctcatatctgtgaacgatctggattcaggagcgaacggccaggttaactgttctctcacaccacatgtgccattcaagcttgtttccacatttaaaaattattactccctggtcttggactccgcccttgatagagagagcgtgtctgcatacgagctagttgtgaccgcacgcgacgggggctctccgtcgttgtgggccaccgcctcgctgtcagtggaggtagcagacatgaatgacaatgcccccgcatttgcacagccagaatacacggttttcgtaaaggagaacaatccgccgggttgtcatattttcactgttagcgctagagacgccgatgcccaggaaaacgcattggtttcctactcactggttgaaagaagagtgggcgaaagagcactctcaagctacatttctgtgcatgccgagtccggaaaggtgtatgctcttcagcccttggaccatgaagagctggaactgttgcaatttcagccccgccaacccaatccagactggcggtacagtgcctccttgcgcgctggaatgcattctagtgttcatctggaagaggcgggaatcttgcgagccggaccaggcggccctgatcagcaatggcccaccgtaagctctgccacacccgaacccgaggcgggagaggtgagccccccggtcggtgctggcgtcaattctaatagttggaccttcaaatatgggcccggaaatcccaagcagtctggtcccggagaactaccagacaaatttatcattccgggtagccccgccatcatcagtattaggcaggagccaaccaacagtcagattgataagagcgacttcatcacttttgggaaaaaagaggaaacaaagaagaaaaaaaaaaaaaaaaaaggtaataagacccaggagaagaaagaaaaaggaaactctaccactgacaattctgatcagtag

SEQ ID NO: 222106 - DNA, 2061 bp, Artificial Sequence
  derived and/or modified sequence
atggtttttacccctgaggaccgtttgggaaaacagtgtctgcttctgcccctgctcctgttggctgcctggaaagtcggaagtggccaactccactactcggtgccggaagaagcaaagcacggcacatttgttgggcgtatcgcgcaggatctaggccttgagttggctgagctcgttcctcggctgtttagaatggcatccaaggaccgcgaggacctgctggaggtgaaccttcaaaacgggatactgttcgtgaattcacgcatcgacagggaggaactgtgtggaagaagcgctgagtgctcaatccatctggaggtgatcgtggaccggcctctccaggtatttcacgtggacgtcgaggtgagggatattaatgacaaccccccactctttcctgtggaggagcagcgggtgttaatttacgagagtcgtttgccggactccgtcttcccactggagggagcgagcgacgctgatgtcggcagcaattcaattctgacatataagttatctagctcggaatattttgggctggacgttaagattaactccgacgataataagcagattggcctcctcctcaaaaaaagcctggatagagaggaagctcctgctcacaacctctttctgacagcgacagacgggggaaagccagagcttaccgggactgtgcagctgctcgtcactgtccttgacgtgaacgataatgctcctaccttcgagcagtcagaatacgaggtgaggattttcgagaatgcagataacggcaccaccgtgattcggctgaacgcctccgatcgggacgaaggggctaacggagctatctcttatagctttaactctcttgtggccgcaatggttattgaccacttcagcatcgatcgaaataccggtgagatcgtcatccgcggaaacctggacttcgaacaggaaaacttatacaaaatccttattgacgcaacagacaaagggcaccctcccatggctgggcattgcactgtcctggtgcgcatcttggacaaaaatgacaacgttccagaaattgccctgaccagtctgagccttcctgtgcgtgaggacgcccagtttgggaccgtgatcgcccttatctccgtcaacgacctggattctggagcaaatggccaggttaattgcagcttgacgccccacgtgccctttaaactcgtgtccactttcaagaactactactctctggtgctggattccgctcttgatagagagagcgtgagtgcttacgagctggtggtgacagccagagacgggggtagcccgagtctgtgggccaccgcctctctttccgttgaagtggccgacatgaatgacaatgcccctgcctttgcacagcctgagtacaccgtctttgttaaggagaataacccccctggctgccatattttcactgtttctgcgcgagacgcagatgcacaggaaaatgcccttgtctcatattctttggttgaaagaagagtcggtgagcgcgcactctcgtcctacatctccgtgcacgccgagtctggtaaagtatatgccctccagccacttgatcacgaggagctggagctcctgcaattccaaccccgacagcctaacccggattggagatactctgcaagtctgagggctgggatgcactcctctgtacaccttgaggaggcgggaattctgcgcgctggtcccggagggcctgaccagcagtggccaaccgtctctagtgcaacaccagagcctgaagcaggtgaagtgtctccacccgtcggcgctggagttaattccaacagttggacatttaagtatggcccagggaaccccaagcagtcaggccctggagagctgccggataagtttatcattcctgggagccctgcgatcatttcgattcgccaggagccaaccaattcacaaatcgataagtccgattttatcacttttgggaagaaagaagagactaaaaaaaagaaaaaaaaaaagaaagggaacaagactcaagaaaaaaaagagaaaggaaattcaacaacagataactctgatcaatag

SEQ ID NO: 222107 - DNA, 2231 bp, Artificial Sequence
  derived and/or modified sequence
atggaaataaaaccagaggtatttgacatggtgtttaccccggaggatagattgggaaagcaatgtctgctcctcccgcttctgctcctcgcagcctggaaggtggggagcggccagctccactactccgtacccgaggaggccaaacacggcaccttcgtgggccggatcgcgcaggacctggggctggagctggcggagctggtgccgcgcctgttcaggatggcctccaaagaccgcgaggaccttctggaggtaaatctgcagaatggcattttgtttgtgaattctcggatcgaccgcgaggagctgtgcgggcggagcgcggagtgcagcatccacctggaggtgatcgtggacaggccgctgcaggttttccatgtggacgtggaggtgagggacattaacgacaacccgcccttgttcccggtagaggaacaaagagtgctgatttacgaatctaggctgccagattctgtgtttccactggagggcgcgtccgatgcagatgttggctcaaattccatcttaacctataaactcagttctagcgaatacttcgggctagatgtgaaaataaacagtgatgacaataaacaaattgggctcttattaaagaaatccttggacagagaggaagctcctgcacacaacttattcctgacagccacagatgggggcaaacctgagctcacaggcactgttcagctgctggtcacagtgctggatgtgaatgataatgctcccactttcgaacagtctgaatacgaagtaagaatattcgaaaatgcagacaacggaacaacagttatcagactgaatgcttctgatcgggatgaaggagcgaatggggcaatttcatattcttttaatagccttgttgcagccatggttattgaccactttagcatagatcgaaatacgggagaaatagtgattcggggtaatttggattttgaacaagaaaacttatacaaaatcctcattgacgccacggacaaaggccatcctcccatggcgggtcattgcaccgttttagtgagaattttggataaaaatgataacgtccctgagatagcactgacttccttatccttgcctgtacgtgaagacgctcaatttggtactgtcatcgccctaattagcgtgaacgacctcgattcaggtgccaacgggcaggtgaactgctcgctgacgcctcacgtccctttcaagctggtgtccaccttcaagaattactactcgttggtgctggacagtgccctggaccgcgagagcgtgtcggcctatgagttggtggtaaccgcgcgggacgggggctcgccttcgctgtgggccaccgccagcttgtctgtggaggtggccgacatgaatgacaatgctccggcgttcgcgcagcccgagtacacagtgttcgtgaaggagaacaacccgccgggctgccacatcttcacggtgtctgcgcgagacgcggacgcgcaggagaacgcgctggtgtcctactcgctggtggagcggcgggtgggcgagcgcgcgttgtcgagctacatttcggtgcacgcggagagcggcaaggtgtacgcgctgcagccgctggaccacgaggagctagagctgctgcagtttcagccacgacagcccaaccctgactggcgttactctgcctccctgagagcaggcatgcacagctctgtgcacctagaggaggctggcattctacgggctggtccaggagggcctgatcagcagtggccaacagtatccagtgcaacaccagaaccagaggcaggagaagtgtcccctccagtcggtgcgggtgtcaacagcaacagctggacctttaaatacggaccaggcaaccccaaacaatccggtcccggtgagttgcccgacaaattcattatcccaggatctcctgcaatcatctccatccggcaggagcctactaacagccaaattgacaaaagtgacttcataaccttcggcaaaaaggaggagaccaagaaaaagaagaaaaagaagaagggtaacaagacccaggagaaaaaagagaaagggaacagcacgactgacaacagtgaccagtgaggtcctcaaatggaaacaagccacttagccagtttttgtaataatggcaaatctctcccatgtagcaattccctgctcctttttcctatctacatgagccctcttagagacctcagaaatctgcagaaagttccctgtgtctg

SEQ ID NO: 222108 - DNA, 2061 bp, Artificial Sequence
  derived and/or modified sequence
atggtgttcacccccgaggacagactgggcaagcagtgcctgctgctgcccctgctgctgctggccgcctggaaggtgggcagcggccagctgcactacagcgtgcccgaggaggccaagcacggcaccttcgtgggcagaatcgcccaggacctgggcctggagctggccgagctggtgcccagactgttcagaatggccagcaaggacagagaggacctgctggaggtgaacctgcagaacggcatcctgttcgtgaacagcagaatcgacagagaggagctgtgcggcagaagcgccgagtgcagcatccacctggaggtgatcgtggacagacccctgcaggtgttccacgtggacgtggaggtgagagacatcaacgacaacccccccctgttccccgtggaggagcagagagtgctgatctacgagagcagactgcccgacagcgtgttccccctggagggcgccagcgacgccgacgtgggcagcaacagcatcctgacctacaagctgagcagcagcgagtacttcggcctggacgtgaagatcaacagcgacgacaacaagcagatcggcctgctgctgaagaagagcctggacagagaggaggcccccgcccacaacctgttcctgaccgccaccgacggcggcaagcccgagctgaccggcaccgtgcagctgctggtgaccgtgctggacgtgaacgacaacgcccccaccttcgagcagagcgagtacgaggtgagaatcttcgagaacgccgacaacggcaccaccgtgatcagactgaacgccagcgacagagacgagggcgccaacggcgccatcagctacagcttcaacagcctggtggccgccatggtgatcgaccacttcagcatcgacagaaacaccggcgagatcgtgatcagaggcaacctggacttcgagcaggagaacctgtacaagatcctgatcgacgccaccgacaagggccacccccccatggccggccactgcaccgtgctggtgagaatcctggacaagaacgacaacgtgcccgagatcgccctgaccagcctgagcctgcccgtgagagaggacgcccagttcggcaccgtgatcgccctgatcagcgtgaacgacctggacagcggcgccaacggccaggtgaactgcagcctgaccccccacgtgcccttcaagctggtgagcaccttcaagaactactacagcctggtgctggacagcgccctggacagagagagcgtgagcgcctacgagctggtggtgaccgccagagacggcggcagccccagcctgtgggccaccgccagcctgagcgtggaggtggccgacatgaacgacaacgcccccgccttcgcccagcccgagtacaccgtgttcgtgaaggagaacaacccccccggctgccacatcttcaccgtgagcgccagagacgccgacgcccaggagaacgccctggtgagctacagcctggtggagagaagagtgggcgagagagccctgagcagctacatcagcgtgcacgccgagagcggcaaggtgtacgccctgcagcccctggaccacgaggagctggagctgctgcagttccagcccagacagcccaaccccgactggagatacagcgccagcctgagagccggcatgcacagcagcgtgcacctggaggaggccggcatcctgagagccggccccggcggccccgaccagcagtggcccaccgtgagcagcgccacccccgagcccgaggccggcgaggtgagcccccccgtgggcgccggcgtgaacagcaacagctggaccttcaagtacggccccggcaaccccaagcagagcggccccggcgagctgcccgacaagttcatcatccccggcagccccgccatcatcagcatcagacaggagcccaccaacagccagatcgacaagagcgacttcatcaccttcggcaagaaggaggagaccaagaagaagaagaagaagaagaagggcaacaagacccaggagaagaaggagaagggcaacagcaccaccgacaacagcgaccagtag

SEQ ID NO: 222109 - protein, 966 aa, Artificial Sequence
  derived and/or modified sequence
MEPQVTLNVTFKNEIQSFLVSDPENTTWADIEAMVKVSFDLNTIQIKYLDEENEEVSINSQGEYEEALKMAVKQGNQLQMQVHEGHHVVDEAPPPVVGAKRLAARAGKKPLAHYSSLVRVLGSDMKTPEDPAVQSFPLVPCDTDQPQDKPPDWFTSYLETFREQVVNETVEKLEQKLHEKLVLQNPSLGSCPSEVSMPTSEETLFLPENQFSWHIACNNCQRRIVGVRYQCSLCPSYNICEDCEAGPYGHDTNHVLLKLRRPVVGSSEPFCHSKYSTPRLPAALEQVRLQKQVDKNFLKAEKQRLRAEKKQRKAEVKELKKQLKLHRKIHLWNSIHGLQSPKSPLGRPESLLQSNTLMLPLQPCTSVMPMLSAAFVDENLPDGTHLQPGTKFIKHWRMKNTGNVKWSADTKLKFMWGNLTLASTEKKDVLVPCLKAGHVGVVSVEFIAPALEGTYTSHWRLSHKGQQFGPRVWCSIIVDPFPSEESPDNIEKGMISSSKTDDLTCQQEETFLLAKEERQLGEVTEQTEGTAACIPQKAKNVASERELYIPSVDLLTAQDLLSFELLDINIVQELERVPHNTPVDVTPCMSPLPHDSPLIEKPGLGQIEEENEGAGFKALPDSMVSVKRKAENIASVEEAEEDLSGTQFVCETVIRSLTLDAAPDHNPPCRQKSLQMTFALPEGPLGNEKEEIIHIAEEEAVMEEEEDEEDEEEEDELKDEVQSQSSASSEDYIIILPECFDTSRPLGDSMYSSALSQPGLERGAEGKPGVEAGQEPAEAGERLPGGENQPQEHSISDILTTSQTLETVPLIPEVVELPPSLPRSSPCVHHHGSPGVDLPVTIPEVSSVPDQIRGEPRGSSGLVNSRQKSYDHSRHHHGSSIAGGLVKGALSVAASAYKALFAGPPVTAQPIISEDQTAALMAHLFEMGFCDRQLNLRLLKKHNYNILQVVTELLQLNNNDWYSQRY

SEQ ID NO: 222110 - protein, 966 aa, Artificial Sequence
  derived and/or modified sequence
MEPQVTLNVTFKNEIQSFLVSDPENTTWADIEAMVKVSFDLNTIQIKYLDEENEEVKIVLLGEYEEALKMAVKQGNQLQMQVHEGHHVVDEAPPPVVGAKRLAARAGKKPLAHYSSLVRVLGSDMKTPEDPAVQSFPLVPCDTDQPQDKPPDWFTSYLETFREQVVNETVEKLEQKLHEKLVLQNPSLGSCPSEVSMPTSEETLFLPENQFSWHIACNNCQRRIVGVRYQCSLCPSYNICEDCEAGPYGHDTNHVLLKLRRPVVGSSEPFCHSKYSTPRLPAALEQVRLQKQVDKNFLKAEKQRLRAEKKQRKAEVKELKKQLKLHRKIHLWNSIHGLQSPKSPLGRPESLLQSNTLMLPLQPCTSVMPMLSAAFVDENLPDGTHLQPGTKFIKHWRMKNTGNVKWSADTKLKFMWGNLTLASTEKKDVLVPCLKAGHVGVVSVEFIAPALEGTYTSHWRLSHKGQQFGPRVWCSIIVDPFPSEESPDNIEKGMISSSKTDDLTCQQEETFLLAKEERQLGEVTEQTEGTAACIPQKAKNVASERELYIPSVDLLTAQDLLSFELLDINIVQELERVPHNTPVDVTPCMSPLPHDSPLIEKPGLGQIEEENEGAGFKALPDSMVSVKRKAENIASVEEAEEDLSGTQFVCETVIRSLTLDAAPDHNPPCRQKSLQMTFALPEGPLGNEKEEIIHIAEEEAVMEEEEDEEDEEEEDELKDEVQSQSSASSEDYIIILPECFDTSRPLGDSMYSSALSQPGLERGAEGKPGVEAGQEPAEAGERLPGGENQPQEHSISDILTTSQTLETVPLIPEVVELPPSLPRSSPCVHHHGSPGVDLPVTIPEVSSVPDQIRGEPRGSSGLVNSRQKSYDHSRHHHGSSIAGGLVKGALSVAASAYKALFAGPPVTAQPIISEDQTAALMAHLFEMGFCDRQLNLRLLKKHNYNILQVVTELLQLNNNDWYSQRY

SEQ ID NO: 222111 - protein, 217 aa, Artificial Sequence
  derived and/or modified sequence
MYSSALSQPGLERGAEGKPGVEAGQEPAEAGERLPGGENQPQEHSISDILTTSQTLETVPLIPEVVELPPSLPRSSPCVHHHGSPGVDLPVTIPEVSSVPDQIRGEPRGSSGLVNSRQKSYDHSRHHHGSSIAGGLVKGALSVAASAYKALFAGPPVTAQPIISEDQTAALMAHLFEMGFCDRQLNLRLLKKHNYNILQVVTELLQLNNNDWYSQRY

SEQ ID NO: 222112 - DNA, 2901 bp, Artificial Sequence
  derived and/or modified sequence
atggagccgcaagtgaccctcaatgtgacattcaaaaacgaaattcagtctttcctggtatccgacccagaaaacactacatgggctgatatcgaagctatggtcaaggtctccttcgatctgaacactatccagataaaatatttggacgaagagaatgaggaggttagtatcaacagccagggagaatacgaggaggctctaaaaatggctgtgaagcaaggaaatcaactgcagatgcaggtgcacgagggacaccacgtcgtagatgaggccccccccccagtcgtgggagccaagcgtttggccgctagggcggggaaaaagccactggcccactatagttctcttgtccgggtactgggctctgatatgaagaccccagaagaccccgctgtccagagcttcccactcgttccttgtgataccgaccagccccaggataagcccccggattggttcacaagttacctggagacatttcgcgaacaagtagtgaatgaaacagtagaaaagctcgagcagaaactgcacgaaaaactcgtgctgcaaaaccccagtttaggatcttgtccatccgaggtgtcgatgccaaccagtgaagagaccctgttcttacctgagaatcagttctcttggcacattgcctgcaacaactgtcagcggcgaattgtcggtgtgcgttaccagtgctctctttgccccagttacaatatatgtgaggactgcgaggctggcccctacggtcacgacactaaccatgttttactgaaactgcggaggcccgtggttggatcctcagaaccgttttgccactctaagtactccacaccacgtttacccgctgccttggaacaagtgcggctccagaaacaagttgacaagaactttctgaaggccgagaaacagagacttcgcgccgaaaagaagcaacggaaagcagaggtgaaagagcttaaaaagcagctgaaactgcatcgtaagatccacctttggaatagcatccatgggttgcaatctcccaaaagtccactaggaagacctgaatccctgttacagtcaaatactctgatgctcccactgcagccctgcacgagcgtgatgcctatgctttccgccgccttcgttgacgaaaacctgccagacgggactcacctgcagccgggaaccaagtttatcaaacattggagaatgaaaaataccggaaacgtgaagtggagtgctgacaccaagcttaaatttatgtggggaaatctgactctagcttccactgagaagaaggacgttctcgtcccatgtttaaaggccggccatgtcggagtggtgagtgtggagttcattgctcccgctcttgaaggaacctacacctctcattggcgcctttcccacaaaggacagcagttcggaccacgcgtgtggtgctctatcattgtagatccttttccgtctgaggaaagtcctgataacattgagaaaggaatgatctccagttcgaagacagacgacctgacctgccagcaggaggaaaccttcctcctggccaaagaggagagacagcttggcgaggtgaccgaacagacggaagggaccgccgcctgcatcccacagaaagccaagaacgttgcctccgagagggaactgtacattcccagcgtcgatctccttactgctcaggatctgctgtcttttgaactgttggatatcaatattgtccaagagctggaacgggtgcctcacaacactcctgtggatgtgaccccatgcatgtcgcctttgccacacgactcgcccctcatcgagaaacccgggttgggtcagatcgaggaagaaaatgaaggtgccggatttaaggccctgcctgattctatggtcagcgtcaaacgcaaagcggagaatatcgcctctgtagaagaggccgaggaggacctgtccggcacgcagttcgtatgtgaaactgtgatcagaagtctgactcttgacgccgcccctgatcataatcccccatgccgccagaagtccctccagatgacattcgcactccccgaagggcctctgggcaacgaaaaagaagaaattattcacatagctgaagaggaggccgtcatggaggaagaggaagatgaggaggacgaggaggaagaagacgaattaaaggacgaagtgcagagtcaatcatccgcctccagtgaggactacattatcatcctgcctgaatgttttgacacaagtcggcctctcggagatagcatgtattcaagcgcgttaagtcaacccggcttggagcggggtgctgagggaaagcctggagtagaagcgggccaggaacctgccgaagctggcgaacgccttccaggaggggagaaccaacctcaggaacacagcatttctgacatactaactacatcccagactttagaaaccgtgcctttgattcccgaagttgtagaactgccccctagcttaccccggtcatccccctgtgtgcatcaccacggaagtcctggtgtggacctaccggtgactatccctgaggtctccagcgtcccagatcagatccggggagagccacgcggtagctctgggctggtcaactccagacagaagtcatacgatcacagccgacaccaccacggttctagtatcgctggggggctagttaagggggccctgtctgtagctgccagcgcatataaggctttatttgccggacctccagtgactgctcagccaattattagcgaggatcagacggccgctctgatggcccacttattcgaaatgggcttttgcgatagacagctcaatctgaggttgttaaagaagcataattataacattctgcaagttgtgactgagctgctgcagttgaataataacgattggtactcccagagatattag

SEQ ID NO: 222113 - DNA, 2901 bp, Artificial Sequence
  derived and/or modified sequence
atggagccccaggtcacccttaatgtcacattcaaaaacgaaatccagagtttcttggtgtccgatccagagaacacaacctgggccgacatcgaggccatggtcaaagtttcatttgatctgaatactattcaaattaaatatttggatgaagaaaatgaggaggtgaagatagtgttgctgggtgaatatgaagaggctctgaagatggccgtcaaacagggcaatcaacttcagatgcaagtgcatgagggacatcacgttgtggacgaagcaccccctcccgtcgtcggcgcaaaacgacttgcagccagggccggcaagaagccgctcgcccactatagctccctggtgcgggtgctgggatcggatatgaagacacccgaagatccggccgtgcagagttttccattggttccatgcgacaccgatcagccacaggataagccccccgattggttcacgtcctatctggagacattccgggaacaggtggtcaatgaaacggttgagaaactggagcagaagctacatgaaaaacttgtgttgcagaatcccagcctgggctcctgtccctctgaagtgtccatgcctacatctgaggaaactctctttttaccagaaaatcagtttagttggcacatcgcctgtaataattgtcagcgtagaatcgtgggcgtgagatatcagtgtagcctgtgtccttcttacaacatctgcgaagactgcgaggctggcccctatgggcacgatacaaaccatgttctgctcaagctgcggaggccagtggtcggttcttctgaaccattttgccatagtaagtatagcaccccacgcctgccagctgctctcgaacaagttcggctacagaagcaggtggacaagaactttttgaaagccgagaaacagcgtttgcgcgcggagaagaaacagcgtaaggcagaagtgaaggagctcaaaaagcagttaaagctgcacaggaaaattcatctgtggaatagcatccacggactccagtctcccaagtctccactgggtcgccctgagtccctgctgcaaagtaatacacttatgttgcccctgcagccctgtacctccgtcatgcctatgctgtccgccgcttttgtggacgaaaatctgcccgacggaactcacttgcagcccggcaccaagtttatcaaacattggcgtatgaagaacactgggaacgtaaaatggagcgcggacaccaaactcaaattcatgtgggggaatctgacattggctagcacagagaaaaaggatgtgttagtgccctgtctgaaagcagggcacgttggggtggtcagtgtggaattcatcgcccccgccttggaaggaacatacacctcccactggcggctttctcacaagggacaacagtttggcccgagggtgtggtgctccattattgtggacccatttccctcggaggaatcgcccgataatatcgagaagggtatgattagttccagcaagactgatgatctcacttgccagcaggaggagacatttttactcgccaaagaagaaaggcagctgggggaggtaactgaacagaccgaaggcacggctgcgtgtattcctcagaaagctaagaatgttgcttctgagcgggagttatacatcccaagcgtagacttgcttacagcccaggatctgttatctttcgagctgctcgacatcaatattgtgcaagagttagagcgggtgcctcacaataccccagtggacgtgaccccgtgtatgtcgccacttccccacgacagccctctgattgaaaaacctggtctgggccaaatcgaagaagagaatgagggggccgggtttaaggcccttcctgactccatggtgtccgttaagcgaaaagcggagaacatagcatccgtggaggaggccgaagaagatctgtcaggtacccagttcgtgtgtgagactgtgatccggtcactgaccctagatgccgcgccagaccacaacccaccctgcaggcagaagtctctgcaaatgactttcgcgctgccggagggccccttgggaaacgaaaaggaagagatcatacacattgccgaggaggaggccgtgatggaggaggaggaggatgaggaagacgaggaggaggaagacgaactgaaggatgaggtgcaaagccagagcagtgccagctctgaggactacatcatcatcctgcctgagtgttttgacacttctcgccccttgggagactccatgtacagctcagcactgtcacagcctggtctggagagaggagctgaggggaaaccaggggtcgaggccggccaggagcccgcggaggcaggggagcggctacctggtggtgagaaccagccgcaggaacactccatttctgacattctaacaacttcccagacgctagagaccgtcccactgatcccagaagtcgtggagctgccacccagtctgccaagatcaagcccctgtgtgcatcaccatggctccccaggggtggatctgccagtcacgatccccgaggtgagctctgtgcctgatcagattaggggcgagcccaggggtagctcaggcctggtgaacagccgacaaaaaagttacgatcacagtcgacaccaccatggatcctcaattgcgggcggcttggtgaaaggggctctgtcggtggccgcctctgcttacaaagctctttttgccggtcctcccgtcactgcccaacccataatcagcgaagatcagacggctgctcttatggcacacctgtttgagatgggattctgcgacaggcagcttaacctgaggctgctgaagaaacacaactataacatcctgcaggttgtcacagagttgctgcaactgaataataacgactggtactcacaacgctactag

SEQ ID NO: 222114 - DNA, 2901 bp, Artificial Sequence
  derived and/or modified sequence
atggaaccacaggtgacactaaatgttacattcaagaacgagatccagtcctttctcgtaagcgaccccgagaacactacttgggccgacattgaagccatggtgaaggtaagctttgatttaaacaccatccagatcaaatatctagacgaagaaaacgaggaagtgtccatcaactcacagggcgagtacgaagaggctttgaagatggctgtcaaacagggtaaccagctgcagatgcaggttcacgaaggccatcatgtcgtggacgaggcacctccaccagttgtcggggccaaaaggttggccgctagggcgggaaaaaagcctctggctcactacagctctctggtgagagtcttaggttccgatatgaaaactcccgaagatccagccgtgcaaagcttccctctagtaccatgtgacacagaccagcctcaggacaaacctcccgattggtttacttcttacttggaaacattcagggagcaggtggtaaatgaaaccgtggaaaagctggagcagaagctgcacgagaagctggttttacagaatccatcgctgggaagctgcccctccgaggtcagcatgcctactagcgaggaaactctgttcctcccagagaaccagtttagttggcacattgcctgtaataattgtcaaagaaggattgtgggggtaagatatcagtgtagcctgtgtccgtcctacaacatatgcgaggactgtgaagccggcccatatggtcacgacactaatcatgtgctgttgaagctcagacgtcccgtggtgggatcctctgagcccttctgccattcaaagtattcgactcccaggcttcccgccgccctggagcaggtgcggttgcagaagcaagtcgacaagaattttctcaaggctgaaaagcagcgcctgcgtgcagagaaaaagcagcgaaaagccgaggtcaaggagctcaagaagcaactcaaattacatagaaagattcatttatggaatagcattcatggtctgcaatccccaaaaagccccctgggtagaccagaatcactgctgcagtcaaacaccttaatgctgccgcttcagccctgtactagcgtcatgcctatgctctcagctgcgttcgtggacgagaacctgcctgacggcacgcacttacagccaggtacgaaatttatcaagcactggaggatgaaaaatacaggaaatgtcaagtggtctgctgacacaaaactaaaatttatgtggggaaacttgaccttagcctccaccgagaagaaggatgtgctggtgccttgtttgaaagccggtcacgtgggggttgtcagtgtggaatttatcgcgcccgcactggagggcacttacaccagtcactggagactgtcccacaagggtcagcagttcgggcctagagtctggtgtagcatcatcgtcgatccttttcccagcgaggaaagcccagataacatagagaagggtatgatatcctcaagcaagacggatgacctgacatgtcaacaagaggagaccttcctgcttgccaaggaagaacgtcagttgggggaggtgaccgaacagacagaggggaccgccgcctgtattcctcagaaagccaagaatgtcgccagcgaacgcgaactgtatattcctagtgtggatctgttaaccgctcaggacctgctgagtttcgagctgctggacattaacatagttcaggaactagaacgggtgcctcacaacactcccgtagacgtgaccccctgcatgagtcccctccctcatgacagccccctgatcgagaaacccggcttggggcagattgaggaagaaaatgagggcgcaggcttcaaagcactgccagattctatggtttctgtcaagaggaaagcagagaacatcgcttccgtagaagaggctgaggaggaccttagcggaacccaattcgtatgcgagacagttataagaagtctcaccctggacgccgcccctgaccacaaccccccctgtcgccaaaaaagtttgcaaatgacattcgcactcccagaggggcccctgggtaatgaaaaggaggaaatcatacatattgctgaggaagaggctgtaatggaggaggaagaggacgaggaggacgaagaggaggaggacgagttaaaggacgaagttcagtcacagagcagcgcctccagcgaggattatataatcatactgccagagtgtttcgatacaagtcgccccctcggcgacagtatgtactcaagtgcgctgtctcagcccggcctcgagcgcggggccgaagggaaaccgggggtcgaggccggccaagaacccgccgaggccggggagcgccttcctggaggagaaaatcaaccacaagagcattcaatctctgacatcctgaccacttcgcaaactctggaaacagtgccactgataccagaagtggtggagctgccccctagtttgccccgctcaagcccttgtgtgcaccaccatgggtctcccggggtggatctgccagtgaccattcccgaagtgtcttcagttccagatcagatccgcggtgagccccgtggcagctctggcctggtgaacagccggcagaagagttacgaccacagtcggcatcaccacgggagttccatagccggtgggctcgtgaagggggctctctccgtggccgctagtgcatataaggcactgttcgccggcccccctgttacagcgcagcccatcatatcagaggaccagacggcggctctcatggcccacctctttgaaatggggttctgcgaccgtcagctaaatctacggcttctcaagaagcataattacaacatcctgcaagtggttaccgaactcctgcagctgaataataacgactggtactcccaaaggtattag

SEQ ID NO: 222115 - DNA, 2901 bp, Artificial Sequence
  derived and/or modified sequence
atggagccccaggtgaccctgaatgtgaccttcaagaatgagatccagagcttcctggtgtctgaccctgagaacaccacctgggccgacatcgaggccatggtgaaggtgtcctttgacctgaacaccatccagatcaagtacctggatgaggagaatgaggaggtgtccatcaacagccagggcgagtatgaggaggccctgaagatggctgtgaagcagggcaaccagctgcagatgcaggtgcatgagggccaccacgtggtggatgaggcccctcctcctgtggtgggcgccaagaggctggccgcccgggccggcaagaagcccctggcccactacagcagcctggtgcgggtgctgggcagtgacatgaagaccccagaagatcctgctgtgcagagcttccccctggtgccctgtgacacagaccagccccaggacaagcccccagactggttcaccagctacctggagaccttccgggagcaggtggtgaatgaaacagtggagaagctggagcagaagctgcacgagaagctggtgctgcagaaccccagcctgggcagctgccccagcgaggtgtccatgcccaccagcgaggagaccctcttcctgcctgagaaccagttctcctggcacatcgcctgcaacaactgccagaggcgcatcgtgggcgtgcgctaccagtgcagcctgtgccccagctacaacatctgtgaggactgtgaggccggcccctacggccatgacaccaaccacgtgctgctgaagctgcggcggcctgtggtgggcagcagcgagcccttctgccacagcaagtacagcaccccccggctgcctgctgccctggagcaggtgcggctgcagaagcaggtggacaagaacttcctgaaggccgagaagcagaggctgcgggcagagaagaagcagaggaaggccgaggtgaaggagctgaagaagcagctgaagctgcacaggaagatccacctgtggaacagcatccacggcctgcagagccccaagagccccctgggccggcctgagagcctgctgcagagcaacaccctgatgctgcccctgcagccctgcacctctgtgatgcccatgctgtctgctgcctttgtggatgagaacctgcctgatggcacccacctgcagcccggcaccaagttcatcaagcactggaggatgaagaacacaggaaatgtgaagtggagcgctgacaccaagctgaagttcatgtggggcaacctgaccctggccagcacagagaagaaggatgtgctggtgccctgcctgaaggccggccacgtgggcgtggtgtctgtggagttcatcgccccagccctggagggcacctacaccagccactggaggctgagccacaagggccagcagtttggcccccgggtgtggtgcagcatcatcgtggaccccttccccagcgaggagagcccagacaacatcgagaagggcatgatcagcagcagcaagacagatgacctgacctgccagcaggaggagaccttcctgctggccaaggaggagcggcagctgggggaggtgacagagcagacagagggcacagctgcctgcatcccccagaaggccaagaatgtggccagcgagcgggagctgtacatccccagcgtggacctgctgacagcccaggacctgctgagctttgagctgctggacatcaacatcgtgcaggagctggagcgggtgccccacaacacccctgtggatgtgaccccctgcatgagccccctgccccatgacagccccctgattgagaagccaggcctgggccagatcgaggaggagaatgaaggagctggcttcaaggccctgcctgacagcatggtgtctgtgaagaggaaggcagaaaatattgcctctgtggaggaggccgaggaggacctgagcggcacccagtttgtgtgtgagaccgtcatccgcagcctgaccctggatgctgccccagaccacaaccccccctgccggcagaagagcctgcagatgacctttgccctgcctgagggccccctgggcaatgagaaggaggagatcatccacatcgccgaggaggaggccgtgatggaggaggaggaggatgaagaagatgaggaggaggaggatgagctgaaggatgaggtgcagagccagagcagcgccagcagcgaggactacatcatcatcctgcctgagtgctttgacaccagccggcccctgggggacagcatgtacagcagcgccctgagccagcccggcctggagagaggagctgagggcaagccaggagtggaggccggccaggagcctgctgaggccggggagcggctgcctggaggagagaaccagccccaggagcacagcatcagtgacatcctgaccaccagccagaccctggagaccgtgcccctcatccctgaggtggtggagctgccccccagcctgcccaggagcagcccctgtgtgcaccaccacggcagccctggggtggacctgcctgtgaccatccctgaggtgtcctctgtgcctgaccagatccggggggagccccggggcagcagcggcctggtgaacagccggcagaagagctatgaccacagccgccaccaccacggcagcagcattgctgggggcctggtgaagggggccctgtctgtggccgccagcgcctacaaggccctgtttgctggcccccctgtgacagcccagcccatcatcagcgaggaccagacagctgccctgatggcccacctgtttgagatgggcttctgtgaccggcagctgaacctgcggctgctgaagaagcacaactacaacatcctgcaggtggtgacagagctgctgcagctgaacaacaatgactggtacagccagcgctactag

SEQ ID NO: 222116 - DNA, 2901 bp, Artificial Sequence
  derived and/or modified sequence
atggagccccaggtgaccctgaatgtgaccttcaagaatgagatccagagcttcctggtgtctgaccctgagaacaccacctgggccgacatcgaggccatggtgaaggtgtcctttgacctgaacaccatccagatcaagtacctggatgaggagaatgaggaggtgaagatcgtgctgctgggggagtatgaggaggccctgaagatggctgtgaagcagggcaaccagctgcagatgcaggtgcatgagggccaccacgtggtggatgaggcccctcctcctgtggtgggcgccaagaggctggccgcccgggccggcaagaagcccctggcccactacagcagcctggtgcgggtgctgggcagtgacatgaagaccccagaagatcctgctgtgcagagcttccccctggtgccctgtgacacagaccagccccaggacaagcccccagactggttcaccagctacctggagaccttccgggagcaggtggtgaatgaaacagtggagaagctggagcagaagctgcacgagaagctggtgctgcagaaccccagcctgggcagctgccccagcgaggtgtccatgcccaccagcgaggagaccctcttcctgcctgagaaccagttctcctggcacatcgcctgcaacaactgccagaggcgcatcgtgggcgtgcgctaccagtgcagcctgtgccccagctacaacatctgtgaggactgtgaggccggcccctacggccatgacaccaaccacgtgctgctgaagctgcggcggcctgtggtgggcagcagcgagcccttctgccacagcaagtacagcaccccccggctgcctgctgccctggagcaggtgcggctgcagaagcaggtggacaagaacttcctgaaggccgagaagcagaggctgcgggcagagaagaagcagaggaaggccgaggtgaaggagctgaagaagcagctgaagctgcacaggaagatccacctgtggaacagcatccacggcctgcagagccccaagagccccctgggccggcctgagagcctgctgcagagcaacaccctgatgctgcccctgcagccctgcacctctgtgatgcccatgctgtctgctgcctttgtggatgagaacctgcctgatggcacccacctgcagcccggcaccaagttcatcaagcactggaggatgaagaacacaggaaatgtgaagtggagcgctgacaccaagctgaagttcatgtggggcaacctgaccctggccagcacagagaagaaggatgtgctggtgccctgcctgaaggccggccacgtgggcgtggtgtctgtggagttcatcgccccagccctggagggcacctacaccagccactggaggctgagccacaagggccagcagtttggcccccgggtgtggtgcagcatcatcgtggaccccttccccagcgaggagagcccagacaacatcgagaagggcatgatcagcagcagcaagacagatgacctgacctgccagcaggaggagaccttcctgctggccaaggaggagcggcagctgggggaggtgacagagcagacagagggcacagctgcctgcatcccccagaaggccaagaatgtggccagcgagcgggagctgtacatccccagcgtggacctgctgacagcccaggacctgctgagctttgagctgctggacatcaacatcgtgcaggagctggagcgggtgccccacaacacccctgtggatgtgaccccctgcatgagccccctgccccatgacagccccctgattgagaagccaggcctgggccagatcgaggaggagaatgaaggagctggcttcaaggccctgcctgacagcatggtgtctgtgaagaggaaggcagaaaatattgcctctgtggaggaggccgaggaggacctgagcggcacccagtttgtgtgtgagaccgtcatccgcagcctgaccctggatgctgccccagaccacaaccccccctgccggcagaagagcctgcagatgacctttgccctgcctgagggccccctgggcaatgagaaggaggagatcatccacatcgccgaggaggaggccgtgatggaggaggaggaggatgaagaagatgaggaggaggaggatgagctgaaggatgaggtgcagagccagagcagcgccagcagcgaggactacatcatcatcctgcctgagtgctttgacaccagccggcccctgggggacagcatgtacagcagcgccctgagccagcccggcctggagagaggagctgagggcaagccaggagtggaggccggccaggagcctgctgaggccggggagcggctgcctggaggagagaaccagccccaggagcacagcatcagtgacatcctgaccaccagccagaccctggagaccgtgcccctcatccctgaggtggtggagctgccccccagcctgcccaggagcagcccctgtgtgcaccaccacggcagccctggggtggacctgcctgtgaccatccctgaggtgtcctctgtgcctgaccagatccggggggagccccggggcagcagcggcctggtgaacagccggcagaagagctatgaccacagccgccaccaccacggcagcagcattgctgggggcctggtgaagggggccctgtctgtggccgccagcgcctacaaggccctgtttgctggcccccctgtgacagcccagcccatcatcagcgaggaccagacagctgccctgatggcccacctgtttgagatgggcttctgtgaccggcagctgaacctgcggctgctgaagaagcacaactacaacatcctgcaggtggtgacagagctgctgcagctgaacaacaatgactggtacagccagcgctactag

SEQ ID NO: 222117 - DNA, 2901 bp, Artificial Sequence
  derived and/or modified sequence
atggagccccaggtgaccctgaacgtgaccttcaagaacgagatccagtcctttctcgtgtcagaccctgagaacaccacctgggcagacatagaggcgatggttaaggttagtttcgatctaaatacgatccaaattaagtaccttgatgaggaaaatgaagaggtgagtataaacagccaaggcgagtacgaggaagctctcaaaatggcagtgaagcagggcaaccagcttcaaatgcaggtgcacgaggggcatcacgtcgtggatgaagctccacctccagttgtaggagcgaaaaggttagcagccagagcagggaagaagcccctggcccactactccagcttggtccgcgtcctgggatcagacatgaagaccccagaggaccccgctgtgcagagctttcctctggttccatgtgacacagaccagccccaggataagcctcctgactggttcacatcttacttggaaacattccgcgagcaggttgtgaatgagacagtggaaaagttagaacagaagctgcacgagaagctggtcctccagaacccatctctcggatcttgtcctagtgaagtaagtatgccaacatcagaggagaccctgttccttcccgagaaccagttctcatggcacattgcgtgtaataactgtcaaaggcgcatcgttggagtgaggtatcagtgttcactttgcccgagttataatatatgcgaggactgcgaggctgggccttacggacacgatactaaccatgttctacttaaactgagaaggccggtggttggttcatcagagcccttttgccattccaagtactcaaccccacgtctgccagccgccctggaacaggtccggttacagaaacaggttgacaagaattttctgaaggccgaaaagcagcggctacgcgccgaaaaaaaacagcggaaagcagaggtgaaggagctcaaaaaacagttaaaactccaccgtaaaatccacctttggaattctatccatggcttgcaatcccccaaatctccccttggcaggcccgaaagtcttctccagagcaacactcttatgcttccactgcaaccgtgcacaagcgtgatgccaatgctgtcagccgccttcgtcgacgaaaatcttccagacgggacccacctgcagccgggaaccaaatttatcaaacactggcgaatgaaaaacaccggtaacgttaaatggtccgcagacacgaaacttaagttcatgtgggggaatctgaccttagcgtccactgagaaaaaagacgtgctcgtaccctgtctgaaagccggccacgtcggtgtggtgtccgttgagtttatcgcgccagccctggaagggacatacacaagccactggaggttgtcacacaaaggacaacagttcggtcctcgggtttggtgcagcatcatcgtggatccattcccttcggaggagtcacccgataatatcgagaagggaatgatttcctccagcaagactgacgacttgacctgtcagcaggaggagacgttcctcctggcaaaggaagagagacagctgggggaggtgactgaacagactgaaggcacagcggcatgcattccccaaaaagctaagaatgtagccagtgaaagagagttgtacattccatcagtcgatttactaacagctcaggatctactgtccttcgaactacttgatatcaacattgtccaggagcttgaacgcgtgccccacaatactccagtggacgtgaccccttgtatgtcccccctgccccacgattcacctctcatagaaaaacctgggctgggacagatcgaagaggaaaatgaaggcgccggtttcaaggccttgcctgattctatggtgtccgttaaacgcaaagcggaaaacattgcaagcgttgaagaagccgaggaggacctgagcggaacccagtttgtgtgcgaaaccgtgatccggtcactgacgttagacgcggcccctgatcacaatccaccctgccggcagaagtcccttcaaatgacctttgctctgcctgaagggcctctgggtaacgagaaagaggagatcatccatatcgctgaagaggaggccgtcatggaagaggaggaggacgaagaggacgaggaagaggaggatgaactaaaagatgaggtccagtcccaatccagcgcctcgtccgaagactacatcatcatcctgcccgagtgtttcgatacttctcgccccctcggcgacagcatgtactcttcagctctgtctcagccaggtctcgagagaggcgccgaggggaaacccggagtggaagccggccaggagccagcggaagctggcgaacgcctgcctggcggggagaatcagccccaggaacactctatatccgacatattgactacgtctcagaccctggaaacagtcccactgatcccggaggtggttgagctgcctccctcgctcccaaggtcctccccttgcgtccaccatcacggcagtccaggggtagatctgccagtcaccatcccggaagttagctctgttcccgaccaaattcggggcgaaccgagaggtagctccggtctggtcaattctcgccagaagagctacgaccactctcgccatcatcacggatcttccatcgccgggggcctcgtcaagggggccttgtcagtcgcggcgtcagcgtacaaggcactgttcgccggcccaccagttacagcacaacctatcatttccgaggatcagaccgccgctttgatggcacacttgttcgaaatgggcttttgcgatcgccaacttaatctccgtctgttaaaaaagcataattacaatatcttacaggttgtgactgaacttcttcagctaaataacaatgactggtatagccagcgatattag

SEQ ID NO: 222118 - DNA, 2901 bp, Artificial Sequence
  derived and/or modified sequence
atggagccccaggtgaccctgaacgtgaccttcaagaacgagatccagagtttcctggtttccgaccctgagaacaccacctgggctgacattgaagcaatggtcaaggtttccttcgacttaaacaccattcaaataaaataccttgacgaagaaaacgaggaagtcaagattgtgcttctgggggagtatgaagaggcattgaagatggctgttaagcagggcaaccagttgcagatgcaggtgcacgagggacaccacgtcgtagacgaggcacctccgcccgtggtcggggccaaacggttggctgctcgggccggcaaaaagcctttggcacactacagctcactggtccgcgtactgggtagtgatatgaaaaccccagaagatcccgccgtgcagagcttccccctggtgccttgcgatactgatcagccccaggacaagcctccagactggttcacttcttacctagagaccttcagggagcaagtagtgaacgagaccgttgagaagctggagcaaaagttgcacgagaagctcgtcctacagaaccccagcttgggctcctgccccagcgaggtgagtatgcctacctcggaggagaccctgttcttgccagagaaccaattctcatggcatattgcctgcaacaattgtcagcggagaatcgtgggcgttaggtatcagtgttccctctgccccagctataacatttgtgaagactgcgaggcaggaccttacggacatgacactaaccatgtgctgctaaagctaaggcgcccggtggtggggtcatccgagcccttttgccattccaaatattcgactcccagactcccagcggctctggaacaagtcagactgcaaaagcaggtagacaagaatttcctcaaagcggagaaacagaggctccgggccgaaaagaaacagcgtaaggccgaggttaaggagttaaaaaagcagttgaagctccacagaaagattcacctgtggaatagcattcacgggttgcaatccccaaagtctccattaggacgtcccgagtcacttctgcagagcaacaccctgatgctccccttacaaccctgcacttccgtgatgccaatgttatcagccgcgtttgtggacgaaaatctgcccgatgggacacatctgcaacctgggaccaaatttatcaagcactggagaatgaagaataccgggaacgtgaaatggagtgctgacacaaaactcaaatttatgtgggggaatctcacactagcctccactgaaaaaaaagatgtactggtgccttgcctaaaagctggacacgtgggagttgtgtccgttgagtttatcgctccagcacttgagggtacatacacctcacactggcggttgtcacacaaggggcagcagttcggacctcgcgtatggtgcagcataattgtagaccccttcccctccgaggagagccctgacaatatcgagaaagggatgatcagctccagtaaaacggacgacttaacctgccagcaggaagaaaccttcctcttggcgaaggaggaacgccagctcggagaggtgacggaacaaacggaaggtaccgcagcttgcatcccccagaaagctaagaatgtggctagcgaaagagagctgtatataccttcggttgaccttctgaccgcccaagacctactttcttttgaattgctcgatattaacatagttcaggagctcgagagagtgccacacaacactcctgtagatgtcacgccttgcatgtctcccctgccacacgacagcccactcattgaaaaaccgggcctcggccagatagaagaagagaacgaaggcgccgggttcaaggctcttcccgactctatggtttccgtcaaacggaaggccgaaaatattgcctccgttgaagaggccgaagaggacctgtctgggacccagttcgtgtgtgaaacagtgatacgaagcctgaccctggacgcagcacccgaccacaacccaccctgtcgccagaagtccttgcagatgacttttgcactgccagaaggacctctgggcaacgagaaagaagaaataatacatattgcggaagaggaggctgtcatggaagaggaagaagacgaagaggatgaggaggaggaagacgagcttaaggatgaggtccagtcccaaagcagcgcgtccagcgaagattatattatcatcctccctgagtgctttgatacttcaagacctctcggcgactcaatgtattcttcagccctgagtcaacccgggttggagagaggtgccgagggaaagcctggcgtcgaagcagggcaagagccagcagaagcaggggagaggttgcctggaggtgagaaccagccccaagaacactcaatcagcgacattttgaccaccagccagacactagagaccgtccccctgatccccgaggtagtggagttaccgccatctctgcctcgaagctctccctgcgtccaccaccatggctcgcccggcgtggatttgcctgtcaccattcctgaggtttcatcggtgcccgatcagattcgaggcgagccgcggggaagcagtggcctagtgaactcaaggcagaaatcctatgaccactcgagacatcatcacgggagctccatcgccggcggcctggtgaaaggggccctatcagtcgccgcttctgcctacaaagctctctttgctggccccccagttaccgcccaacccatcatttctgaggaccaaacagccgcactgatggcccatctgtttgagatggggttctgcgacagacagctgaacctccgcctgctgaagaagcataattacaacatcctgcaggtcgtcaccgagctgctccagctcaataataatgactggtacagccagcgctattag

SEQ ID NO: 222119 - DNA, 2901 bp, Artificial Sequence
  derived and/or modified sequence
atggagccccaggtgaccctgaacgtgaccttcaagaacgagatccagtcattcctggtgagtgaccctgagaacaccacgtgggccgatatagaggctatggtgaaggtctccttcgatctgaataccatccagattaaataccttgatgaggaaaatgaagaagtttcaattaatagccagggtgaatatgaagaagcactcaagatggccgtcaagcagggtaatcaactgcaaatgcaggtccacgagggccatcacgtagtggacgaagccccccctcctgtggtgggcgctaaacggctcgctgcaagggctggcaaaaagccactagcccattattcctctttggtcagggtactggggagcgacatgaagacccccgaagacccagctgtccagagtttccccctggtgccctgtgacaccgatcagccccaggataagccaccagattggttcacctcatacctcgagacctttcgcgagcaggttgtgaatgagaccgtggaaaagctcgagcagaaattgcatgagaagcttgtgctgcagaatccatctctgggcagttgcccctccgaagtcagcatgcctacatcagaggagaccctgttcctgcccgagaaccaattttcttggcacattgcctgcaataattgccagagaagaatcgtgggagtcagatatcagtgcagtctatgcccctcctataatatttgtgaggattgtgaggcgggtccttatggccacgacaccaaccacgtacttctaaaattgcgcagacctgtggtggggtcctctgagcctttctgtcattcaaagtattctactcctagactgcctgcagcactagagcaagttcggcttcagaagcaggtggataaaaacttcctgaaggcggaaaaacagaggctcagagccgagaagaaacagcggaaggccgaggtgaaagaattgaagaagcagttaaaactccataggaagatccacctttggaattcaatacacggacttcagtctcctaaatcgcccttggggaggcctgagtctctgttacagtcaaataccctaatgctcccgcttcagccctgcactagcgtcatgccaatgctgtcagcagcttttgtcgatgaaaacctacccgacggcacgcatttgcagcctggtactaaatttattaagcactggcgtatgaaaaacacgggtaacgtgaaatggagtgccgacaccaaacttaagtttatgtgggggaatctgaccctggcctccacggagaaaaaggatgtcctggtaccgtgcctcaaggcaggccacgtgggcgttgtgtccgtagaattcatagcaccagccctcgaaggaacttacactagccattggcggctcagtcataaaggccagcaatttggaccacgcgtttggtgcagcatcatcgtggatccgttcccgagtgaggaatcccccgataacattgagaaaggaatgatctcctcttctaaaactgacgacttgacctgccagcaggaggaaacatttcttctggccaaagaggaacgccaactgggtgaagttacagagcagactgaaggaacagctgcttgcattccgcagaaagcgaagaatgtagcatccgagcgagaactctacattccctctgttgatctgttaacagcacaggacctattgtcttttgagctgctggacattaatatagtgcaagagttggagagagtcccgcacaacacacctgtcgatgtgactccttgcatgagtccgctgccacacgatagcccactgatcgaaaagcccggacttggccagatcgaggaggaaaacgagggggctggattcaaagctctccccgattctatggtgtctgtgaaacggaaggccgaaaacatagccagtgtggaggaggcggaagaggatctatctggaacacaatttgtctgcgagactgtcattaggtccctgaccctggatgctgctccagaccacaacccaccctgtcggcaaaagagcttgcagatgactttcgctctcccggaagggcctctgggcaatgaaaaggaggagatcatccacatcgctgaggaggaagctgtcatggaagaggaagaagatgaagaagatgaagaggaagaagacgaattgaaggacgaagtccagtctcagagctccgcttcatccgaggactacataatcattctgcctgagtgctttgatacatcgagacctttgggagactcaatgtatagctcagccctttctcagcctggacttgaaagaggagcagaagggaagcctggggtggaagctggacaggaacctgccgaggcaggggagcgcctcccgggcggcgagaaccagccacaggagcattccataagcgacattctgaccacgtcccagactcttgaaactgtgccgctaattcccgaggtggtggagctgcccccctctctgccccgaagttctccatgtgtgcatcaccatggatctccgggtgttgatctgccagtgactatacctgaagtgtccagcgttccagaccaaataagaggagaaccccgcggttcctctggcctggtaaatagccgacagaagagctacgatcacagccgacaccaccacgggtcatcgattgccggaggtctggtgaagggcgccttaagcgtagcagcttctgcttacaaggcattgttcgccggacctccggttacagcccagccaataatctcagaggaccagactgcggccttgatggctcacctttttgagatgggcttttgcgataggcagcttaacctacgtctgctaaagaaacataactacaatattctccaggtggtgactgagttactgcagttgaacaataatgactggtactcacaacgctattag

SEQ ID NO: 222120 - DNA, 4597 bp, Artificial Sequence
  derived and/or modified sequence
ggatagcggcagagccggtagcggacggtccttgcattggcctccggcaggcgccccccgggggcgggaagctgcctcacagcatggaaccacaggttactctaaatgtgacttttaaaaatgaaattcaaagctttctggtttctgatccagaaaatacaacttgggctgatatcgaagctatggtaaaagtttcatttgatctgaatactattcaaataaaatacctggatgaggaaaatgaagaggtatccatcaacagtcaaggagaatatgaagaagcgcttaagatggcagttaaacagggaaaccaactgcagatgcaagtccacgaagggcaccatgtcgttgatgaagccccacccccagttgtaggagcaaaacgactagctgccagggcagggaagaagccacttgcacattactcttcactggtgagagtcttgggatcagacatgaagaccccagaggatcctgcagtgcagtcgtttccacttgttccatgtgacacagaccagcctcaagacaagcccccagactggttcacaagctacctggagacgttcagagaacaagtggttaacgaaacggttgagaagcttgaacagaaattacatgaaaagcttgtcctccagaacccatccttgggttcttgtccctcagaagtctcaatgcctacttcagaagaaacattgtttttgccagaaaaccagttcagctggcatattgcttgcaacaactgccaaagaaggattgttggtgtccgctaccagtgtagcctatgcccatcctacaatatctgtgaagattgtgaagcagggccatatggccatgacactaaccacgtcctgctgaagttgcggagacctgttgtgggctcctctgaaccgttctgtcactcaaagtactctactcctcgtcttcctgctgctctggaacaagtcaggctccagaaacaggttgataagaactttcttaaagcagaaaagcaaaggttgcgagctgagaagaaacaacgtaaagcagaggtcaaggaacttaaaaagcagcttaaactccataggaaaattcacctgtggaattcaatccatggactccagagccccaagtctcctttaggccgacctgagagcttgctccagtctaataccctgatgctccctttgcagccctgtacctccgttatgccaatgctcagtgcagcatttgtggatgagaatttgcctgatgggactcaccttcagccaggaaccaagtttatcaaacactggaggatgaaaaatacaggaaatgtaaagtggagtgcagacacaaagctcaagttcatgtggggaaacctgactttggcttccacagaaaagaaggatgttttggttccctgcctcaaggccggccatgtgggagttgtatctgtggagttcattgccccagccttggagggaacgtatacttcccattggcgtctttctcacaaaggccagcaatttgggcctcgggtctggtgcagtatcatagtagatcctttcccctccgaagagagccctgataacattgaaaagggcatgatcagctcaagcaaaactgatgatctcacctgccagcaagaggaaacttttcttctggctaaagaagaaagacagcttggtgaagtgactgagcagacagaagggacagcagcctgcatcccacagaaggcaaaaaatgttgccagtgagagggagctctacatcccatctgtggatcttctgactgcccaggacctgctgtcctttgagctgttggatataaacattgttcaagagttggagagagtgccccacaacacccctgtggatgtgactccctgcatgtctcctctgccacatgacagtcctttaatagagaagccaggcttggggcagatagaggaagagaatgaaggggcaggatttaaagcacttcctgattctatggtgtcagtaaagaggaaggctgagaacattgcttctgtggaggaagcagaagaagacctgagtgggacccagtttgtgtgtgagacagtaatccgatcccttaccttggatgctgccccagaccacaaccctccttgcagacagaagtccttgcagatgacatttgccttgcctgaaggaccacttggaaatgagaaggaggagattatccatatcgctgaggaagaagctgtcatggaggaggaggaggatgaggaggatgaggaggaggaggatgagctcaaagatgaagttcaaagtcagtcctctgcttcctcagaggattacatcatcatcctgcctgagtgctttgataccagccgccccctgggggattctatgtacagctctgcgctctcacagccaggcctggagcgaggtgctgaaggcaagcctggggttgaggctgggcaggaaccagctgaggctggggaaagactccctggaggggagaaccagccacaggagcacagcataagtgacatcctcacgacctcacagactctggaaacagtgcccctaatcccagaggtagtggagcttccaccgtcactgcccaggagctctccttgtgtacatcatcatggttccccaggagtggatttaccagttaccataccagaagtttcttcagtccctgatcagatcagaggagagcccagaggctcatcaggacttgtaaacagcagacagaagagctatgaccactcaaggcaccatcatgggagcagcattgctggaggactggtgaagggggctttgtctgttgctgcctctgcatacaaggccctgtttgctgggccaccagtcactgcacagccaataatttctgaagatcagacagcagccctgatggcccatctctttgaaatgggattctgtgacaggcagctgaacctacggctgctgaagaaacacaattacaatatcctgcaggttgtgacagaacttcttcagttaaacaacaacgactggtacagccaacgctattgaggagtgaccttgtattaaataactgcctgctgctcagagatgatctttattctgtcattggggtatgggatagaagcccttgcttatttttaatctgatgaatctgtatagagcccatcgttgagttaccaagacaatacctgctacagtattttggggagcaaactaaagaccagaacttaaattttcactttagacattggatgaatagtatgaagacagtttttcagttgatttggataaaactattttagtgcattgacaagtgtaacttcaacttcatatagaaccatttttctttctgcttttattgaaactgagtatttttctttggctaatgtggattttttatggggatatctgttaattttcaggttttgaaagacattaacctcggaagttgtttttaagaattattctcataattcttattctcataatttctgtaatccacctcaagcttcatagttatttggcattgaaataacacccagagcatgatagaaatgttgttactcttcctctctcaaggagaaagtaattttcctgcaatacttaataattggcaccgttgctttctaaagactccatggtgcattcaagagtatccaacttcaagggaatctccgcatttcaatgaaaggaggaagagtgtgctgataaacctaccagcacctattgagcaatgtctattatagtaattttgcatacatttttatttaagggaaaaaatataggtattgtgaaatattttgctaatcttatagaaaaggaaaaaatcccgttatttaaagggaaaagtaaatttaacagttgccttttttcttaatgtcagggcagatcttattttacagtacagtgggggaaatagaaacatgtgaaaggcaaaaggcaggctcctaaattaatgtcagtgaagttcagggtgggcaaatgagtgtgtgtgaggtataggaaatgctgatgacttctttaatgcttgaagtccgttcacaggtatctagccctagaatgcctagaacaggaagaggcagctggtgttctgcaaaacttggacaggggcaaagttgctgaaaaagttttggtttaacccgaagataagtggaaaagagcttgtccatgaacccaggttctcactctgtttacagaagtgtgttgagtacagttggtgaaggaagaggtaacaaaaaatgctaaatattttatccatgaaaatgacttccagaaaaggaagaatatgaaccccagaccgaaggggaaaagatagttaatagtattatctaacctggttggtatttgtaatgaatggtgattttaattagtcattagccataatgatgtttatttacagtataactcctgaatgctacttaaataaaccaggattcaaactgcaagccagccaggccgttcattatttaaaacgttttaatcggggcttccgggtagaaggtggagcggcagggtgtaattgggttgatgggtgggacctgtcttgaccatcggagttttataatcgagggccaggagggcccgggttgctctcctggttatgtatgtacttgtacataaccacctaaagaatggtgaaataaatgttcttggaaattcct

SEQ ID NO: 222121 - DNA, 4597 bp, Artificial Sequence
  derived and/or modified sequence
ggatagcggcagagccggtagcggacggtccttgcattggcctccggcaggcgccccccgggggcgggaagctgcctcacagcatggaaccacaggttactctaaatgtgacttttaaaaatgaaattcaaagctttctggtttctgatccagaaaatacaacttgggctgatatcgaagctatggtaaaagtttcatttgatctgaatactattcaaataaaatacctggatgaggaaaatgaagaggtaaaaatagttcttttaggagaatatgaagaagcgcttaagatggcagttaaacagggaaaccaactgcagatgcaagtccacgaagggcaccatgtcgttgatgaagccccacccccagttgtaggagcaaaacgactagctgccagggcagggaagaagccacttgcacattactcttcactggtgagagtcttgggatcagacatgaagaccccagaggatcctgcagtgcagtcgtttccacttgttccatgtgacacagaccagcctcaagacaagcccccagactggttcacaagctacctggagacgttcagagaacaagtggttaacgaaacggttgagaagcttgaacagaaattacatgaaaagcttgtcctccagaacccatccttgggttcttgtccctcagaagtctcaatgcctacttcagaagaaacattgtttttgccagaaaaccagttcagctggcatattgcttgcaacaactgccaaagaaggattgttggtgtccgctaccagtgtagcctatgcccatcctacaatatctgtgaagattgtgaagcagggccatatggccatgacactaaccacgtcctgctgaagttgcggagacctgttgtgggctcctctgaaccgttctgtcactcaaagtactctactcctcgtcttcctgctgctctggaacaagtcaggctccagaaacaggttgataagaactttcttaaagcagaaaagcaaaggttgcgagctgagaagaaacaacgtaaagcagaggtcaaggaacttaaaaagcagcttaaactccataggaaaattcacctgtggaattcaatccatggactccagagccccaagtctcctttaggccgacctgagagcttgctccagtctaataccctgatgctccctttgcagccctgtacctccgttatgccaatgctcagtgcagcatttgtggatgagaatttgcctgatgggactcaccttcagccaggaaccaagtttatcaaacactggaggatgaaaaatacaggaaatgtaaagtggagtgcagacacaaagctcaagttcatgtggggaaacctgactttggcttccacagaaaagaaggatgttttggttccctgcctcaaggccggccatgtgggagttgtatctgtggagttcattgccccagccttggagggaacgtatacttcccattggcgtctttctcacaaaggccagcaatttgggcctcgggtctggtgcagtatcatagtagatcctttcccctccgaagagagccctgataacattgaaaagggcatgatcagctcaagcaaaactgatgatctcacctgccagcaagaggaaacttttcttctggctaaagaagaaagacagcttggtgaagtgactgagcagacagaagggacagcagcctgcatcccacagaaggcaaaaaatgttgccagtgagagggagctctacatcccatctgtggatcttctgactgcccaggacctgctgtcctttgagctgttggatataaacattgttcaagagttggagagagtgccccacaacacccctgtggatgtgactccctgcatgtctcctctgccacatgacagtcctttaatagagaagccaggcttggggcagatagaggaagagaatgaaggggcaggatttaaagcacttcctgattctatggtgtcagtaaagaggaaggctgagaacattgcttctgtggaggaagcagaagaagacctgagtgggacccagtttgtgtgtgagacagtaatccgatcccttaccttggatgctgccccagaccacaaccctccttgcagacagaagtccttgcagatgacatttgccttgcctgaaggaccacttggaaatgagaaggaggagattatccatatcgctgaggaagaagctgtcatggaggaggaggaggatgaggaggatgaggaggaggaggatgagctcaaagatgaagttcaaagtcagtcctctgcttcctcagaggattacatcatcatcctgcctgagtgctttgataccagccgccccctgggggattctatgtacagctctgcgctctcacagccaggcctggagcgaggtgctgaaggcaagcctggggttgaggctgggcaggaaccagctgaggctggggaaagactccctggaggggagaaccagccacaggagcacagcataagtgacatcctcacgacctcacagactctggaaacagtgcccctaatcccagaggtagtggagcttccaccgtcactgcccaggagctctccttgtgtacatcatcatggttccccaggagtggatttaccagttaccataccagaagtttcttcagtccctgatcagatcagaggagagcccagaggctcatcaggacttgtaaacagcagacagaagagctatgaccactcaaggcaccatcatgggagcagcattgctggaggactggtgaagggggctttgtctgttgctgcctctgcatacaaggccctgtttgctgggccaccagtcactgcacagccaataatttctgaagatcagacagcagccctgatggcccatctctttgaaatgggattctgtgacaggcagctgaacctacggctgctgaagaaacacaattacaatatcctgcaggttgtgacagaacttcttcagttaaacaacaacgactggtacagccaacgctattgaggagtgaccttgtattaaataactgcctgctgctcagagatgatctttattctgtcattggggtatgggatagaagcccttgcttatttttaatctgatgaatctgtatagagcccatcgttgagttaccaagacaatacctgctacagtattttggggagcaaactaaagaccagaacttaaattttcactttagacattggatgaatagtatgaagacagtttttcagttgatttggataaaactattttagtgcattgacaagtgtaacttcaacttcatatagaaccatttttctttctgcttttattgaaactgagtatttttctttggctaatgtggattttttatggggatatctgttaattttcaggttttgaaagacattaacctcggaagttgtttttaagaattattctcataattcttattctcataatttctgtaatccacctcaagcttcatagttatttggcattgaaataacacccagagcatgatagaaatgttgttactcttcctctctcaaggagaaagtaattttcctgcaatacttaataattggcaccgttgctttctaaagactccatggtgcattcaagagtatccaacttcaagggaatctccgcatttcaatgaaaggaggaagagtgtgctgataaacctaccagcacctattgagcaatgtctattatagtaattttgcatacatttttatttaagggaaaaaatataggtattgtgaaatattttgctaatcttatagaaaaggaaaaaatcccgttatttaaagggaaaagtaaatttaacagttgccttttttcttaatgtcagggcagatcttattttacagtacagtgggggaaatagaaacatgtgaaaggcaaaaggcaggctcctaaattaatgtcagtgaagttcagggtgggcaaatgagtgtgtgtgaggtataggaaatgctgatgacttctttaatgcttgaagtccgttcacaggtatctagccctagaatgcctagaacaggaagaggcagctggtgttctgcaaaacttggacaggggcaaagttgctgaaaaagttttggtttaacccgaagataagtggaaaagagcttgtccatgaacccaggttctcactctgtttacagaagtgtgttgagtacagttggtgaaggaagaggtaacaaaaaatgctaaatattttatccatgaaaatgacttccagaaaaggaagaatatgaaccccagaccgaaggggaaaagatagttaatagtattatctaacctggttggtatttgtaatgaatggtgattttaattagtcattagccataatgatgtttatttacagtataactcctgaatgctacttaaataaaccaggattcaaactgcaagccagccaggccgttcattatttaaaacgttttaatcggggcttccgggtagaaggtggagcggcagggtgtaattgggttgatgggtgggacctgtcttgaccatcggagttttataatcgagggccaggagggcccgggttgctctcctggttatgtatgtacttgtacataaccacctaaagaatggtgaaataaatgttcttggaaattcct

SEQ ID NO: 222122 - DNA, 4973 bp, Artificial Sequence
  derived and/or modified sequence
ccaaggtcagaatcgccacctgaggcctgaatatcagcgtaagatagtgtccaaagcagtcttaagaagaggtcccattaccccactctttccgccctaatggaggtctccagtttaggtaaataaaaggattgttgggaggtggagggaaagaactactatttccaacatgcattgcggaacgaaaggccttggccacactgttccttggaaactgtagtcttatggagaggaacatccaataccaaagcgggcacaattctcacggaaatccagtggatagattggagacctccgcgggcttatacatgtcaacagtaatggattggagtgttgttatgttctcctatcttgagagcagagactaggccaaaaaaagatacctacaactcctaggaagactacgattcccatccagccccacgagtctcgggcaagtagtcctctaagcctcacagcatggaaccacaggttactctaaatgtgacttttaaaaatgaaattcaaagctttctggtttctgatccagaaaatacaacttgggctgatatcgaagctatggtaaaagtttcatttgatctgaatactattcaaataaaatacctggatgaggaaaatgaagaggtatccatcaacagtcaaggagaatatgaagaagcgcttaagatggcagttaaacagggaaaccaactgcagatgcaagtccacgaagggcaccatgtcgttgatgaagccccacccccagttgtaggagcaaaacgactagctgccagggcagggaagaagccacttgcacattactcttcactggtgagagtcttgggatcagacatgaagaccccagaggatcctgcagtgcagtcgtttccacttgttccatgtgacacagaccagcctcaagacaagcccccagactggttcacaagctacctggagacgttcagagaacaagtggttaacgaaacggttgagaagcttgaacagaaattacatgaaaagcttgtcctccagaacccatccttgggttcttgtccctcagaagtctcaatgcctacttcagaagaaacattgtttttgccagaaaaccagttcagctggcatattgcttgcaacaactgccaaagaaggattgttggtgtccgctaccagtgtagcctatgcccatcctacaatatctgtgaagattgtgaagcagggccatatggccatgacactaaccacgtcctgctgaagttgcggagacctgttgtgggctcctctgaaccgttctgtcactcaaagtactctactcctcgtcttcctgctgctctggaacaagtcaggctccagaaacaggttgataagaactttcttaaagcagaaaagcaaaggttgcgagctgagaagaaacaacgtaaagcagaggtcaaggaacttaaaaagcagcttaaactccataggaaaattcacctgtggaattcaatccatggactccagagccccaagtctcctttaggccgacctgagagcttgctccagtctaataccctgatgctccctttgcagccctgtacctccgttatgccaatgctcagtgcagcatttgtggatgagaatttgcctgatgggactcaccttcagccaggaaccaagtttatcaaacactggaggatgaaaaatacaggaaatgtaaagtggagtgcagacacaaagctcaagttcatgtggggaaacctgactttggcttccacagaaaagaaggatgttttggttccctgcctcaaggccggccatgtgggagttgtatctgtggagttcattgccccagccttggagggaacgtatacttcccattggcgtctttctcacaaaggccagcaatttgggcctcgggtctggtgcagtatcatagtagatcctttcccctccgaagagagccctgataacattgaaaagggcatgatcagctcaagcaaaactgatgatctcacctgccagcaagaggaaacttttcttctggctaaagaagaaagacagcttggtgaagtgactgagcagacagaagggacagcagcctgcatcccacagaaggcaaaaaatgttgccagtgagagggagctctacatcccatctgtggatcttctgactgcccaggacctgctgtcctttgagctgttggatataaacattgttcaagagttggagagagtgccccacaacacccctgtggatgtgactccctgcatgtctcctctgccacatgacagtcctttaatagagaagccaggcttggggcagatagaggaagagaatgaaggggcaggatttaaagcacttcctgattctatggtgtcagtaaagaggaaggctgagaacattgcttctgtggaggaagcagaagaagacctgagtgggacccagtttgtgtgtgagacagtaatccgatcccttaccttggatgctgccccagaccacaaccctccttgcagacagaagtccttgcagatgacatttgccttgcctgaaggaccacttggaaatgagaaggaggagattatccatatcgctgaggaagaagctgtcatggaggaggaggaggatgaggaggatgaggaggaggaggatgagctcaaagatgaagttcaaagtcagtcctctgcttcctcagaggattacatcatcatcctgcctgagtgctttgataccagccgccccctgggggattctatgtacagctctgcgctctcacagccaggcctggagcgaggtgctgaaggcaagcctggggttgaggctgggcaggaaccagctgaggctggggaaagactccctggaggggagaaccagccacaggagcacagcataagtgacatcctcacgacctcacagactctggaaacagtgcccctaatcccagaggtagtggagcttccaccgtcactgcccaggagctctccttgtgtacatcatcatggttccccaggagtggatttaccagttaccataccagaagtttcttcagtccctgatcagatcagaggagagcccagaggctcatcaggacttgtaaacagcagacagaagagctatgaccactcaaggcaccatcatgggagcagcattgctggaggactggtgaagggggctttgtctgttgctgcctctgcatacaaggccctgtttgctgggccaccagtcactgcacagccaataatttctgaagatcagacagcagccctgatggcccatctctttgaaatgggattctgtgacaggcagctgaacctacggctgctgaagaaacacaattacaatatcctgcaggttgtgacagaacttcttcagttaaacaacaacgactggtacagccaacgctattgaggagtgaccttgtattaaataactgcctgctgctcagagatgatctttattctgtcattggggtatgggatagaagcccttgcttatttttaatctgatgaatctgtatagagcccatcgttgagttaccaagacaatacctgctacagtattttggggagcaaactaaagaccagaacttaaattttcactttagacattggatgaatagtatgaagacagtttttcagttgatttggataaaactattttagtgcattgacaagtgtaacttcaacttcatatagaaccatttttctttctgcttttattgaaactgagtatttttctttggctaatgtggattttttatggggatatctgttaattttcaggttttgaaagacattaacctcggaagttgtttttaagaattattctcataattcttattctcataatttctgtaatccacctcaagcttcatagttatttggcattgaaataacacccagagcatgatagaaatgttgttactcttcctctctcaaggagaaagtaattttcctgcaatacttaataattggcaccgttgctttctaaagactccatggtgcattcaagagtatccaacttcaagggaatctccgcatttcaatgaaaggaggaagagtgtgctgataaacctaccagcacctattgagcaatgtctattatagtaattttgcatacatttttatttaagggaaaaaatataggtattgtgaaatattttgctaatcttatagaaaaggaaaaaatcccgttatttaaagggaaaagtaaatttaacagttgccttttttcttaatgtcagggcagatcttattttacagtacagtgggggaaatagaaacatgtgaaaggcaaaaggcaggctcctaaattaatgtcagtgaagttcagggtgggcaaatgagtgtgtgtgaggtataggaaatgctgatgacttctttaatgcttgaagtccgttcacaggtatctagccctagaatgcctagaacaggaagaggcagctggtgttctgcaaaacttggacaggggcaaagttgctgaaaaagttttggtttaacccgaagataagtggaaaagagcttgtccatgaacccaggttctcactctgtttacagaagtgtgttgagtacagttggtgaaggaagaggtaacaaaaaatgctaaatattttatccatgaaaatgacttccagaaaaggaagaatatgaaccccagaccgaaggggaaaagatagttaatagtattatctaacctggttggtatttgtaatgaatggtgattttaattagtcattagccataatgatgtttatttacagtataactcctgaatgctacttaaataaaccaggattcaaactgcaagccagccaggccgttcattatttaaaacgttttaatcggggcttccgggtagaaggtggagcggcagggtgtaattgggttgatgggtgggacctgtcttgaccatcggagttttataatcgagggccaggagggcccgggttgctctcctggttatgtatgtacttgtacataaccacctaaagaatggtgaaataaatgttcttggaaattcct

SEQ ID NO: 222123 - DNA, 2901 bp, Artificial Sequence
  derived and/or modified sequence
atggaaccgcaggttaccctcaacgtgacttttaaaaatgaaatccaaagtttcttggttagtgacccagagaatacaacttgggctgatatcgaggccatggtgaaagtctcctttgatctcaataccatccagattaaatacctcgatgaggagaatgaagaggtcagtattaattcccagggcgagtacgaagaagccctcaaaatggctgtgaagcaaggaaatcagctgcaaatgcaggtgcacgaaggccatcacgtggttgatgaagcgccaccaccagtggtgggggcaaagagactggcggctcgtgcgggaaagaagccactagctcactattcctcactggtgcgcgtgctgggctcagatatgaagactcccgaagaccccgctgttcagtccttcccacttgtgccttgtgatacagatcaaccacaagataagcctcctgactggtttacttcatacctggaaactttccgggaacaggtcgtaaacgagactgtggaaaaactcgaacagaaactgcacgagaagctggtgctgcaaaatccctccctgggtagctgtccttcggaggtctcgatgccaacctcggaggagaccttgtttttgccagagaatcaattctcttggcacatcgcatgtaataattgccagagacggattgtgggcgtccgctaccagtgcagtttgtgcccttcttacaacatctgcgaagattgcgaggcagggccttacggtcatgatactaatcacgtgcttctgaagcttcgcagacccgtcgtaggtagctcagagcccttttgccacagcaaatactcgactccacgcctccctgcagccttggagcaggttcgcctgcagaaacaggtggacaagaatttcctgaaagcagagaaacagagactgcgcgcagaaaagaagcagaggaaggccgaagtaaaggaactgaaaaagcagctcaagctgcaccggaaaatccacctctggaattcaatacacggtctgcagagccccaaaagcccactcggcaggccagaatccctgctgcagtccaataccttaatgctgccccttcagccctgtacaagcgttatgccaatgttgagcgccgcttttgtggacgagaacttacccgacggaacgcatctgcagccaggcaccaagttcatcaagcactggcggatgaagaatacaggcaatgtgaaatggtccgcggacacaaaactaaaattcatgtggggcaatttgacactggccagtacggagaagaaagacgtgctggtcccgtgcctgaaagccggtcatgttggggtcgtctctgtcgaattcatcgctcctgctttggaaggcacttacacatcccactggagattgtcccacaaaggccagcagttcggaccaagggtgtggtgtagcataatcgtcgacccatttccatctgaagagagccccgacaacatcgaaaagggaatgatatccagtagcaaaactgatgatctgacttgtcagcaggaagagacatttctacttgccaaagaagaacggcagcttggcgaagtcaccgaacaaactgagggcacagctgcctgtattcctcagaaggctaagaatgtggctagcgaacgcgaattatacataccatctgttgatttgctaaccgcgcaggacctgctgtcgttcgagcttctcgatatcaacatcgtacaggaactggagcgggtgcctcacaacacacccgttgatgtgacaccttgcatgtcaccactaccgcatgattcacccctcattgagaagccaggattgggccaaatcgaggaggaaaacgagggggctggattcaaggctctgccagacagcatggtgagcgttaagcggaaggctgagaacattgcttccgtcgaggaggcggaggaggatctctccggcacccagttcgtatgtgaaactgtgatccggtcgctgaccttggacgccgctcctgaccataatccgccttgtcgacagaagagtctgcagatgacctttgcgttacctgaagggcctctgggcaatgagaaggaagagattatacacattgcagaggaggaggctgtcatggaggaagaagaagacgaggaagacgaggaggaagaggatgagcttaaagatgaagtgcagtcccagagctctgcctcatccgaagactacataatcattctccccgagtgtttcgacacaagtcggccactgggggattccatgtatagttctgccctgtcccagcctgggcttgagaggggggctgaaggaaaaccaggagtggaggccggtcaagagcccgctgaggcaggggaacgcctcccaggcggtgagaatcaaccgcaagagcacagtatttcagatatcctgaccactagccaaacactcgagacggttccgcttattcccgaagtcgtcgaactaccacccagtctcccaagatctagcccctgcgtccaccaccacggaagtcccggagtcgacctcccagtcaccatccccgaagtgtccagcgtaccagatcagattcgcggagagccgagaggatcctcaggactggtcaatagtagacagaagagctatgatcattcacgtcatcatcacggctcatctatagcaggaggtctcgttaaaggggcacttagtgtagcggcaagcgcttacaaggccttgttcgctggcccacccgtgactgcgcagcccattatttcggaggatcagacagccgctctgatggcacacttatttgaaatgggcttctgcgatcgccagctgaacttgcggcttttgaaaaaacataactacaatatcctgcaggtagtgacagaactgcttcaacttaataacaatgattggtatagtcaacggtattag

SEQ ID NO: 222124 - DNA, 2901 bp, Artificial Sequence
  derived and/or modified sequence
atggaaccccaagttacattaaatgtaacttttaagaatgaaatccagagcttcctcgtgtctgaccctgagaacacaacttgggcagatattgaggcaatggtcaaggtgtcgtttgaccttaatacaatccagatcaaatatttggatgaagagaacgaggaggttaagattgtgttgcttggagaatatgaggaggcccttaaaatggccgttaagcagggaaatcagctccagatgcaggttcacgaaggccatcatgtcgtagatgaggcgcctccaccggttgtgggcgctaagcggctggccgcaagagcgggaaagaaacccctggctcattatagcagcctcgtcagagtgttgggaagcgacatgaaaacaccagaagaccccgctgtacagagcttccccctagttccgtgcgataccgatcagccccaggataaaccacccgattggttcacttcctatcttgaaaccttccgggagcaggtggtgaatgaaactgtggagaagttggagcagaagttgcatgaaaagctcgtccttcagaacccctctttaggatcttgtccttctgaagtctccatgcccacgagtgaagagaccctgttcctccccgaaaaccagtttagctggcacatcgcatgtaacaattgccagcgcaggatcgtgggagtgcgctatcaatgctccttatgtcccagctacaacatttgcgaagactgcgaggcagggccatacggacacgatacaaatcacgttctgctgaagcttcgaaggccggtagtcggatcctctgaacctttttgtcatagcaaatacagtactcctcgcctcccagcagcccttgaacaggtccgcttgcagaaacaagtagacaaaaatttcctcaaggctgagaagcaacgactgcgggctgagaagaagcagagaaaggccgaggttaaggaactcaagaagcagctaaaattgcaccgcaagattcacctgtggaacagcattcacggtctgcagtctccaaagtctccactggggcgtccagagtcactgctccaaagcaacacactgatgctcccgttacagccttgcacatccgttatgcctatgttgtcggccgcttttgtggatgagaatttgcctgacgggacccatcttcagccaggcacaaaattcatcaaacattggagaatgaaaaatacaggtaacgtgaagtggagcgccgatacaaaactaaaatttatgtggggaaatctgactcttgcctccacggagaaaaaggacgtactggtgccatgccttaaagcaggacacgtcggagtggtaagcgtcgagttcattgccccagccctggaaggaacttacaccagccactggcgtctaagccacaaaggacagcagtttggacctagagtctggtgttcaattatcgttgacccttttcccagtgaggaatcacccgataacatcgagaagggaatgatctcatcatctaaaaccgacgacctgacctgccagcaggaggaaacttttctgctagctaaagaagagcggcagctgggcgaggtaacagagcagactgagggtaccgccgcatgtattcctcaaaaggcaaaaaatgtggctagcgagcgcgagctgtacatacccagtgtcgacttactaacagcacaggacttgctgtccttcgaacttctggacattaatatagtacaagaacttgagagggtgcctcacaatacccctgttgatgtgacgccctgtatgtctccactgccccacgatagcccattgatcgagaaaccaggactggggcagattgaggaagagaacgaaggcgctggattcaaggctttgcctgattccatggtgtctgtgaagcggaaggccgagaatatcgcctctgtggaggaggccgaggaggacctctcggggacacagtttgtctgcgagacagttatccgctccctaactctggacgctgcccctgatcacaaccccccatgtagacagaagtccctgcaaatgactttcgcgctgccagaggggccactggggaatgagaaggaggagatcatccacatcgctgaagaggaggccgtcatggaagaagaggaggacgaggaggacgaagaagaagaagatgagctcaaggacgaggtacagtcgcaatcctccgcatcttcagaggattacatcatcatactgcctgaatgcttcgacacttctagaccgctgggtgattctatgtatagttccgccctgagtcagcctgggttagaacgaggcgcagaggggaagccaggcgtggaggctggacaggagccagcggaagcaggggagcggctgcccggtggcgaaaatcagcctcaggagcatagcatcagcgacatcttgactacatcccagaccctagagactgtcccgctgatcccagaagtggtggagctccctccgagcctccctcgctcttccccctgtgtacatcatcacgggtctccaggggttgacctccccgtgacgatcccagaagtgagctcagtccccgatcaaattaggggcgaacctagaggcagctctggcctggtcaactcgagacagaagtcctacgaccattctcggcatcaccacggctcaagtatcgccggtggcctggtcaaaggtgccctgtctgtcgccgcaagcgcatataaagccctgttcgcaggcccacccgtcactgctcagcccatcatctccgaggaccaaactgccgctctaatggctcaccttttcgagatggggttctgcgatcgccagctgaacttacggctgctaaaaaagcataactataacattctgcaggtggtgacggaactcctccaactgaataataatgattggtatagccaacgctactag

SEQ ID NO: 222125 - DNA, 2901 bp, Artificial Sequence
  derived and/or modified sequence
atggaacctcaggttactctcaacgttactttcaaaaatgaaattcaaagctttctggtctctgatcctgagaacacgacttgggctgacatcgaagctatggtaaaagtttctttcgatcttaacacaatccagattaaatatctggacgaagaaaatgaagaagttagcattaattctcagggcgagtacgaagaggccctaaaaatggccgtaaaacaaggtaaccaactgcagatgcaggtccacgaagggcatcacgttgtcgatgaggcaccgcctcctgtcgtaggcgcaaagaggctggccgctcgagccggaaagaagcccctcgcacactactcaagtctggtcagagtcttaggatctgatatgaaaacccccgaggacccagccgtgcagagcttccccctggtcccatgcgatacagaccaaccacaggacaagccacctgattggttcacctcttatttagaaacattcagagaacaagttgtgaatgaaacagtcgagaaactcgaacagaagttgcacgagaagttggtgctgcagaatccctcattaggtagctgtccttccgaagtttccatgcctacatcagaagagacgctcttcctgccagagaaccagttcagctggcatattgcctgcaataattgtcagcggaggattgtaggggtcagataccagtgttcactgtgcccctcatacaatatttgcgaggactgtgaggcgggaccctatggacacgatactaatcacgtgttgctaaagctgcggaggcccgtggtcgggtcttcagaacctttttgtcattcaaaatacagcacacctagattgccagccgctctcgagcaagtccgcttacaaaaacaagttgacaagaactttcttaaagccgagaaacagaggctgagggccgagaagaagcaacgaaaagccgaagtcaaagaattgaaaaagcagttgaagcttcatcgaaagatacatctgtggaactctatccacggtctgcagtctcccaaaagcccgttggggaggcctgaaagcctgttgcaatcaaatacattgatgctgcctttacagccatgcacctctgttatgcccatgttaagtgcagcctttgttgacgagaacctacctgatggaacacacctgcagcctggcaccaaatttatcaagcactggcggatgaaaaataccggcaacgtgaaatggagcgcagatacgaagctcaagtttatgtggggcaacctcacactggcgtcgacagaaaaaaaggacgtgctggtcccctgtcttaaagcgggtcacgtgggggtggtgagtgtggagtttatcgcgccagctctggaaggcacttacacaagccattggagactctctcacaagggccaacagtttggcccacgggtgtggtgtagtataatcgtcgatcctttcccctccgaggaatcaccagataacatcgagaagggcatgatcagctctagcaagacggatgatcttacctgccagcaagaagagacttttctgctggccaaagaagagaggcagctcggtgaagttaccgaacaaaccgagggaaccgctgcatgcatcccccagaaggcaaaaaatgtggccagtgagagagaactttatatccccagtgtggacttactgactgctcaggacttactgagtttcgagctactggacatcaacatcgtccaagagcttgagcgggtgccacacaacacccctgttgatgtgacaccctgcatgtccccactcccccacgattctccgcttatagagaagcctgggctgggacagattgaggaggaaaatgaaggcgctggctttaaggccctccccgattctatggtgtccgttaaaaggaaggccgaaaacatcgccagtgtcgaggaggccgaggaggatttaagcggtactcagttcgtgtgtgaaacggtcattagatcacttactcttgatgctgcaccagatcacaacccaccatgtcgacagaagagcctccagatgaccttcgccctacctgaaggtccccttggaaacgagaaagaggagatcatacatatcgcagaggaggaggccgtgatggaggaggaggaggatgaggaggatgaggaggaggaggatgagctgaaagatgaagttcagagtcagtcttctgcctcgtccgaagactatatcataatactaccagagtgcttcgacacctcacgacccctcggggattcgatgtacagcagtgccctgagccagcccggtctggagcggggagctgaaggaaagcctggtgtcgaagccggtcaggaaccagccgaagcaggggaacgtctgcctggtggtgaaaatcagccccaggagcactctatcagcgatatactcacaacttcccagacattagaaaccgttcccctaatcccagaagtggttgagttacccccaagtctcccaaggagtagcccctgcgtgcaccatcacggaagtcccggtgtagatctgcctgtgacgatccccgaggtatcttcagtgcctgatcagattagaggggaaccaagggggagcagtggtctggtgaacagtcgccaaaagtcctatgaccatagccgccaccaccacggaagcagcatcgccggtggtctagtgaagggggctctttctgtggccgcatctgcttataaggccctgttcgctggccctcccgtgactgcacaaccgattatttctgaagaccagacggctgccttgatggctcacttgttcgaaatgggtttctgcgaccgccagctgaatctgagactgttaaagaagcacaattacaacatcctgcaggtcgtcactgaattattgcagctcaacaataatgactggtattcacaaagatactag

SEQ ID NO: 222126 - DNA, 2901 bp, Artificial Sequence
  derived and/or modified sequence
atggagccccaggtgaccctgaacgtgaccttcaagaacgagatccagagcttcctggtgagcgaccccgagaacaccacctgggccgacatcgaggccatggtgaaggtgagcttcgacctgaacaccatccagatcaagtacctggacgaggagaacgaggaggtgagcatcaacagccagggcgagtacgaggaggccctgaagatggccgtgaagcagggcaaccagctgcagatgcaggtgcacgagggccaccacgtggtggacgaggcccccccccccgtggtgggcgccaagagactggccgccagagccggcaagaagcccctggcccactacagcagcctggtgagagtgctgggcagcgacatgaagacccccgaggaccccgccgtgcagagcttccccctggtgccctgcgacaccgaccagccccaggacaagccccccgactggttcaccagctacctggagaccttcagagagcaggtggtgaacgagaccgtggagaagctggagcagaagctgcacgagaagctggtgctgcagaaccccagcctgggcagctgccccagcgaggtgagcatgcccaccagcgaggagaccctgttcctgcccgagaaccagttcagctggcacatcgcctgcaacaactgccagagaagaatcgtgggcgtgagataccagtgcagcctgtgccccagctacaacatctgcgaggactgcgaggccggcccctacggccacgacaccaaccacgtgctgctgaagctgagaagacccgtggtgggcagcagcgagcccttctgccacagcaagtacagcacccccagactgcccgccgccctggagcaggtgagactgcagaagcaggtggacaagaacttcctgaaggccgagaagcagagactgagagccgagaagaagcagagaaaggccgaggtgaaggagctgaagaagcagctgaagctgcacagaaagatccacctgtggaacagcatccacggcctgcagagccccaagagccccctgggcagacccgagagcctgctgcagagcaacaccctgatgctgcccctgcagccctgcaccagcgtgatgcccatgctgagcgccgccttcgtggacgagaacctgcccgacggcacccacctgcagcccggcaccaagttcatcaagcactggagaatgaagaacaccggcaacgtgaagtggagcgccgacaccaagctgaagttcatgtggggcaacctgaccctggccagcaccgagaagaaggacgtgctggtgccctgcctgaaggccggccacgtgggcgtggtgagcgtggagttcatcgcccccgccctggagggcacctacaccagccactggagactgagccacaagggccagcagttcggccccagagtgtggtgcagcatcatcgtggaccccttccccagcgaggagagccccgacaacatcgagaagggcatgatcagcagcagcaagaccgacgacctgacctgccagcaggaggagaccttcctgctggccaaggaggagagacagctgggcgaggtgaccgagcagaccgagggcaccgccgcctgcatcccccagaaggccaagaacgtggccagcgagagagagctgtacatccccagcgtggacctgctgaccgcccaggacctgctgagcttcgagctgctggacatcaacatcgtgcaggagctggagagagtgccccacaacacccccgtggacgtgaccccctgcatgagccccctgccccacgacagccccctgatcgagaagcccggcctgggccagatcgaggaggagaacgagggcgccggcttcaaggccctgcccgacagcatggtgagcgtgaagagaaaggccgagaacatcgccagcgtggaggaggccgaggaggacctgagcggcacccagttcgtgtgcgagaccgtgatcagaagcctgaccctggacgccgcccccgaccacaaccccccctgcagacagaagagcctgcagatgaccttcgccctgcccgagggccccctgggcaacgagaaggaggagatcatccacatcgccgaggaggaggccgtgatggaggaggaggaggacgaggaggacgaggaggaggaggacgagctgaaggacgaggtgcagagccagagcagcgccagcagcgaggactacatcatcatcctgcccgagtgcttcgacaccagcagacccctgggcgacagcatgtacagcagcgccctgagccagcccggcctggagagaggcgccgagggcaagcccggcgtggaggccggccaggagcccgccgaggccggcgagagactgcccggcggcgagaaccagccccaggagcacagcatcagcgacatcctgaccaccagccagaccctggagaccgtgcccctgatccccgaggtggtggagctgccccccagcctgcccagaagcagcccctgcgtgcaccaccacggcagccccggcgtggacctgcccgtgaccatccccgaggtgagcagcgtgcccgaccagatcagaggcgagcccagaggcagcagcggcctggtgaacagcagacagaagagctacgaccacagcagacaccaccacggcagcagcatcgccggcggcctggtgaagggcgccctgagcgtggccgccagcgcctacaaggccctgttcgccggcccccccgtgaccgcccagcccatcatcagcgaggaccagaccgccgccctgatggcccacctgttcgagatgggcttctgcgacagacagctgaacctgagactgctgaagaagcacaactacaacatcctgcaggtggtgaccgagctgctgcagctgaacaacaacgactggtacagccagagatactag

SEQ ID NO: 222127 - DNA, 2901 bp, Artificial Sequence
  derived and/or modified sequence
atggagccccaggtgaccctgaacgtgaccttcaagaacgagatccagagcttcctggtgagcgaccccgagaacaccacctgggccgacatcgaggccatggtgaaggtgagcttcgacctgaacaccatccagatcaagtacctggacgaggagaacgaggaggtgaagatcgtgctgctgggcgagtacgaggaggccctgaagatggccgtgaagcagggcaaccagctgcagatgcaggtgcacgagggccaccacgtggtggacgaggcccccccccccgtggtgggcgccaagagactggccgccagagccggcaagaagcccctggcccactacagcagcctggtgagagtgctgggcagcgacatgaagacccccgaggaccccgccgtgcagagcttccccctggtgccctgcgacaccgaccagccccaggacaagccccccgactggttcaccagctacctggagaccttcagagagcaggtggtgaacgagaccgtggagaagctggagcagaagctgcacgagaagctggtgctgcagaaccccagcctgggcagctgccccagcgaggtgagcatgcccaccagcgaggagaccctgttcctgcccgagaaccagttcagctggcacatcgcctgcaacaactgccagagaagaatcgtgggcgtgagataccagtgcagcctgtgccccagctacaacatctgcgaggactgcgaggccggcccctacggccacgacaccaaccacgtgctgctgaagctgagaagacccgtggtgggcagcagcgagcccttctgccacagcaagtacagcacccccagactgcccgccgccctggagcaggtgagactgcagaagcaggtggacaagaacttcctgaaggccgagaagcagagactgagagccgagaagaagcagagaaaggccgaggtgaaggagctgaagaagcagctgaagctgcacagaaagatccacctgtggaacagcatccacggcctgcagagccccaagagccccctgggcagacccgagagcctgctgcagagcaacaccctgatgctgcccctgcagccctgcaccagcgtgatgcccatgctgagcgccgccttcgtggacgagaacctgcccgacggcacccacctgcagcccggcaccaagttcatcaagcactggagaatgaagaacaccggcaacgtgaagtggagcgccgacaccaagctgaagttcatgtggggcaacctgaccctggccagcaccgagaagaaggacgtgctggtgccctgcctgaaggccggccacgtgggcgtggtgagcgtggagttcatcgcccccgccctggagggcacctacaccagccactggagactgagccacaagggccagcagttcggccccagagtgtggtgcagcatcatcgtggaccccttccccagcgaggagagccccgacaacatcgagaagggcatgatcagcagcagcaagaccgacgacctgacctgccagcaggaggagaccttcctgctggccaaggaggagagacagctgggcgaggtgaccgagcagaccgagggcaccgccgcctgcatcccccagaaggccaagaacgtggccagcgagagagagctgtacatccccagcgtggacctgctgaccgcccaggacctgctgagcttcgagctgctggacatcaacatcgtgcaggagctggagagagtgccccacaacacccccgtggacgtgaccccctgcatgagccccctgccccacgacagccccctgatcgagaagcccggcctgggccagatcgaggaggagaacgagggcgccggcttcaaggccctgcccgacagcatggtgagcgtgaagagaaaggccgagaacatcgccagcgtggaggaggccgaggaggacctgagcggcacccagttcgtgtgcgagaccgtgatcagaagcctgaccctggacgccgcccccgaccacaaccccccctgcagacagaagagcctgcagatgaccttcgccctgcccgagggccccctgggcaacgagaaggaggagatcatccacatcgccgaggaggaggccgtgatggaggaggaggaggacgaggaggacgaggaggaggaggacgagctgaaggacgaggtgcagagccagagcagcgccagcagcgaggactacatcatcatcctgcccgagtgcttcgacaccagcagacccctgggcgacagcatgtacagcagcgccctgagccagcccggcctggagagaggcgccgagggcaagcccggcgtggaggccggccaggagcccgccgaggccggcgagagactgcccggcggcgagaaccagccccaggagcacagcatcagcgacatcctgaccaccagccagaccctggagaccgtgcccctgatccccgaggtggtggagctgccccccagcctgcccagaagcagcccctgcgtgcaccaccacggcagccccggcgtggacctgcccgtgaccatccccgaggtgagcagcgtgcccgaccagatcagaggcgagcccagaggcagcagcggcctggtgaacagcagacagaagagctacgaccacagcagacaccaccacggcagcagcatcgccggcggcctggtgaagggcgccctgagcgtggccgccagcgcctacaaggccctgttcgccggcccccccgtgaccgcccagcccatcatcagcgaggaccagaccgccgccctgatggcccacctgttcgagatgggcttctgcgacagacagctgaacctgagactgctgaagaagcacaactacaacatcctgcaggtggtgaccgagctgctgcagctgaacaacaacgactggtacagccagagatactag

SEQ ID NO: 222128 - protein, 694 aa, Artificial Sequence
  derived and/or modified sequence
MEWGYLLEVTSLLAALALLQRSSGAAAASAKELACQEITVPLCKGIGYNYTYMPNQFNHDTQDEAGLEVHQFWPLVEIQCSPDLKFFLCSMYTPICLEDYKKPLPPCRSVCERAKAGCAPLMRQYGFAWPDRMRCDRLPEQGNPDTLCMDYNRTDLTTAAPSPPRRLPPPPPGEQPPSGSGHGRPPGARPPHRGGGRGGGGGDAAAPPARGGGGGGKARPPGGGAAPCEPGCQCRAPMVSVSSERHPLYNRVKTGQIANCALPCHNPFFSQDERAFTVFWIGLWSVLCFVSTFATVSTFLIDMERFKYPERPIIFLSACYLFVSVGYLVRLVAGHEKVACSGGAPGAGGAGGAGGAAAGAGAAGAGAGGPGGRGEYEELGAVEQHVRYETTGPALCTVVFLLVYFFGMASSIWWVILSLTWFLAAGMKWGNEAIAGYSQYFHLAAWLVPSVKSIAVLALSSVDGDPVAGICYVGNQSLDNLRGFVLAPLVIYLFIGTMFLLAGFVSLFRIRSVIKQQDGPTKTHKLEKLMIRLGLFTVLYTVPAAVVVACLFYEQHNRPRWEATHNCPCLRDLQPDQARRPDYAVFMLKYFMCLVVGITSGVWVWSGKTLESWRSLCTRCCWASKGAAVGGGAGATAAGGGGGPGGGGGGGPGGGGGPGGGGGSLYSDVSTGLTWRSGTASSVSYPKQMPLSQV

SEQ ID NO: 222129 - DNA, 3186 bp, Artificial Sequence
  derived and/or modified sequence
acagcatggagtggggttacctgttggaagtgacctcgctgctggccgccttggcgctgctgcagcgctctagcggcgctgcggccgcctcggccaaggagctggcatgccaagagatcaccgtgccgctgtgtaagggcatcggctacaactacacctacatgcccaatcagttcaaccacgacacgcaagacgaggcgggcctggaggtgcaccagttctggccgctggtggagatccagtgctcgcccgatctcaagttcttcctgtgcagcatgtacacgcccatctgcctagaggactacaagaagccgctgccgccctgccgctcggtgtgcgagcgcgccaaggccggctgcgcgccgctcatgcgccagtacggcttcgcctggcccgaccgcatgcgctgcgaccggctgcccgagcaaggcaaccctgacacgctgtgcatggactacaaccgcaccgacctaaccaccgccgcgcccagcccgccgcgccgcctgccgccgccgccgcccggcgagcagccgccttcgggcagcggccacggccgcccgccgggggccaggcccccgcaccgcggcggcggcaggggcggtggcggcggggacgcggcggcgcccccagctcgcggcggcggcggtggcgggaaggcgcggccccctggcggcggcgcggctccctgcgagcccgggtgccagtgccgcgcgcctatggtgagcgtgtccagcgagcgccacccgctctacaaccgcgtcaagacaggccagatcgctaactgcgcgctgccctgccacaacccctttttcagccaggacgagcgcgccttcaccgtcttctggatcggcctgtggtcggtgctctgcttcgtgtccaccttcgccaccgtctccaccttccttatcgacatggagcgcttcaagtacccggagcggcccattatcttcctctcggcctgctacctcttcgtgtcggtgggctacctagtgcgcctggtggcgggccacgagaaggtggcgtgcagcggtggcgcgccgggcgcggggggcgctgggggcgcgggcggcgcggcggcgggcgcgggcgcggcgggcgcgggcgcgggcggcccgggcgggcgcggcgagtacgaggagctgggcgcggtggagcagcacgtgcgctacgagaccaccggccccgcgctgtgcaccgtggtcttcttgctggtctacttcttcggcatggccagctccatctggtgggtgatcttgtcgctcacatggttcctggcggccggtatgaagtggggcaacgaagccatcgccggctactcgcagtacttccacctggccgcgtggcttgtgcccagcgtcaagtccatcgcggtgctggcgctcagctcggtggacggcgacccggtggcgggcatctgctacgtgggcaaccagagcctggacaacctgcgcggcttcgtgctggcgccgctggtcatctacctcttcatcggcaccatgttcctgctggccggcttcgtgtccctcttccgcatccgctcggtcatcaagcaacaggacggccccaccaagacgcacaagctggagaagctgatgatccgcctgggcctgttcaccgtgctctacaccgtgcccgccgcggtggtggtcgcctgcctcttctacgagcagcacaaccgcccgcgctgggaggccacgcacaactgcccgtgcctgcgggacctgcagcccgaccaggcacgcaggcccgactacgccgtcttcatgctcaagtacttcatgtgcctagtggtgggcatcacctcgggcgtgtgggtctggtccggcaagacgctggagtcctggcgctccctgtgcacccgctgctgctgggccagcaagggcgccgcggtgggcgggggcgcgggcgccacggccgcggggggtggcggcgggccggggggcggcggcggcgggggacccggcggcggcggggggccgggcggcggcgggggctccctctacagcgacgtcagcactggcctgacgtggcggtcgggcacggcgagctccgtgtcttatccaaagcagatgccattgtcccaggtctgagcggaggggagggggcgcccaggaggggtggggaggggggcgaggagagccaagtgcagcgaagggacacttgatgggctgaggttcccaccccttcacagtgttgattgctattagcatgataatgaactcttaatggtatccattagctgggacttaaatgactcacttagaacaaagtacctggcattgaagcctcccagacccagccccttttcctccattgatgtgcggggagctcctcccgccacgcgttaatttctgttggctgaggagggtggactctgcggcgtttccagaacccgagatttggagccctccctggctgcacttggctgggtttgcagtcagatacacagatttcacctgggagaacctctttttctccctcgactcttcctacgtaaactcccacccctgacttaccctggaggaggggtgaccgccacctgatgggattgcacggtttgggtattcttaatgaccaggcaaatgccttaagtaaacaaacaagaaatgtcttaattatacaccccacgtaaatacgggtttcttacattagaggatgtatttatataattatttgttaaattgtaaaaaaaaaagtgtaaaatatgtatatatccaaagatatagtgtgtacatttttttgtaaaaagtttagaggcttacccctgtaagaacagatataagtattctattttgtcaataaaatgacttttgataaatgatttaaccattgccctctcccccgcctcttctgagctgtcacctttaaagtgcttgctaaggacgcatggggaaaatggacattttctggcttgtcattctgtacactgaccttaggcatggagaaaattacttgttaaactctagttcttaagttgttagccaagtaaatatcattgttgaactgaaatcaaaattgagtttttgcaccttccccaaagacggtgtttttcatgggagctcttttctgatccatggataacaactctcactttagtggatgtaaatggaacttctgcaaggcagtaattccccttaggccttgttatttatcctgcatggtatcactaaaggtttcaaaaccctg

SEQ ID NO: 222130 - DNA, 2085 bp, Artificial Sequence
  derived and/or modified sequence
atggaatggggctaccttctggaagttaccagcctcttggccgcactggccttgctgcagaggtctagcggagcagccgccgctagcgccaaggaactcgcatgtcaagaaattactgtgccactgtgcaagggaattggatataattatacatacatgcccaaccagttcaaccacgatacacaggacgaggctggcctagaggttcaccaattctggcctttagtggaaattcagtgtagccccgaccttaagttcttcctgtgcagtatgtacacccctatctgtctggaagactataagaaaccactccctccatgccgctcagtttgcgagcgcgcgaaagccggatgtgcgcccttgatgcgccagtatgggtttgcctggcctgatcggatgcgttgtgatcgcctgcctgagcagggaaacccagacaccctgtgcatggattacaatcgtaccgatctgaccaccgcagctccctcccccccgcgacgtctgccccctcctccaccaggagagcagccgccttccgggtctggacatggccgcccccctggtgccagacctccccacaggggaggtggaaggggcggcggaggaggcgacgcagccgccccgcctgcgcgaggaggcggaggcggggggaaagctcgtcctccgggtggcggcgccgctccatgtgagcctgggtgtcagtgtcgagccccgatggtcagcgtgagctcagagcggcaccctctgtataatcgtgtgaaaactggtcagattgctaactgtgcgctgccatgtcataacccgttttttagccaggatgaacgagcttttacagtcttttggatcggcctctggagcgtgctctgttttgtttccacttttgccaccgtgtccacattcttaattgacatggaacggttcaagtacccagagcgccccatcattttccttagcgcttgttacctctttgtgagcgtgggctaccttgttcgtctggtagctggacacgagaaggttgcgtgcagcggcggtgcacccggggcaggcggtgccggtggcgctggcggggccgcggcgggtgcaggagcagcgggggcaggtgcagggggtcctggtgggcggggagaatacgaggagctgggggccgtagagcagcacgttcgctacgagacaaccggaccagccctctgtaccgttgtgttcctgttggtatacttcttcggtatggcttcatccatctggtgggtaatcctgagcttgacctggttccttgctgccggcatgaaatggggaaacgaagccatagcaggctattcacagtactttcatctagcggcatggttggtcccttcggtcaagtcgattgctgtgttggcactgagtagtgtagacggggatcctgttgccggaatctgttatgtgggaaatcagtccctcgataatctgcgcgggtttgtactggcccctttggttatttatctcttcattggcacgatgtttctcctagccggctttgtatcattgtttcgaatccgttccgtcatcaaacaacaggatggcccaactaagacacacaaattagagaagttaatgattcgattgggcctcttcacagtcctgtatactgtccccgccgccgtggttgttgcctgcttattttatgagcaacataatcggcccagatgggaggccacacacaactgcccttgcttgcgcgacctgcagcctgaccaggccaggcgcccggactatgctgtctttatgcttaaatactttatgtgcctggtggttggaattacaagcggggtgtgggtgtggtcaggcaagacgctagagtcatggcgctcactgtgtacccgctgctgttgggctagcaagggcgccgccgtgggcggaggagccggcgccaccgccgcgggtggggggggagggcccggcggcggaggcggaggcggtcccggaggaggaggcgggccaggaggaggaggcgggtcattatactccgacgtgtcgacagggctcacatggagaagcggaacagctagtagtgtcagctaccctaaacagatgccactatcacaggtgtag

SEQ ID NO: 222131 - DNA, 2085 bp, Artificial Sequence
  derived and/or modified sequence
atggagtggggctacctgctggaggtgaccagcctgctggccgccctggccctgctgcagaggagcagtggagctgctgctgccagcgccaaggagctggcctgccaggagatcaccgtgcccctgtgcaagggcatcggctacaactacacctacatgcccaaccagttcaaccacgacacccaggatgaagctggcctggaggtgcaccagttctggcccctggtggagatccagtgcagcccagacctgaagttcttcctgtgcagcatgtacacccccatctgcctggaggactacaagaagcccctgcccccctgccgctctgtgtgtgagcgggccaaggccggctgtgcccccctgatgaggcagtatggctttgcctggccagacaggatgagatgtgaccggctgcctgagcagggcaacccagacaccctgtgcatggactacaacagaacagacctgaccacagctgcccccagccccccccggcggctgcccccacctcctcctggagagcagccccccagcggcagcggccacggccggcccccaggggcccggcccccccaccggggcggcggccggggcggcggcggcggagatgctgctgcccccccagcccggggcggcggcggcggcggcaaggcccggcccccaggcggcggggccgccccctgtgagcccggctgccagtgccgggcccccatggtgtctgtgtcctctgagcggcaccccctgtacaacagagtgaagacaggccagatcgccaactgtgccctgccctgccacaaccccttcttcagccaggatgagcgggccttcaccgtcttctggattggcctgtggagcgtgctgtgctttgtgtccacctttgccaccgtgtccaccttcctgattgacatggagcgcttcaagtacccagagcggcccatcatcttcctgagcgcctgctacctgtttgtgtctgtgggctacctggtgcggctggtggccggccacgagaaggtggcctgcagcggcggggcccctggagctggaggagctgggggcgccggcggcgctgctgctggggccggggctgctggagctggagctgggggccctgggggccgcggggagtatgaggagctgggcgctgtggagcagcacgtgcgctatgagaccactggacctgccctgtgcaccgtggtgttcctgctggtgtacttcttcggcatggccagcagcatctggtgggtgatcctgagcctgacctggttcctggccgccggcatgaagtggggcaatgaggccatcgccggctacagccagtacttccacctggccgcctggctggtgcccagcgtgaagagcattgctgtgctggccctgagctctgtggatggagaccctgtggccggcatctgctacgtgggcaaccagagcctggacaacctgcggggctttgtgctggcccccctggtgatctacctgttcatcggcaccatgttcctgctggccggctttgtgtccctcttccgcatccgcagcgtcatcaagcagcaggacggccccaccaagacccacaagctggagaagctgatgatccggctgggcctcttcaccgtgctgtacacagtgcctgctgctgtggtggtggcctgcctcttctatgagcagcacaaccggccccgctgggaggccacccacaactgcccctgcctgcgggacctgcagcctgaccaggcccggcggccagactatgctgtgttcatgctgaagtacttcatgtgcctggtggtgggcatcaccagcggcgtgtgggtgtggagcggcaagaccctggagagctggaggagcctgtgcacccgctgctgctgggccagcaaaggagctgctgtgggcggcggggccggggccacagctgctgggggcggcggcggccctgggggcggcggcggcggcggccctgggggcggcggcggccctgggggcggcggcggcagcctgtacagtgatgtgtccacaggcctgacctggaggtctggaacagccagctctgtgtcctaccccaagcagatgcccctgagccaggtgtag

SEQ ID NO: 222132 - DNA, 2085 bp, Artificial Sequence
  derived and/or modified sequence
atggagtggggctacctgctggaggtgaccagcctgctggccgccttggcactactccaacgaagcagcggagctgccgcagcatctgcgaaggagctggcttgtcaagagatcaccgtgcctttgtgtaaagggatcggatataattacacatacatgcctaatcagttcaatcacgacacgcaagatgaggctgggctggaagttcatcagttctggcctctggtcgaaattcagtgcagtcccgatctgaagttttttctctgtagcatgtatactcctatatgcctcgaggattacaagaagccactgcccccctgtaggtccgtctgcgaacgggctaaagctggctgcgctccgttgatgcgacagtacggatttgcttggcctgatcgaatgcgctgcgatcgcctcccagaacaggggaaccccgacaccttgtgcatggattacaaccggactgatctgaccactgcggctcctagtccaccacggcgcctgcctcctcctcctccaggcgagcaaccgccatcagggagcggacacggccggccacctggcgctaggcccccgcatcgtggcggagggcgcgggggggggggaggggacgcggcagccccccctgccaggggtggtggcgggggggggaaggcgcgcccacctggtgggggcgctgccccctgcgaacccggctgccagtgtcgtgccccaatggtgtccgtgtcctccgaaagacaccctctgtacaatcgcgtgaaaaccggccagattgccaattgcgcactcccttgccacaatccgttcttctctcaggacgagcgtgctttcacggtcttttggattgggctctggagtgtattatgctttgttagtacctttgccaccgttagcacttttctgatcgatatggaaaggtttaaataccctgagagacctataatttttctgagcgcttgctacctgtttgtcagtgttggttacctggtgagactggtggctggccacgaaaaagtagcctgttccggaggtgcgcctggcgccggaggagccggcggcgccggtggagcggccgccggggcaggggcggctggagccggagcaggtgggcccggtgggcggggcgagtatgaggaactgggggcggtcgagcagcacgtgaggtacgagactacgggtccagctctctgtacagttgtgttcctgctggtatacttctttgggatggctagttctatctggtgggtgattctttcactgacctggttcctggccgccggcatgaaatggggcaacgaagccattgccggatactcgcagtactttcatctggccgcatggctggtccccagtgtgaaaagtattgctgtgcttgccctgagctcagtagacggagatcccgttgccgggatttgctatgttggaaatcagtccttagataatttaaggggattcgtgctagctcccctcgtcatttacttgtttatcgggaccatgttccttcttgccggcttcgtgtccctctttcggattcgctctgtaattaaacaacaggacggacccaccaagacccacaagctggaaaagttaatgatccgactcggcctcttcaccgtattatacacggttccagccgccgttgtcgtggcatgtcttttttacgagcaacacaacagaccaagatgggaagcgacccacaattgcccatgcctgcgggatctgcaacccgaccaggctaggcgcccagactatgccgtgtttatgctcaaatacttcatgtgtttagtcgtcgggataaccagcggcgtttgggtttggtccgggaagactcttgagtcctggcgctccttatgcacaagatgttgttgggcctcaaaaggagctgctgtgggtgggggcgcaggggctacagctgccggcgggggcggaggccctggcgggggaggcggaggagggccaggaggcggcggaggaccagggggcggtggcggaagcctgtatagtgacgtgagcacaggactgacctggcgaagtggcacggcctccagcgtgagctatcccaagcagatgccattgtcccaggtttag

SEQ ID NO: 222133 - DNA, 2085 bp, Artificial Sequence
  derived and/or modified sequence
atggaatggggatatttgctggaggtcaccagcctgctcgcagctctggccctcttacagcggtcctcgggagcggcagcggcaagcgcgaaggaactggcatgtcaggaaatcacggtgcccctttgtaagggcatcggatataattacacctatatgcctaatcaatttaaccacgatacccaggacgaggcaggacttgaagtccaccagttctggccattagtggaaatacaatgctctccagatctaaaatttttcctttgttcgatgtatacccccatctgccttgaagactacaaaaaacctcttcctccttgcagaagcgtttgcgagcgggcaaaggccggatgtgcacccttgatgcgacagtacgggtttgcttggccagatcgcatgaggtgcgatcgcctgcccgagcaaggcaatccagatactttatgtatggattacaatcggactgacctgacaaccgccgcaccgtcccctcctcggcgactgccccctccccctcccggagaacagccaccttcaggaagcggccacggcagacccccaggagccagaccccctcaccgtggcggaggtcgtggagggggagggggtgatgcagctgctccccctgcaagggggggaggcggagggggaaaagcgcgtccgccagggggaggggctgcaccatgcgaaccagggtgtcagtgcagagcccctatggtgtccgtttctagcgaaagacatcctctctataatcgggtgaaaacaggacaaatcgctaactgtgcgctcccttgccataatcctttcttctcacaggacgagagagccttcaccgtattttggatcggactgtggagtgtactctgctttgtgtccacattcgctacagtgtccactttcctgatagatatggagaggtttaaatatccagagagaccaatcatctttctgtccgcctgttatctgttcgtcagtgtcggttacctggtgcgtctggtagccggtcatgaaaaagtcgcatgctctggcggagcaccaggggcaggcggtgccggaggggctggaggggctgctgccggtgctggagcagctggtgccggagcaggagggcctggcggtcgcggtgaatacgaagagctgggtgcagtggaacagcacgtccggtatgagacaaccggaccagcgctgtgtaccgttgttttcttactggtttatttttttggaatggcatcctccatttggtgggtcatcctgtcacttacttggttcctcgcggcaggcatgaagtgggggaatgaagcaatcgcaggctactctcagtactttcatctcgcagcatggctggtgccatcagtgaaaagtatcgccgttttagctctgagctcagtagatggtgaccctgtcgccggaatttgttatgtgggcaatcagtctttagacaacctaaggggcttcgtattagccccactagtcatctatctgttcattggaaccatgtttctcctggccggatttgtgtctctattcaggatacggtccgtgattaagcaacaggacggcccaactaaaactcacaaattggagaagctgatgatacgactcgggctcttcacggtcctctatacggtgccagctgcagtggtggtagcctgcctgttttacgaacagcacaaccgccctagatgggaggctacacacaactgcccctgcctgcgggatctgcagcctgaccaggctcgacgcccagactacgctgtgttcatgttgaaatatttcatgtgccttgtcgtgggcattacatctggggtctgggtgtggtcgggaaagaccctagaatcctggcggtcactgtgtacgagatgctgttgggcaagtaagggcgctgcagtgggaggtggtgctggtgcaacggccgctgggggtggaggtggacctggcggtgggggaggtggaggacctggcggtggcggaggtccgggaggaggcggtgggagcctgtactctgacgtgtctaccggccttacgtggcgatccggaaccgcctcctcagttagttacccgaaacagatgcctctgtcgcaggtgtag

SEQ ID NO: 222134 - DNA, 2085 bp, Artificial Sequence
  derived and/or modified sequence
atggagtggggctacctgctggaggtgaccagcctgctggccgccctggccctgctgcagagaagcagcggcgccgccgccgccagcgccaaggagctggcctgccaggagatcaccgtgcccctgtgcaagggcatcggctacaactacacctacatgcccaaccagttcaaccacgacacccaggacgaggccggcctggaggtgcaccagttctggcccctggtggagatccagtgcagccccgacctgaagttcttcctgtgcagcatgtacacccccatctgcctggaggactacaagaagcccctgcccccctgcagaagcgtgtgcgagagagccaaggccggctgcgcccccctgatgagacagtacggcttcgcctggcccgacagaatgagatgcgacagactgcccgagcagggcaaccccgacaccctgtgcatggactacaacagaaccgacctgaccaccgccgcccccagcccccccagaagactgcccccccccccccccggcgagcagccccccagcggcagcggccacggcagaccccccggcgccagacccccccacagaggcggcggcagaggcggcggcggcggcgacgccgccgccccccccgccagaggcggcggcggcggcggcaaggccagaccccccggcggcggcgccgccccctgcgagcccggctgccagtgcagagcccccatggtgagcgtgagcagcgagagacaccccctgtacaacagagtgaagaccggccagatcgccaactgcgccctgccctgccacaaccccttcttcagccaggacgagagagccttcaccgtgttctggatcggcctgtggagcgtgctgtgcttcgtgagcaccttcgccaccgtgagcaccttcctgatcgacatggagagattcaagtaccccgagagacccatcatcttcctgagcgcctgctacctgttcgtgagcgtgggctacctggtgagactggtggccggccacgagaaggtggcctgcagcggcggcgcccccggcgccggcggcgccggcggcgccggcggcgccgccgccggcgccggcgccgccggcgccggcgccggcggccccggcggcagaggcgagtacgaggagctgggcgccgtggagcagcacgtgagatacgagaccaccggccccgccctgtgcaccgtggtgttcctgctggtgtacttcttcggcatggccagcagcatctggtgggtgatcctgagcctgacctggttcctggccgccggcatgaagtggggcaacgaggccatcgccggctacagccagtacttccacctggccgcctggctggtgcccagcgtgaagagcatcgccgtgctggccctgagcagcgtggacggcgaccccgtggccggcatctgctacgtgggcaaccagagcctggacaacctgagaggcttcgtgctggcccccctggtgatctacctgttcatcggcaccatgttcctgctggccggcttcgtgagcctgttcagaatcagaagcgtgatcaagcagcaggacggccccaccaagacccacaagctggagaagctgatgatcagactgggcctgttcaccgtgctgtacaccgtgcccgccgccgtggtggtggcctgcctgttctacgagcagcacaacagacccagatgggaggccacccacaactgcccctgcctgagagacctgcagcccgaccaggccagaagacccgactacgccgtgttcatgctgaagtacttcatgtgcctggtggtgggcatcaccagcggcgtgtgggtgtggagcggcaagaccctggagagctggagaagcctgtgcaccagatgctgctgggccagcaagggcgccgccgtgggcggcggcgccggcgccaccgccgccggcggcggcggcggccccggcggcggcggcggcggcggccccggcggcggcggcggccccggcggcggcggcggcagcctgtacagcgacgtgagcaccggcctgacctggagaagcggcaccgccagcagcgtgagctaccccaagcagatgcccctgagccaggtgtag

SEQ ID NO: 222135 - protein, 456 aa, Artificial Sequence
  derived and/or modified sequence
MEPRCPPPCGCCERLVLNVAGLRFETRARTLGRFPDTLLGDPARRGRFYDDARREYFFDRHRPSFDAVLYYYQSGGRLRRPAHVPLDVFLEEVAFYGLGAAALARLREDEGCPVPPERPLPRRAFARQLWLLFEFPESSQAARVLAVVSVLVILVSIVVFCLETLPDFRDDRDGTGLAAAAAAGPFPAPLNGSSQMPGNPPRLPFNDPFFVVETLCICWFSFELLVRLLVCPSKAIFFKNVMNLIDFVAILPYFVALGTELARQRGVGQQAMSLAILRVIRLVRVFRIFKLSRHSKGLQILGQTLRASMRELGLLIFFLFIGVVLFSSAVYFAEVDRVDSHFTSIPESFWWAVVTMTTVGYGDMAPVTVGGKIVGSLCAIAGVLTISLPVPVIVSNFSYFYHRETEGEEAGMFSHVDMQPCGPLEGKANGGLVDGEVPELPPPLWAPPGKHLVTEV

SEQ ID NO: 222136 - DNA, 1371 bp, Artificial Sequence
  derived and/or modified sequence
atggaaccacgctgcccacccccttgtggatgttgcgaacgcctggtgctgaatgtagccgggctcagatttgagacccgtgccagaaccctggggcgctttcccgacactctgctgggggatccagccaggcgcggacgtttctatgacgatgccaggagagagtactttttcgacaggcacagacctagttttgatgccgtcctgtattattaccagtctggcggaagattacgccggcccgcccacgtgccgctggatgtgttccttgaggaagtcgccttctacggtctcggtgccgcagcgctggcccggctacgggaggatgagggttgccccgtgcctccggagcgacctctaccacgccgagcctttgcccgccagctttggctactgttcgagtttccagagtcaagccaagctgcgcgggtcctcgccgttgtgtccgttctcgtgatcctcgttagtatagtggtgttctgtctcgagacactgccggattttcgggacgaccgtgatggtacaggacttgctgcggctgccgctgctggtccgtttcctgcccctctgaatggatcctcacagatgccaggcaatcccccacgcctgccattcaacgatccgtttttcgtggtggagactttatgcatttgctggttcagctttgaactgctggtccggctgcttgtgtgcccatccaaagcgatcttctttaaaaatgtgatgaacttaatagacttcgtagcaattctgccatactttgttgcactcggcacggagctcgctagacagagaggggtgggccaacaggccatgtcactcgcaattctgagggtgattcgcctggttcgcgtgttccggattttcaaactcagcagacactcaaaaggccttcaaatcttaggccagaccctacgcgcctctatgagagagttaggtctattaatcttcttcttatttatcggcgtggtcttgttcagcagcgccgtatactttgctgaagtggaccgggtggattcacattttacgtccatcccagagtcattctggtgggctgtggtgacaatgaccactgtggggtacggggacatggcccccgtgacagttggcggtaagattgtgggtagtctgtgtgcgattgctggcgtgttgactatttcgctgcctgtgcccgtcatcgttagcaatttctcctatttctaccatagagaaaccgagggcgaagaggctggcatgttcagtcatgttgacatgcaaccatgtggccccctggagggcaaggctaatgggggcctagtggatggggaagtgccggaactgcctcctcccctatgggcccccccgggcaagcatctcgtcaccgaggtctag

SEQ ID NO: 222137 - DNA, 1371 bp, Artificial Sequence
  derived and/or modified sequence
atggagccccgctgccccccaccctgtggctgctgtgagcggctggtgctgaatgtggccggcctgcgctttgagacccgggcccggaccctgggccgcttcccagacaccctgctgggggaccctgcccggcggggccgcttctatgatgatgcccggcgggagtacttctttgacagacaccggcccagctttgatgctgtgctgtactactaccagagcggcggccgcctgcggcggcctgcccacgtgcccctggatgtgttcctggaggaggtggccttctacggcctgggcgctgctgccctggcccggctgcgggaggatgagggctgccctgtgcccccagagcggcccctgccccggcgggcctttgcccggcagctgtggctgctgtttgagttccctgagagcagccaggccgcccgggtgctggccgtggtgtctgtgctggtgatcctggtgtccatcgtggtgttctgcctggagaccctgcctgacttcagagatgacagagatggcaccggcctggccgctgctgctgctgctggccccttccctgcccccctgaatggcagcagccagatgcctggcaaccccccccggctgcccttcaatgaccccttctttgtggtggagaccctgtgcatctgctggttctcctttgagctgctggtgcggctgctggtgtgccccagcaaggccatcttcttcaagaatgtgatgaacctgattgactttgtggccatcctgccctactttgtggccctgggcacagagctggcccggcagaggggcgtgggccagcaggccatgagcctggccatcctgcgggtcatccggctggtgcgggtcttccgcatcttcaagctgagccgccacagcaagggcctgcagatcctgggccagaccctgcgggcctccatgagggagctgggcctgctgatcttcttcctgttcatcggcgtggtgctcttcagcagcgctgtgtactttgctgaggtggacagagtggacagccacttcaccagcatccctgagagcttctggtgggccgtggtgaccatgaccaccgtgggctatggagacatggcccctgtgacagtgggcggcaagatcgtgggcagcctgtgtgccatcgccggcgtgctgaccatcagcctgcctgtgcctgtgattgtgagcaacttctcctacttctaccaccgggagacagaaggagaggaggccggcatgttcagccacgtggacatgcagccctgtggccccctggagggcaaggccaatggaggcctggtggatggagaggtgcctgagctgcccccacccctgtgggcccctcctgggaagcacctggtgacagaggtgtag

SEQ ID NO: 222138 - DNA, 1371 bp, Artificial Sequence
  derived and/or modified sequence
atggagccccggtgcccccccccctgcggctgctgcgagcggctggttctaaatgtggcgggactgcgcttcgagacccgggccagaactcttggacgattccctgacaccctcctgggcgatccagcacggcgtggccggttttatgatgacgccagacgcgagtacttcttcgatcggcaccggccttcctttgacgctgtcctgtattactaccagtctgggggccggctccgccgacccgcgcatgtgcccctcgacgtattccttgaagaagtggcattttatgggctgggagctgccgccctggcccgactccgggaggatgagggatgtcccgtgccaccggaacggcctctgcctcggcgagcattcgctcgccagctttggctgctattcgaattccctgagtcctcgcaggccgctcgtgtgctcgctgtggtcagcgtgctcgttatcttggtttccatcgttgtgttctgcctagagaccttgcccgactttcgagacgacagagacggcacaggactcgccgccgccgcagctgccggaccttttccggctcccctcaacggctcctcccagatgcccggaaaccccccgcggctgccatttaatgatccctttttcgtcgtggaaacattatgcatatgttggttttcatttgaattgttagtgaggctgctcgtgtgcccatctaaagccatcttcttcaagaacgttatgaacttgatcgacttcgttgctatcctgccatattttgtcgccctggggaccgagcttgcgaggcagaggggcgtgggccagcaggcaatgagtctcgcaatactccgcgtgatcaggctggtgcgcgtgttcagaatcttcaagctcagccgccactccaaaggactgcagattctgggacagacactacgcgcctctatgagagagcttggattattgatcttttttctctttataggcgtcgtgttgtttagcagtgccgtctattttgccgaagtcgacagggtggacagtcactttacctcaatacccgagagcttctggtgggcagtggtcactatgaccacagtgggctacggggacatggccccagtgaccgtgggagggaaaattgtcggcagcctgtgcgctatagctggtgtcctgactatcagcctgccagtgcctgtaattgtgtccaattttagttacttctatcaccgagaaacagagggtgaggaagctggaatgtttagccacgttgacatgcagccctgtggccctctcgaaggcaaagctaatggagggctggttgacggtgaagtgccggaactcccgcctccactgtgggcaccacccggcaaacatcttgtgacagaggtatag

SEQ ID NO: 222139 - DNA, 1371 bp, Artificial Sequence
  derived and/or modified sequence
atggaacctcgatgcccaccaccatgtggttgctgtgagcgcctcgttctcaatgtagctgggctgcgattcgaaacccgcgcaaggacactcgggaggtttcccgatactctgctaggcgatcccgctcgacggggtagattctatgacgacgccaggcgcgaatactttttcgaccgccacagaccctctttcgatgctgttttatattactaccaaagtggaggccgactgaggaggccagcacatgtacctttggacgtttttctcgaagaagtagcattttatggactgggggctgcagcactggctcgactcagggaagatgagggatgccctgtacctcccgaacgcccactgccccgtagagcatttgcgcgacagctgtggctcctatttgagtttccagagagtagccaagcagctcgcgttctggctgtcgtgtcagtgctggtaatcttggtgtcgatagtagtcttttgtctcgaaacattgccagatttccgcgatgaccgcgacggaacaggactggccgcagcggctgcggctgggccattccccgctccactcaatgggtcatcacagatgcctggcaacccacctcggctgcctttcaacgatccatttttcgtggtggagaccctgtgtatctgttggtttagcttcgaactgctggtcaggctgctggtatgccctagtaaggcgatctttttcaaaaatgtcatgaacttgatagacttcgtagcaatacttccatatttcgtcgctctggggacagaacttgcacgacagcgcggtgtgggacagcaggctatgtctcttgcaattctgagggtgatacgtcttgttcgggtgtttaggattttcaaattaagccggcattctaagggcctccagattctagggcagacactgcgcgcatctatgagggaacttggactgttaatatttttcctttttatcggagtggtcctattctccagcgcagtgtacttcgctgaggttgatcgggtggatagtcactttacctccattcctgaaagcttctggtgggccgtggttaccatgactaccgtaggttatggagatatggcccctgttacagtgggtgggaagatcgtgggcagtttgtgcgccattgctggtgtgctgacaatctccttgcctgttccagtcatcgtgagtaattttagctacttttaccacagagaaacagaaggggaggaggccggaatgtttagtcacgttgatatgcaaccctgcggacccctggaggggaaagctaatgggggattggtcgatggcgaagtgccagaactgcctcctcctctgtgggcccctccgggtaagcatctggttaccgaagtctag

SEQ ID NO: 222140 - DNA, 1371 bp, Artificial Sequence
  derived and/or modified sequence
atggagcccagatgcccccccccctgcggctgctgcgagagactggtgctgaacgtggccggcctgagattcgagaccagagccagaaccctgggcagattccccgacaccctgctgggcgaccccgccagaagaggcagattctacgacgacgccagaagagagtacttcttcgacagacacagacccagcttcgacgccgtgctgtactactaccagagcggcggcagactgagaagacccgcccacgtgcccctggacgtgttcctggaggaggtggccttctacggcctgggcgccgccgccctggccagactgagagaggacgagggctgccccgtgccccccgagagacccctgcccagaagagccttcgccagacagctgtggctgctgttcgagttccccgagagcagccaggccgccagagtgctggccgtggtgagcgtgctggtgatcctggtgagcatcgtggtgttctgcctggagaccctgcccgacttcagagacgacagagacggcaccggcctggccgccgccgccgccgccggccccttccccgcccccctgaacggcagcagccagatgcccggcaacccccccagactgcccttcaacgaccccttcttcgtggtggagaccctgtgcatctgctggttcagcttcgagctgctggtgagactgctggtgtgccccagcaaggccatcttcttcaagaacgtgatgaacctgatcgacttcgtggccatcctgccctacttcgtggccctgggcaccgagctggccagacagagaggcgtgggccagcaggccatgagcctggccatcctgagagtgatcagactggtgagagtgttcagaatcttcaagctgagcagacacagcaagggcctgcagatcctgggccagaccctgagagccagcatgagagagctgggcctgctgatcttcttcctgttcatcggcgtggtgctgttcagcagcgccgtgtacttcgccgaggtggacagagtggacagccacttcaccagcatccccgagagcttctggtgggccgtggtgaccatgaccaccgtgggctacggcgacatggcccccgtgaccgtgggcggcaagatcgtgggcagcctgtgcgccatcgccggcgtgctgaccatcagcctgcccgtgcccgtgatcgtgagcaacttcagctacttctaccacagagagaccgagggcgaggaggccggcatgttcagccacgtggacatgcagccctgcggccccctggagggcaaggccaacggcggcctggtggacggcgaggtgcccgagctgcccccccccctgtgggccccccccggcaagcacctggtgaccgaggtgtag

SEQ ID NO: 222141 - DNA, 4372 bp, Artificial Sequence
  derived and/or modified sequence
aaacttggagagacgcaggacaggatcccggcggcagaaggacggagagaaaggggaccccgggacgggaaaggcgcagagcaggcgcgggcggcggcggcggcggggcagggcagggcgggcgtcccggcagagggcgcgcggtcgccctgtcgccctccgccccgccggggtcacagtgccccctccctcgcgccctagccgccctgccgggctatttttacgcgcggacaccggacaccggacaccgggctggggcggcggcggcggcggccgaggcggccgaggcggggccgcaccggggccgggcgtcggggccacacgtcggttcgcgggtcgccggggctgcgcgcgccatggagccgcggtgcccgccgccgtgcggctgctgcgagcggctggtgctcaacgtggccgggctgcgcttcgagacgcgggcgcgcacgctgggccgcttcccggacactctgctaggggacccagcgcgccgcggccgcttctacgacgacgcgcgccgcgagtatttcttcgaccggcaccggcccagcttcgacgccgtgctctactactaccagtccggtgggcggctgcggcggccggcgcacgtgccgctcgacgtcttcctggaagaggtggccttctacgggctgggcgcggcggccctggcacgcctgcgcgaggacgagggctgcccggtgccgcccgagcgccccctgccccgccgcgccttcgcccgccagctgtggctgcttttcgagtttcccgagagctctcaggccgcgcgcgtgctcgccgtagtctccgtgctggtcatcctcgtctccatcgtcgtcttctgcctcgagacgctgcctgacttccgcgacgaccgcgacggcacggggcttgctgctgcagccgcagccggcccgttccccgctccgctgaatggctccagccaaatgcctggaaatccaccccgcctgcccttcaatgacccgttcttcgtggtggagacgctgtgtatttgttggttctcctttgagctgctggtacgcctcctggtctgtccaagcaaggctatcttcttcaagaacgtgatgaacctcatcgattttgtggctatccttccctactttgtggcactgggcaccgagctggcccggcagcgaggggtgggccagcaggccatgtcactggccatcctgagagtcatccgattggtgcgtgtcttccgcatcttcaagctgtcccggcactcaaagggcctgcaaatcttgggccagacgcttcgggcctccatgcgtgagctgggcctcctcatctttttcctcttcatcggtgtggtcctcttttccagcgccgtctactttgccgaagttgaccgggtggactcccatttcactagcatccctgagtccttctggtgggcggtagtcaccatgactacagttggctatggagacatggcacccgtcactgtgggtggcaagatagtgggctctctgtgtgccattgcgggcgtgctgactatttccctgccagtgcccgtcattgtctccaatttcagctacttttatcaccgggagacagagggcgaagaggctgggatgttcagccatgtggacatgcagccttgtggcccactggagggcaaggccaatggggggctggtggacggggaggtacctgagctaccacctccactctgggcacccccagggaaacacctggtcaccgaagtgtgaggaacagttgaggtctgcaggacctcacacctccctagagggagggagggagggcagggtggagggcaaggctggggggaggggattgggtttaggaagagctaggttaagtcgtaacgagtggggaaacactgagtcttgttgggtcttgggttgtgtggtttggtagctcctgtgggtacctcctgaagcagcagcgaatggcaatgggttgtgttgtgttaatgaagactcaattggttcatattactctgagttgtgcaaagctcatggagccttttggggtagtgttgagataggtttggtcgtatcattttgtgagtttcctaggtcagtgttgggtttggttgggttgtgagtctgggatagtgtggtccagctgcattgtgtaggattctgtggtttggtgggtcccctagggccatgttgggtcaagttagatggtcccccatggcattgttgagatcgaatgtgtgtggtgttaagtttcgttgagacatggtggaaattgtgtagctctgtgattcttccaggggcatgttattttaggttctgtgaacttgcgagtcatgtagaaatgtgaagagtccagtggtagaatttgagctttctaggtcacattgggttaagtttgtatgaccaaatgaatcttgtagggttctgttgggcttaactgtgtagaggtgtgtggctggacatttttcgtggccacagcgagttgagttgtgttgaattgtacaaccatatgagccttgtaaggccagttcagttgggtcatgccactgtttgagtctcatagggccatgctgaattgagttccattgagttgtgtcactatgtgagtcctacaggaagttgggttgagttggactgtgcgaacgagttccatagggccacatcgggctgttttgcatttagtggtagcaccaggacccaaaggaaatagcagtggggaagcatcatgtatctgggagcatgcagtggcgagggctctgggaggtgtgccgagctggctccccagctcgctgtagggggcgggactggattctgtatccatgggattgggtgttcatccagaggcgactgggtaaattaggaagaggtggatgctcctcctgtttaccccacatccacttcattgtgctgttcactcccattctcccctacagttttatgctcagacatggaggtcagagccacaagggaaaggggagagggggagaaaactgtactctgtccagacatgatagagggacagagccaaaaggatagagaaagagacccagaaaaaggaagaggtggaaacccagagagacagagacccaaagggagagaaacagagactcagggagagggagacaatgacctggagggtggggtatggcagagacgcagaagagaggaacagaaatccagagtggggagacagagaccaagagcaggggatagaagccgggcgaagtggcccatgcctgtaatctcagcactctgggagaccgaggaagggggattgattgaggccaggagttcaagaccagcctgggcaacatggtgagaccccatctctacaaaaaatacaaaaattagctgagtgtggtggcacatgcctgtgatcccagctactcaggaagctgaggcagaaagatcccttgaccctgagaggtagaggctgcattgagccatgattgcaccactgcactccagcctgggcaacagagggagcccccgtctcaacaaacaaacaaaaagagccagtgggggagggagggacagagacccagagggcagcgtcagacacccagagttggagacagaacaacagagtctcagggaaagagaaccacaatagaaaaaggcagaaaaggccgggcgcggtggctcatgcctgtaaccccagcactttgggaggccgaggtgggcaaattacgaggtcaggagatccagaccatcctggctaacacggtgaaaccccgtctctactaaaaatacaaaaaaattagccgggtgcggtggcgggcacctgtagtcccagctactcgggaggctgaggcaggagaatggcatgaacctgggaggcggagcttgcagtgagccgagattgcgccactgcactccagcctgggcagcagagcaacactctgtctcaaaaaaaaaaagaaaagaaaagaaaaagccagaaaaagttggtgcccctgaacccaagagtgatgtacagtctattccatagaatcacagaacaatcctgaaccaggcctgtcacctaccctccctgcagctcaggaaggctgtcagacaggctgggggcctcactctgttttccaggggagaaacctgagtctcagagcaggggagtggcttcccaaggtctcacagcttgtccccaggggccaggcaggctgtctgtctgcttcacatgtccccatcagcctgctgggacacacgggtcctcctgagtcccgtagcctcatttcttacagacggggaaactgaggctcagagcagcaggtgttacccaaggtcacaaggccgaacattttcagaaatctttcagaactcaaagggcatttagaggaagaaggctgaaatcactaacacatatagggcttcctttggtatcaaagtactttacttgggttaatttatta

SEQ ID NO: 222142 - protein, 1142 aa, Artificial Sequence
  derived and/or modified sequence
MLVLRCRLGTSFPKLDNLVPKGKMKILLVFLGLLGNSVAMPMHMPRMPGFSSKSEEMMRYNQFNFMNGPHMAHLGPFFGNGLPQQFPQYQMPMWPQPPPNTWHPRKSSAPKRHNKTDQTQETQKPNQTQSKKPPQKRPLKQPSHNQPQPEEEAQPPQAFPPFGNGLFPYQQPPWQIPQRLPPPGYGRPPISNEEGGNPYFGYFGYHGFGGRPPYYSEEMFEQDFEKPKEEDPPKAESPGTEPTANSTVTETNSTQPNPKGSQGGNDTSPTGNSTPGLNTGNNPPAQNGIGPLPAVNASGQGGPGSQIPWRPSQPNIRENHPYPNIRNFPSGRQWYFTGTVMGHRQNRPFYRNQQVQRGPRWNFFAWERKQVARPGNPVYHKAYPPTSRGNYPNYAGNPANLRRKPQGPNKHPVGTTVAPLGPKPGPVVRNEKIQNPKEKPLGPKEQIIVPTKNPTSPWRNSQQYEVNKSNYKLPHSEGYMPVPNFNSVDQHENSYYPRGDSRKVPNSDGQTQSQNLPKGIVLGSRRMPYESETNQSELKHSSYQPAVYPEEIPSPAKEHFPAGRNTWDHQEISPPFKEDPGRQEEHLPHPSHGSRGSVFYPEYNPYDPRENSPYLRGNTWDERDDSPNTMGQKESPLYPINTPDQKEIVPYNEEDPVDPTGDEVFPGQNRWGEELSFKGGPTVRHYEGEQYTSNQPKEYLPYSLDNPSKPREDFYYSEFYPWSPDENFPSYNTASTMPPPIESRGYYVNNAAGPEESTLFPSRNSWDHRIQAQGQRERRPYFNRNIWDQATHLQKAPARPPDQKGNQPYYSNTPAGLQKNPIWHEGENLNYGMQITRMNSPEREHSSFPNFIPPSYPSGQKEAHLFHLSQRGSCCAGSSTGPKDNPLALQDYTPSYGLAPGENQDTSPLYTDGSHTKQTRDIISPTSILPGQRNSSEKRESQNPFRDDVSTLRRNTPCSIKNQLGQKEIMPFPEASSLQSKNTPCLKNDLGGDGNNILEQVFEDNQLNERTVDLTPEQLVIGTPDEGSNPEGIQSQVQENESERQQQRPSNILHLPCFGSKLAKHHSSTTGTPSSDGRQSPFDGDSITPTENPNTLVELATEEQFKSINVDPLDADEHSPFEFLQRGTNVQDQVQDCLLLQA

SEQ ID NO: 222143 - DNA, 3572 bp, Artificial Sequence
  derived and/or modified sequence
gggaaataagagagaaaagaagagtaagaagaaatataagagccaccatgttggtacttagatgccgactcggaacgtcgtttccgaagcttgataacctggtccccaaagggaagatgaagattttgctcgtgtttctcggcttgcttggaaactccgtagccatgcccatgcacatgccgagaatgcccggattttcgtcaaaatcggaagagatgatgcggtacaaccagttcaactttatgaatgggccgcatatggcgcacttgggcccctttttcgggaatggactgcctcagcagttccctcagtatcaaatgcccatgtggccccagcccccacctaatacatggcacccgcggaagtcatccgcgcctaagagacacaataagacggaccagacccaagaaacgcagaagccgaatcagacccagagcaagaaaccaccgcagaagcgacccctcaagcagccatcccataatcagccgcaaccagaagaagaggctcagccaccacaggcatttccgccctttggcaatgggctctttccgtatcaacaaccgccgtggcagatccctcaacggcttccaccaccgggatatggtagaccacccatctcaaacgaagagggtggaaacccctatttcggctacttcgggtaccatgggtttggcggaaggccaccgtattactcggaagaaatgttcgagcaggactttgaaaagcccaaagaagaggacccacctaaggccgaatcccctggtactgagcccacagcgaactcaacggtgacggagacaaattcaactcaacctaacccgaaagggagccagggcggcaacgatacatcgccgacgggtaatagcacgccagggcttaacactggtaataacccaccggcgcaaaacggtatcggacctcttcccgcggtcaacgcgtcgggacaaggtggtccggggtcgcagattccatggaggcccagccagccaaatatcagggagaaccacccgtacccgaacattcgcaactttccctcgggacggcagtggtacttcaccggaacagtgatgggacatcgccaaaataggccattttaccgcaatcagcaggtgcagagaggaccacgctggaacttcttcgcgtgggagcgaaaacaggtcgcgaggccgggaaaccctgtataccacaaagcatacccacccacttcgcggggaaactaccccaactacgccgggaaccccgctaacttgcgccgaaagccccagggtcccaacaagcacccggtggggactaccgtagcgccgctcgggccgaagcctggtccggtggtgcggaacgagaaaatccagaatccgaaagagaagccccttggacccaaagagcagatcatcgtgcccactaagaaccccacatcgccctggcgcaactcccaacagtatgaggtgaataagtcaaactacaagctgccccattcagaaggctacatgccggtgccgaacttcaatagcgtagaccagcacgagaactcgtattaccctcggggagactcccggaaggtcccaaattcggacggacagacgcaaagccaaaatctgcccaagggaattgtcctcggttcgcgaaggatgccgtacgagtccgagacaaaccagtcggagcttaaacactcatcctatcaacccgccgtctaccccgaagagattccgtcaccagcgaaagaacacttcccagcagggagaaacacttgggaccaccaagaaatttcaccacccttcaaagaggatcccggacgccaggaagagcatcttccgcacccgagccatggatcgcgagggtcggtgttctaccctgagtacaacccgtatgaccctcgggagaacagcccctatcttaggggtaacacgtgggacgagcgggacgatagcccaaacacaatgggacagaaagagtcgccgttgtatcccatcaacacaccagaccagaaagagatcgtgccgtacaacgaagaagatcccgtcgacccgacgggggatgaagtatttcccgggcagaacaggtggggcgaagagttgtcgtttaaagggggacctaccgtgcggcactatgagggagagcagtacacatcgaatcagccaaaagagtatctcccctattcgctcgataatccgtcgaaaccgagggaagatttctattactcagagttctatccctggtcgcccgacgaaaactttccatcatataacacggcgagcaccatgccaccgcccattgagagcagggggtactatgtgaacaacgcagcgggtccggaagaaagcactctcttcccctcacgcaatagctgggatcatagaattcaggcccagggccagcgggaacggcgaccttactttaacagaaacatctgggaccaggcgacgcatttgcaaaaggctcccgctcggccacccgatcagaaggggaaccagccctactactcgaacacgccagcagggctccagaagaatcctatctggcacgagggggaaaacttgaattatggaatgcagatcacacggatgaattcgcccgaacgggaacactcgtccttccccaactttatcccaccttcgtatccgtcggggcagaaagaggcacacttgtttcatcttagccagcgcggatcgtgctgcgcgggatcgtccacgggaccgaaggacaatccgctcgcccttcaagactataccccttcgtacgggttggcaccgggagaaaaccaggacacatcacccctgtacactgatggttcccacactaaacagactcgcgacattatcagccccacatcaattctccctggccagagaaatagctcagaaaagagagagagccagaacccctttagggatgatgtgtcgacgcttcgccgaaataccccctgttcgatcaagaaccagcttggtcaaaaagagatcatgccgttccccgaggcctcaagcctgcagtcaaagaatacaccctgtctgaagaatgacctcgggggtgacgggaataacattctggaacaggtatttgaggataatcagctcaacgaaaggacggtggatctcactcccgagcaactggtcattggtacgccggacgaggggagcaatcccgaaggtatccaatcgcaggtacaggaaaatgagtcagagcggcagcagcagaggccgtcgaatatcttgcaccttccatgtttcggatcaaaactggcaaaacatcattcatcaacaactggtactccgtcgtcagacggtaggcagtcccccttcgatggagactccatcacgcctacggagaatcccaacacgctggtcgagctggcgactgaagagcagttcaagtccatcaatgtggatccgcttgatgcggatgagcactccccgttcgaatttctccagcggggtactaatgtacaagatcaggtccaagattgccttctcttgcaagcctgataagctgccttctgcggggcttgccttctggccatgcccttcttctctcccttgcacctgtacctcttggtctttgaataaagcctgagtaggaag

SEQ ID NO: 222144 - DNA, 3429 bp, Artificial Sequence
  derived and/or modified sequence
atgctggtgctgagatgcagactgggcaccagcttccccaagctggacaacctggtgcccaagggcaagatgaagatcctgctggtgttcctgggcctgctgggcaacagcgtggccatgcccatgcacatgcccagaatgcccggcttcagcagcaagagcgaggagatgatgagatacaaccagttcaacttcatgaacggcccccacatggcccacctgggccccttcttcggcaacggcctgccccagcagttcccccagtaccagatgcccatgtggccccagcccccccccaacacctggcaccccagaaagagcagcgcccccaagagacacaacaagaccgaccagacccaggagacccagaagcccaaccagacccagagcaagaagcccccccagaagagacccctgaagcagcccagccacaaccagccccagcccgaggaggaggcccagcccccccaggccttcccccccttcggcaacggcctgttcccctaccagcagcccccctggcagatcccccagagactgcccccccccggctacggcagaccccccatcagcaacgaggagggcggcaacccctacttcggctacttcggctaccacggcttcggcggcagacccccctactacagcgaggagatgttcgagcaggacttcgagaagcccaaggaggaggacccccccaaggccgagagccccggcaccgagcccaccgccaacagcaccgtgaccgagaccaacagcacccagcccaaccccaagggcagccagggcggcaacgacaccagccccaccggcaacagcacccccggcctgaacaccggcaacaacccccccgcccagaacggcatcggccccctgcccgccgtgaacgccagcggccagggcggccccggcagccagatcccctggagacccagccagcccaacatcagagagaaccacccctaccccaacatcagaaacttccccagcggcagacagtggtacttcaccggcaccgtgatgggccacagacagaacagacccttctacagaaaccagcaggtgcagagaggccccagatggaacttcttcgcctgggagagaaagcaggtggccagacccggcaaccccgtgtaccacaaggcctacccccccaccagcagaggcaactaccccaactacgccggcaaccccgccaacctgagaagaaagccccagggccccaacaagcaccccgtgggcaccaccgtggcccccctgggccccaagcccggccccgtggtgagaaacgagaagatccagaaccccaaggagaagcccctgggccccaaggagcagatcatcgtgcccaccaagaaccccaccagcccctggagaaacagccagcagtacgaggtgaacaagagcaactacaagctgccccacagcgagggctacatgcccgtgcccaacttcaacagcgtggaccagcacgagaacagctactaccccagaggcgacagcagaaaggtgcccaacagcgacggccagacccagagccagaacctgcccaagggcatcgtgctgggcagcagaagaatgccctacgagagcgagaccaaccagagcgagctgaagcacagcagctaccagcccgccgtgtaccccgaggagatccccagccccgccaaggagcacttccccgccggcagaaacacctgggaccaccaggagatcagcccccccttcaaggaggaccccggcagacaggaggagcacctgccccaccccagccacggcagcagaggcagcgtgttctaccccgagtacaacccctacgaccccagagagaacagcccctacctgagaggcaacacctgggacgagagagacgacagccccaacaccatgggccagaaggagagccccctgtaccccatcaacacccccgaccagaaggagatcgtgccctacaacgaggaggaccccgtggaccccaccggcgacgaggtgttccccggccagaacagatggggcgaggagctgagcttcaagggcggccccaccgtgagacactacgagggcgagcagtacaccagcaaccagcccaaggagtacctgccctacagcctggacaaccccagcaagcccagagaggacttctactacagcgagttctacccctggagccccgacgagaacttccccagctacaacaccgccagcaccatgcccccccccatcgagagcagaggctactacgtgaacaacgccgccggccccgaggagagcaccctgttccccagcagaaacagctgggaccacagaatccaggcccagggccagagagagagaagaccctacttcaacagaaacatctgggaccaggccacccacctgcagaaggcccccgccagaccccccgaccagaagggcaaccagccctactacagcaacacccccgccggcctgcagaagaaccccatctggcacgagggcgagaacctgaactacggcatgcagatcaccagaatgaacagccccgagagagagcacagcagcttccccaacttcatcccccccagctaccccagcggccagaaggaggcccacctgttccacctgagccagagaggcagctgctgcgccggcagcagcaccggccccaaggacaaccccctggccctgcaggactacacccccagctacggcctggcccccggcgagaaccaggacaccagccccctgtacaccgacggcagccacaccaagcagaccagagacatcatcagccccaccagcatcctgcccggccagagaaacagcagcgagaagagagagagccagaaccccttcagagacgacgtgagcaccctgagaagaaacaccccctgcagcatcaagaaccagctgggccagaaggagatcatgcccttccccgaggccagcagcctgcagagcaagaacaccccctgcctgaagaacgacctgggcggcgacggcaacaacatcctggagcaggtgttcgaggacaaccagctgaacgagagaaccgtggacctgacccccgagcagctggtgatcggcacccccgacgagggcagcaaccccgagggcatccagagccaggtgcaggagaacgagagcgagagacagcagcagagacccagcaacatcctgcacctgccctgcttcggcagcaagctggccaagcaccacagcagcaccaccggcacccccagcagcgacggcagacagagccccttcgacggcgacagcatcacccccaccgagaaccccaacaccctggtggagctggccaccgaggagcagttcaagagcatcaacgtggaccccctggacgccgacgagcacagccccttcgagttcctgcagagaggcaccaacgtgcaggaccaggtgcaggactgcctgctgctgcaggcctag

SEQ ID NO: 222145 - DNA, 3429 bp, Artificial Sequence
  derived and/or modified sequence
atgttagtgctccggtgccggctaggaacatcgttccctaagctggacaatttagtgcccaagggaaagatgaagattctcctcgtgtttctgggcctactgggcaacagcgttgccatgcctatgcacatgccacggatgccgggtttcagttccaaatcagaggaaatgatgcgatataaccagtttaactttatgaacggcccacatatggcccatctgggccccttttttgggaatgggctacctcagcaattcccccagtatcagatgcccatgtggcctcaacccccacctaacacatggcaccctcgtaagagttcggcacccaagcggcataacaagactgaccaaacccaggaaactcaaaagcccaaccagacacagtccaaaaaacccccacagaaaagacccctgaagcagccgagtcacaaccagccccaaccagaggaggaagctcaaccaccccaggccttcccccctttcggcaatggattgttcccataccaacaacccccttggcagataccacaacgtttacctcctcccgggtacggccggccccccatctccaacgaggaggggggaaatccttacttcggctatttcggatatcacgggtttggtggtcgccccccctactacagcgaggagatgttcgagcaggattttgagaagcccaaggaagaggaccctccaaaagctgaatcccctggcaccgagcccacggccaacagcacggtcactgaaaccaacagcacacaacccaatcctaaagggtctcaaggcgggaacgatacttcacccacggggaacagcacgcctggcctcaacactggcaataaccccccagcccagaacgggattggtccacttcctgccgtgaacgcctcggggcagggagggccgggcagccagattccctggcgccctagtcagccgaatatccgagagaaccatccctatcccaatataaggaactttccatccggtcggcagtggtattttacaggtaccgtcatggggcaccgccagaatagaccattctacaggaaccagcaggttcagagaggtccccgttggaacttttttgcctgggaacggaagcaggtagccagacctggaaacccagtttaccacaaagcatacccgcccaccagtcgaggcaactaccctaattacgcaggcaatccagcaaatttgcgcagaaagcctcagggccccaacaagcaccctgttggcacaaccgttgccccccttggtccaaagcccggtcctgtcgtcagaaatgagaaaatacagaacccgaaggaaaaacccctgggcccaaaagagcagatcatcgtgcccaccaagaatcccacttctccttggcggaactcccagcagtacgaggtgaataaatctaattataagttacctcactctgagggctacatgcctgtgccaaacttcaactccgtggatcagcacgaaaactcatattacccaaggggcgactcgcgtaaagttcccaactctgacgggcagacccaatcccagaatttgccaaaaggtatcgttctgggctctcgaaggatgccatacgagtccgagaccaatcagagcgagttgaagcattccagctatcagccagctgtgtatcccgaggaaatcccatcccccgctaaggaacactttccagccgggcgtaacacatgggatcaccaggaaataagcccgcctttcaaagaggaccctggccgtcaggaggagcatctgccacatcccagccacggatcccgcgggtcagtgttttatccagagtacaacccttatgatccaagagaaaactccccttatctgcgcggaaacacttgggatgagagggatgacagtcctaataccatgggtcaaaaggagtcacccctgtaccctattaacacccccgaccagaaggaaatcgtgccatataatgaagaggacccagtggatccgaccggagatgaggtgtttcctgggcagaataggtggggtgaagagctctccttcaagggtggccctactgtgcgacattatgaaggcgagcagtacacctcgaatcagcctaaagagtacctgccctactcattggataatccctctaagcccagagaagatttttactattccgagttttacccttggagtcccgacgagaattttccgagctacaacaccgcatcaaccatgcccccacctatcgagtctagaggctactatgtgaacaatgccgccggtccggaggagagtacactgtttccatcccggaactcctgggaccatcgcattcaggctcagggccagcgggaaagaaggccctacttcaataggaatatatgggatcaggcgactcatcttcagaaggcccccgcccggcctcctgaccagaaggggaaccagccatactattccaacactcccgccggcctgcagaagaatcctatttggcatgaaggcgagaatttaaattacggaatgcaaattaccaggatgaactccccagaaagggagcactcctcctttccaaattttattcccccaagctatccaagtggacagaaagaagcccatttgtttcatctatcacagcggggttcttgctgtgcgggtagcagcactggccctaaggataacccactggcgcttcaggattatacgccctcctacggactggctcctggtgaaaaccaggatacctccccactgtatacagacggaagtcatactaagcagactcgggacatcattagcccaacatccatactccccggacagaggaacagcagtgagaagagagagtcccagaacccctttcgagacgacgtaagcacgctgcgacgaaatacaccctgttctattaaaaatcaattggggcagaaagaaatcatgcccttccctgaggcttctagcctccagagcaagaatacaccatgtctgaagaatgacctgggcggcgatggcaataatatccttgaacaggtgttcgaagacaatcagctgaatgagaggaccgtagacctcacacccgaacagctggtgataggtacgcccgacgaaggatccaaccccgaggggatacaaagccaagtgcaggaaaacgagtccgagaggcagcaacagcgaccatccaatatacttcatttgccttgtttcgggagtaagctagcaaagcaccactcctccaccacgggcactcccagctccgatggtaggcagtcccctttcgacggcgactctataacaccaaccgagaaccccaacaccctggtcgagctagctacagaggagcaattcaagtctataaacgtggaccctttggatgctgacgagcactccccttttgagttcttacagcgaggtacaaacgtccaggaccaggtgcaagactgcctcttattgcaggcctag

SEQ ID NO: 222146 - DNA, 3429 bp, Artificial Sequence
  derived and/or modified sequence
atgctggtgctgcgctgccgcctgggcaccagcttccccaagctggacaacctggtgcccaagggcaagatgaagatcctgctggtgttcctgggcctgctgggcaacagcgtggccatgcccatgcacatgcccaggatgcctggcttcagcagcaagtctgaggagatgatgagatacaaccagttcaacttcatgaatggcccccacatggcccacctgggccccttctttggaaatggcctgccccagcagttcccccagtaccagatgcccatgtggccccagcccccacccaacacctggcaccccaggaagagcagcgcccccaagaggcacaacaagacagaccagacccaggagacccagaagcccaaccagacccagagcaagaagccaccccagaagaggcccctgaagcagcccagccacaaccagccccagcctgaggaggaggcccagcccccccaggccttccccccatttggaaatggcctcttcccctaccagcagcccccctggcagatcccccagaggctgcccccacctggctacggccggccccccatcagcaatgaggagggcggcaacccctacttcggctacttcggctaccacggctttggaggccggcccccctactacagcgaggagatgtttgagcaggactttgagaagcccaaggaggaggacccccccaaggccgagagccctggaacagagcccacagccaacagcacagtgacagagaccaacagcacccagcccaaccccaagggcagccagggcggcaatgacaccagccccaccggcaacagcaccccaggcctgaacacaggcaacaaccccccagcccagaatggaattggccccctgcctgctgtgaatgccagcggccagggcggccctggcagccagatcccctggaggcccagccagcccaacatccgggagaaccacccctaccccaacatccggaacttccccagcggccggcagtggtacttcaccggcaccgtgatgggccaccggcagaaccggcccttctacagaaaccagcaggtgcagaggggcccccgctggaacttctttgcctgggagaggaagcaggtggcccggcccggcaaccctgtgtaccacaaggcctacccacccaccagccggggcaactaccccaactatgccggcaacccagccaacctgcggaggaagccccagggccccaacaagcaccctgtgggcaccaccgtggcccccctgggccccaagccaggccctgtggtgagaaatgagaagatccagaaccccaaggagaagcccctgggccccaaggagcagatcatcgtgcccaccaagaaccccaccagcccctggaggaacagccagcagtatgaggtgaacaagagcaactacaagctgccccacagcgagggctacatgcctgtgcccaacttcaacagcgtggaccagcacgagaacagctactaccccaggggggacagcaggaaggtgcccaacagtgatggccagacccagagccagaacctgcccaagggcatcgtgctgggcagcaggaggatgccctatgaaagtgagaccaaccagagcgagctgaagcacagcagctaccagcctgctgtgtacccagaggagatccccagccctgccaaggagcacttccctgctggcaggaacacctgggaccaccaggagatcagcccccccttcaaggaggaccccggccggcaggaggagcacctgccccaccccagccacggcagccggggctctgtgttctacccagagtacaacccctatgacccccgggagaacagcccctacctgcggggcaacacctgggatgaaagagatgacagccccaacaccatgggccagaaggagagccccctgtaccccatcaacaccccagaccagaaggagatcgtgccctacaatgaggaggaccctgtggaccccactggagatgaggtgtttcctggccagaaccgctggggcgaggagctgtccttcaagggcggccccaccgtgcgccactatgaaggagagcagtacaccagcaaccagcccaaggagtacctgccctacagcctggacaaccccagcaagccccgggaggacttctactacagcgagttctacccctggagcccagatgagaacttccccagctacaacacagccagcaccatgcccccacccatcgagagccggggctactacgtgaacaatgctgctggccctgaggagagcaccctcttccccagcagaaattcctgggaccaccgcatccaggcccagggccagcgggagcggcggccctacttcaacagaaacatctgggaccaggccacccacctgcagaaggccccagcccggcccccagaccagaagggcaaccagccctactacagcaacaccccagctggcctgcagaagaaccccatctggcatgaaggagagaacctgaactacggcatgcagatcaccaggatgaacagccctgagcgggagcacagcagcttccccaacttcatccccccatcctaccccagcggccagaaggaggcccacctgttccacctgagccagaggggcagctgctgtgccggcagcagcacaggccccaaggacaaccccctggccctgcaggactacacccccagctatggcctggcccctggagagaaccaggacaccagccccctgtacacagatggcagccacaccaagcagacccgggacatcatcagccccaccagcatcctgcccggccagaggaacagcagcgagaagcgggagagccagaaccccttcagagatgatgtgtccaccctgcggaggaacaccccctgcagcatcaagaaccagctgggccagaaggagatcatgcccttccctgaggccagcagcctgcagagcaagaacaccccctgcctgaagaatgacctgggcggagatggcaacaacatcctggagcaggtgtttgaggacaaccagctgaatgaaagaacagtggacctgaccccagagcagctggtgattggcaccccagatgagggcagcaaccctgagggcatccagagccaggtgcaggagaatgaaagtgagcggcagcagcagaggcccagcaacatcctgcacctgccctgcttcggcagcaagctggccaagcaccacagcagcaccaccggcacccccagcagtgatggccggcagagcccctttgatggagacagcatcacccccacagagaaccccaacaccctggtggagctggccacagaggagcagttcaagagcatcaacgtggaccccctggatgctgatgagcacagcccctttgagttcctgcagaggggcaccaacgtgcaggaccaggtgcaggactgcctgctgctgcaggcctag

SEQ ID NO: 222147 - DNA, 5679 bp, Artificial Sequence
  derived and/or modified sequence
ctttttattttgagcctttttgatactgaacatgatatctgagtgaagaatttttgttttattattaagaaataaatgtatcttgcttcttgagatctccctggcttcagcaatttgtagttatttccactatagaccattaagaatatatttcaaaggcaagctaacaaagttcaagtaaaaattattttttatatattacagcttctaattggcattggtttcttctcaggttaaagctgtatttttcttaaaggcttataaaaattttgctgaaaaaaatgttggtgcttcggtgcaggcttggaacctcttttcctaaactagataacttggtaccaaaaggcaaaatgaagattctcctggtctttctagggcttcttggtaattctgttgctatgccaatgcacatgccccgaatgcctggatttagcagtaaaagtgaggagatgatgcggtataatcaattcaactttatgaacggcccacatatggcacacctggggcccttctttggaaacggtctccctcagcaatttccacagtaccagatgcccatgtggcctcagccaccacccaacacatggcatccacggaaatcctcagcacccaaacgtcataacaagactgatcagacccaagaaacccagaaacccaaccagactcagtcaaaaaagccaccacaaaagcggcctttgaagcagccatcacataatcaacctcagcccgaagaggaagctcaaccccctcaggcattcccaccatttggaaatgggctattcccctatcaacaaccaccatggcaaattccacagaggttaccaccaccaggttatggacgcccaccaatcagcaatgaagaaggggggaatccttactttggatattttggatatcatggctttgggggtcgccctccttattattcagaagaaatgtttgaacaagattttgaaaaacccaaagaagaagatcctcctaaagcagaaagtccaggcacagaacccacagctaattcaacagtcactgagacgaattctacccaaccaaatcctaaagggagtcagggaggaaatgacaccagccccacaggaaacagtaccccaggactaaacactgggaacaaccctccagctcaaaatgggattggcccactccctgcagtcaacgcttcaggccagggagggccaggaagtcaaatcccatggagaccaagtcagccaaatattcgtgaaaatcatccatatcctaatataagaaattttccttcaggaagacagtggtatttcactggtactgtcatggggcacagacagaataggcctttttacagaaatcaacaagttcaaaggggtcctcggtggaacttctttgcttgggaacgtaaacaagtagctcgtccaggaaatccagtttatcacaaagcttaccctcctacttcaagaggcaattatcccaattatgcaggaaatccagcaaatctcagaagaaagcctcaggggccaaataaacaccctgtaggaactactgttgccccactgggtcccaaacctggccctgttgttcgcaatgaaaaaatccaaaatccaaaggagaagcccctgggtccaaaagaacaaataatagttcctacaaagaatccaaccagcccctggagaaactctcaacagtatgaagttaataaatcaaattataaactgcctcactctgagggttatatgccagtcccaaattttaattctgttgatcaacatgaaaactcctattacccaagaggagattccagaaaagtcccaaattctgatggacaaacccaaagccagaatttgcccaaagggattgttttagggtcaagaaggatgccatatgaatcagaaactaatcagtcagaattaaagcacagctcatatcagcctgctgtataccctgaggaaatcccttctcctgcaaaagaacattttcctgctggaagaaatacttgggaccaccaagaaatctctccaccttttaaggaagatccagggaggcaagaagaacatttaccccatccttcccatggttctagaggaagtgttttctaccctgaatataacccatatgatcccagggaaaactcaccataccttagaggcaatacatgggatgagagagatgattctcccaatactatggggcaaaaagaaagtccactctaccccataaataccccagaccagaaggagatagtcccttataatgaagaggacccagttgatccaactggagatgaagtctttcctggacaaaatagatggggtgaagagttgagcttcaaaggaggcccaacagttaggcactatgaaggtgaacaatatacctcaaatcagccaaaggaatatcttccctattctttagataatccatcaaaaccaagggaggatttttattacagtgaattttacccatggagcccggatgagaattttccatcatataatacagcttctactatgccaccacctatagagagcaggggctactacgttaataatgccgctggaccagaagaaagcactctatttccttcacggaattcctgggaccacaggatacaagcccaagggcagagagaaagaaggccgtattttaacagaaatatctgggatcaggcaacacatttacaaaaagccccagctaggccaccagaccagaaaggtaaccagccctattacagtaacaccccagctgggcttcagaaaaatccaatatggcatgaaggtgagaatttgaactatggcatgcaaataactaggatgaattctccagagagagaacattcatctttccctaacttcatcccaccaagttacccatcaggtcaaaaagaagcacatttatttcacctaagccagagaggctcttgctgtgctggtagctccacagggcccaaggacaatccactagctctacaagactacactccatcctatggtcttgcacctggggagaaccaagacaccagtcctctgtatacagacggtagtcataccaagcagacaagagatatcatctccccaacaagcatcctaccaggccaaagaaacagctcagagaagagggaaagccaaaacccttttagagatgatgtgtccacgctgaggaggaacacaccatgttctataaagaatcaactgggccaaaaggaaattatgccctttcctgaagccagttcccttcaatcaaagaatacaccttgtctcaaaaatgatcttggaggagatgggaacaacattctggaacaagtttttgaagacaaccagctcaatgaaagaactgttgaccttactcctgagcagcttgttattggtacacctgatgaaggctccaatccagaaggcatccaaagtcaagtccaagaaaatgagagtgagaggcaacagcaaagaccatctaacattctgcatttgccatgctttggctccaaattagcaaagcatcactcttccaccaccggaactccatctagcgatggaaggcaaagcccatttgatggggattcaattacgcctactgaaaatcctaacacattggttgagttagctactgaggaacaatttaagagtataaatgtagacccacttgatgcagatgaacacagtccatttgaattccttcaaagagggaccaatgtacaggaccaggtacaagactgcttactacttcaggcctaggggttatccaaccaagcattcttggggaaagagaaatcactgacattctataccaatggttcccaaaattttttccccaagacttaattaagtgtctgactgtcttggtgatccttaagttttctcccctctcagcaataggagtagcgacccaggtggagctgagattaggcctctggggatcaccagatctagcactttcacagattagtgcagaccttaaaaaagcaagaaggccatgaccatccctgcctcgaaacttgcaagtcacttgtctgagttagtttccttttgcttgatgacttcttttgctctcaaagttccatacttgcaaaattggtttttcaagactgaaaggcagattaactttccattctacttatggagatccacacatcagtatagtcctgatgcactgtacgttttttgcttgtgttgatcttgtcaggtttttttcctactcaatattctcttcaagcattttttttcttccactgccactctctttacctttatcatttctttttcttagctttcttccttcttttctctctccctcaaccattctgtatttagctttctaatcctcatctttttctctctgtatatcacttcttacatattaaattagctattttaaccatttctagtctcttctttatgtctacctcctccattatgtcttcgtctcttccaacctatctgttctgtctcccaatgtaccacttatcaactaatccctctcctctctgattcctttcttcccttcaatttatctttttccctgttacaccattttcatcttaagactgcatgtcactctcttcctttttgtatccactctccaaatcgtaccctaaatttttcttgacccagcttaaccatcattacagaatatattttggaaatggtagacactgatagctactttgtttttagttatcttagggtctctaccaagtagacacagttcagttagagagacgtatttaaggagaagggaaggcaggatacccagaactagcagcctagggaaaaggcttaggaagatggagaatgaggaactgaagaaactgccgctctgagactgcacatccaggaaaaaagactaggacttgccacacactgccaattcataatccgcaggatctgtagaagacattttgggaaacactgtcttaaataaaaactcaatgtttagttgtttttttttttttttactagttcagcataagggattctaccagtatgtgctactactaacattcttcatgtccatgcagaattacttacagacactctttcttggtatcttgaataaattgtgtaaattattttgaaaagtggatatttctatatgccttgcttataatacatcagggattattattcttattaataacatgttggcctattatctggatgtcccttgcctagagcaggaaaaaagtctcagaattacctaaaaacatactttataactttaagagatttcttaggatacatcttcaggggcagatttcataacaacatctcaaaaatttggggaaacacaacgttgaaaacttcctaagaaaaggaatcttgcccttgaatcttctgaagtacctagcacagtgtcttcaacatagaaggtacccaataaatatatatcaattcattttttaatgactttcaacactcccatgaaaacaccgtagtctgcttttcctgaaaggtgactgtctaggatgctgaatgagccaccactccgtagctttatatattcagcaacatttccatcatagaatttcagcgttagaagggatcttagaggtagattatccaggccatcccctactgcttacattcccctccccctggccagttttatattttaatcacacattgaaaaattcattaacttattctgtataaaactgtcttttaagaattatcctttcaaaataaaaatgttattgtttcacta

SEQ ID NO: 222148 - DNA, 3429 bp, Artificial Sequence
  derived and/or modified sequence
atgctggtgctgcggtgccggctgggcaccagcttccccaagctggataaccttgtgccaaaggggaagatgaagattctgctggtctttttgggactgttggggaacagcgttgccatgccgatgcacatgcctaggatgcccggtttctcctccaaaagtgaggagatgatgcggtataatcaatttaactttatgaatggaccccacatggcccacctcggccctttctttggaaatggcctcccccagcagttcccacaataccaaatgcctatgtggcctcagcctcccccaaatacgtggcatccccggaaatcttctgccccgaagcgccacaataaaactgatcagacgcaggagactcaaaaaccgaatcagacacagtctaagaaacccccccagaaacgtcccctcaagcaaccctcccacaaccaaccccaacccgaggaggaagctcagccacctcaggctttcccaccctttgggaacggcctctttccctatcagcagcccccatggcaaatcccgcagcgactcccgccgcccggatatggaagaccgcctatctctaatgaggaaggcgggaacccttacttcgggtatttcggttatcacggctttggcgggaggcccccctattacagtgaggagatgtttgaacaggatttcgagaaacctaaagaggaagaccccccaaaggccgagagtccaggtaccgaacctaccgccaactccactgtaaccgaaacgaattctacgcagccaaaccctaagggatcacagggcggtaatgatacttcaccaacgggcaactctaccccgggactgaatactggcaacaacccacctgcgcaaaatggaataggacctcttcccgctgttaacgcttccgggcagggggggcccggctcccagatcccatggcgaccaagccaacccaacattagggagaatcatccctacccaaacattagaaacttcccttcaggtagacagtggtactttacggggactgtgatgggacatcgccagaatcggccattctatagaaatcagcaagtccaacggggtcccaggtggaatttcttcgcttgggagcggaaacaagtggcccggcccgggaaccctgtgtatcacaaagcatatccacctacatcccggggaaattaccctaactacgccggtaacccagctaacctgcggcgaaagcctcaggggccaaacaaacacccagtaggcacaactgtggctcctcttggacccaaacccggcccggtggtacgcaatgaaaaaattcagaatcccaaggagaaaccactggggccgaaagaacagattatcgtccccactaagaatccaacttccccgtggcgaaacagccagcagtatgaagttaacaaaagcaattacaagcttcctcactcagaaggctacatgccagtacccaacttcaattcggtggaccagcacgaaaactcgtactacccaaggggcgattcaagaaaagtgccgaattcagacggccagacccagagtcagaaccttccaaagggtattgtcctggggtctaggcgtatgccatatgagagtgagactaatcagtccgaactcaagcacagtagttatcagcccgccgtgtatcccgaggaaatcccgtcccccgccaaggagcacttcccagcgggcagaaacacttgggatcaccaggaaatcagtccccctttcaaagaagatccagggcgtcaggaagaacacttgccccaccctagtcatggctcccgaggctcagtcttttaccctgaatacaatccatacgatccccgcgagaatagtccctacctcagaggcaacacatgggatgaaagagatgactcccccaacactatgggacagaaggagagtccgctgtatccaattaacactccagaccaaaaggagatcgtcccctacaatgaagaagatcctgtggatccaaccggtgacgaggtttttccaggccagaatagatggggtgaggaattaagttttaaaggaggccccaccgtgcgtcattatgagggagagcagtatacatctaatcagccaaaagagtatctgccttattctttagacaacccttcaaagcctcgggaggacttctattattccgagttttatccctggagcccggacgaaaattttccatcatataacactgcatcaacaatgcccccacccatcgaatccagaggctattatgtcaacaacgccgctggaccagaggagagtaccctgttcccgagccgcaatagttgggatcacaggatccaggcacaaggacaaagagaacgcagaccctactttaatcggaatatctgggatcaagccacccatctccagaaggcccccgccaggcctcctgatcagaagggcaatcagccctactacagtaatacaccagcaggtctccaaaagaatccgatttggcacgagggagagaatttaaactacggaatgcaaatcaccaggatgaactcgcccgagagggagcacagcagcttcccaaattttattcccccgtcctaccctagcggccaaaaggaagctcacctgtttcatctcagccagcgcgggtcatgctgcgctggctcctcgacaggccccaaggataaccccctggctctgcaggattacactccatcctacggcctggcccccggcgagaatcaagatacctcccctttgtataccgacggctcacacaccaaacaaactcgagatatcatttcgccaactagtatcttgcctggccagaggaattcctcagaaaagcgcgagagccagaacccgtttcgggacgatgtttccactctcagacgcaacactccgtgttcaattaagaaccaactggggcaaaaagagattatgccattccccgaagcatcctccttacaaagcaaaaacaccccctgtttgaaaaacgatctgggtggagacggaaataacatccttgagcaagtcttcgaggacaaccagctgaacgagaggacggtagatctcacccccgaacaactggtcataggcacaccagacgaagggagtaatcctgagggtatccagtctcaggtgcaggagaatgagtcagaacgccagcagcagaggccctccaatatattgcatttgccatgttttggatccaagctggctaagcaccattcctcgacaactgggacaccttcgagcgacgggaggcagagccccttcgacggtgatagcattacaccaacagaaaaccccaacaccctagtggagcttgccaccgaggagcagttcaagtcaatcaacgtggatccacttgacgcggacgagcactctcccttcgaattccttcagcgcggcactaatgtgcaggatcaggtccaagactgtctgctgttacaggcatag

SEQ ID NO: 222149 - DNA, 3429 bp, Artificial Sequence
  derived and/or modified sequence
atgctggtactgagatgccgattgggcacaagcttccctaaactggacaacctagtccccaaaggtaagatgaaaatcctcctggtgttcctcggcctccttggtaattcggtggcaatgcctatgcacatgcctcgcatgcctggcttctcttcaaagagcgaagagatgatgagatataaccagttcaatttcatgaatgggccacacatggcccacttgggacctttttttgggaatggactgccccaacaattccctcagtaccaaatgcctatgtggcctcaacccccaccaaacacatggcatcctagaaaatcctccgccccaaagcgtcacaataaaaccgatcagacacaagaaactcagaagccaaaccagacccagagcaaaaagccaccccaaaagcgaccgctgaaacaaccctctcacaaccaaccgcagccggaggaggaagcacagcctccccaagcattcccaccctttgggaatggactgttcccttaccagcagccaccgtggcagataccacagcggctgcctcctccaggttatggcagaccacctattagtaatgaagagggtgggaacccgtacttcggttacttcggatatcacggcttcggtggtaggccaccttactattcagaggagatgtttgagcaagactttgagaaaccaaaagaggaggaccctccaaaggccgagagcccagggacagagcccacagcaaacagcactgttaccgagaccaactcgacccaacccaacccaaaaggttcgcaggggggaaatgacacgtcgcccacaggtaatagtactcccggtctaaatactggcaacaatcccccagctcagaacggtattggcccactcccagctgtcaacgccagcggacaggggggtccagggagccagatcccttggcggccatctcaacctaacataagagagaatcacccttatcctaacattcggaacttcccatccggacgtcagtggtattttactggtacagtgatgggccacaggcagaatcggccattttaccgcaaccagcaggtgcagcgcggacccagatggaattttttcgcatgggagaggaagcaagtggccaggccaggaaatcctgtgtaccataaagcgtacccccctacctcacggggtaactatcccaactacgcgggaaacccagctaatctgcggagaaaaccacagggtcccaataagcacccagtgggcaccaccgtcgccccacttggcccaaaacccggacccgtggtgcgaaatgaaaagatccagaatcccaaggaaaaaccgcttggcccaaaggaacagatcatcgtgccaaccaagaatcccacgtccccctggcggaactctcagcagtatgaggttaataagtctaactacaagctgccacatagtgaaggctacatgcccgtgcccaactttaattctgtggatcagcacgaaaatagttattaccctagaggagacagccgaaaagtgcctaattctgacgggcaaacccagagccagaacctacccaagggtatcgtcctggggtcccggagaatgccctatgaaagtgaaactaaccagtccgagctgaaacattcttcttatcaaccggctgtatacccagaagagattcccagcccggctaaagagcattttccagcgggtagaaacacatgggaccaccaggagatctccccacctttcaaagaagatcctgggaggcaagaggaacatctgccccacccctcacacggcagtcgaggctcggttttttatccagagtataatccctatgatccccgagagaatagcccatacttgcgaggtaacacctgggacgagcgggatgattcccccaacaccatgggacagaaagagagtccactctatcccattaacacaccggatcaaaaggagattgtcccgtataacgaggaggatcctgtggaccccactggcgatgaggtttttccaggccaaaataggtggggagaagagttgtcctttaagggcggtccgacagttagacactacgagggggaacagtacacctcaaatcagcccaaagagtacctcccctattcactggacaaccctagtaaaccccgagaagatttttactattcagaattctatccctggtcccctgatgaaaattttccctcatacaacactgcctctactatgccgccacccatcgagtctcgcggttactacgttaataatgcagccggacctgaggagagcacactatttcctagtcgaaattcttgggaccaccgtatccaagcacaggggcagagagaacggagaccctatttcaaccgcaatatctgggaccaggccacccatttacagaaggccccagctagacctcctgatcaaaaaggcaaccagccgtactacagcaacactcctgcagggctgcagaagaaccccatctggcacgaaggcgaaaacctgaactacggcatgcaaattactagaatgaacagcccagagcgcgagcacagttcattccctaatttcattccccctagctacccttctggccagaaggaagcacacctgtttcacttgtctcaacgcggttcttgctgtgcaggttctagcaccgggcctaaggataaccctttggctctccaagattatacgccgtcctacggactcgcacccggagagaatcaggatacctctcctttgtacaccgacggcagtcataccaagcagacgcgggatatcatctctccaacgagcattctgcctgggcaacggaactcctccgagaaacgggagtctcagaatccttttcgggacgatgtgagcacactgcgcagaaacacaccctgttctattaagaaccaattaggacagaaagaaattatgccattccctgaggcatcttcactgcaatctaagaacactccgtgtctcaaaaacgatctcggcggagacggcaataatatcctagagcaggtgttcgaagacaaccagctgaacgagaggacagtggatttaacacccgaacagctcgtcatagggacacccgatgagggcagcaacccagaagggatacagtcacaggtgcaggagaacgagtccgagcgacagcagcagaggccatctaatatcctccatttgccctgttttggatctaaactcgccaagcaccacagcagcacaactggaacaccaagctcagatggtcggcagagcccgttcgacggtgacagcattacccccactgagaatcctaataccctggttgagcttgcgaccgaagagcagttcaagagcatcaacgtggatcctcttgatgccgatgagcatagcccgtttgaatttctgcagcgcggtaccaacgtacaggaccaagtacaggactgtctcctgcttcaggcttag

SEQ ID NO: 222150 - DNA, 3429 bp, Artificial Sequence
  derived and/or modified sequence
atgctggtcctcaggtgccggctaggaacctccttccctaagcttgacaaccttgttcccaaaggtaagatgaaaatccttctggtttttctaggtctactcggcaacagcgtggcaatgcccatgcacatgccccggatgccgggttttagcagcaaatccgaggagatgatgcgttacaaccagttcaattttatgaatggcccacacatggcccacctgggcccattctttggcaatggccttcctcagcagtttccgcagtatcagatgcctatgtggcctcagcccccccccaacacgtggcatcccagaaaatcgtccgcacctaagaggcataacaaaaccgaccaaacccaagaaactcagaaaccgaatcagacacagtccaaaaaaccacctcagaaacgacctctgaagcaaccctcccataaccagccacaacccgaagaagaagcccagcctccacaggcgttccctccttttggaaacggactgttcccatatcagcaaccgccttggcaaattccccagcggctgcctcctcctggttacggaaggccaccaatatccaacgaggaaggaggcaacccgtactttgggtactttggctaccatggctttggcggtcgacctccgtattactccgaggagatgtttgaacaggacttcgagaagcccaaggaggaagacccgcctaaagctgagagtccaggtaccgagccaacagcaaattctacagtgacagaaaccaactccacccagcccaatccgaaaggcagccaaggcgggaacgacacaagcccaactggcaattccactccgggattaaacactggcaacaacccccctgctcagaacgggatcgggccacttccagccgtcaacgcctcgggtcagggggggccggggtcacaaatcccatggaggccatcccagcccaacattcgagaaaaccacccctacccaaatatacgcaattttccctcaggacgccagtggtactttaccggaacagtgatgggtcatagacagaatcgtccgttctatcgtaatcagcaagtccagagaggcccacgctggaacttctttgcctgggaaaggaagcaggtggccagaccgggcaatccagtttaccacaaagcataccccccgacaagtcggggaaactatcctaactacgcaggtaatcctgcaaaccttcgccggaaaccgcaggggcctaacaagcacccggttggcacaaccgttgcacccctgggaccaaagcctggccctgtcgtgcggaacgagaaaattcagaatcccaaggaaaagcctctcggacctaaggaacagataattgtccccaccaaaaacccaacctccccctggcgaaactctcagcagtatgaggtgaataagagcaactataagctaccccactccgagggctatatgcctgtgcccaattttaactcagtagaccagcatgaaaattcttattatccccggggcgatagcagaaaagtcccaaatagcgacggccaaacccaaagccagaacctccctaaaggaatcgtactgggttcacgccgcatgccatacgaaagtgagactaaccagagcgagttgaagcattcttcatatcaaccagccgtttaccccgaggagataccgtctccagcaaaggagcatttcccagccggaagaaatacttgggaccatcaagaaatttcccctccgttcaaagaggacccggggagacaggaggaacacctcccacatccgtctcacggttctagggggtccgtgttctaccccgagtacaatccttacgatcctcgagaaaattcaccatatctgagagggaacacatgggacgagcgggatgattctcctaacacaatggggcagaaggaatcacctctttatcctataaacaccccagatcagaaggagattgtgccatacaatgaagaagatccagtggacccaacaggtgatgaagtcttccctggacagaacaggtggggagaagagctctcatttaaaggcggtccaacggttcgtcactacgagggcgaacaatataccagcaatcagccaaaggaatacctgccgtactcgcttgacaacccgtctaaacctcgcgaggacttctactattccgagttttatccatggtctcccgatgagaactttccctcctacaatacagcttctactatgcctcccccaatagagtctcgggggtactacgtaaacaacgcagctgggcccgaagaatcgaccctatttccttcaagaaatagctgggatcacaggattcaggcacaggggcagagggagaggcggccttattttaacagaaacatctgggaccaagctacccatcttcaaaaagcgcccgccagacctccggatcagaaggggaaccagccatattattcaaatacaccagccgggttgcagaaaaaccctatatggcacgaaggtgaaaacctcaactatggtatgcagataacgcgaatgaactccccagagagagaacactcaagttttcctaattttatcccgccaagctaccccagcggccagaaggaggcacacctctttcatttgtcccaacgcggatcatgctgcgctggatccagtaccggcccaaaagacaatcccctcgctctgcaagattacactcctagctacggcctagcacctggcgagaaccaggacacctctcctctctatacagacggcagtcacacaaaacaaactcgggacattatttcacccacgtctatcctgccaggccagcgtaatagctccgaaaagcgtgagagccagaacccgtttcgtgatgacgtcagcacactcaggcgaaacaccccatgctctattaaaaaccagcttgggcaaaaagaaatcatgccgtttcccgaggcctcctcactgcagtccaagaataccccatgtctgaaaaatgatctgggaggcgacggtaataacatcctagagcaagtgttcgaggacaaccagttaaacgagcggaccgtcgacctgaccccagaacagctcgttattgggacccccgacgaaggatctaaccccgagggcattcaaagccaggttcaagagaacgaatcggaaagacagcagcagaggccctcaaacatcttacacctgccatgctttggaagtaaacttgctaagcaccattcatccactaccgggacccctagtagcgatggacgacagagcccctttgacggagacagtatcacgcctactgagaaccccaacacacttgttgaactggctacagaagagcagttcaaatcaatcaatgtggaccccttggatgctgacgagcatagcccattcgaattcttacagcgggggacaaacgtccaggatcaggtgcaggattgcctcctcctacaagcgtag

SEQ ID NO: 222151 - DNA, 3429 bp, Artificial Sequence
  derived and/or modified sequence
atgttagttctcagatgcaggctgggcacatcttttcccaagctggataatttggtaccaaagggcaaaatgaagattcttttagtgtttttgggcctattgggaaacagtgttgcaatgcctatgcacatgccccgcatgcccggttttagttccaagagcgaggaaatgatgaggtataatcaatttaactttatgaatggtccgcatatggcccaccttggacccttcttcggtaacggccttccccagcagttcccacagtaccaaatgccgatgtggcctcagccccctcccaatacctggcacccaagaaagtcatccgcccccaaacgccacaataaaactgaccaaacacaggagacccagaagcccaatcagacccagagcaagaaaccaccccagaagagaccactgaaacaaccgtctcataaccagccccagcccgaagaggaagcccagccaccacaggcattccccccttttggaaatgggctgttcccatatcagcagccgccttggcaaatacctcagagactgccaccacctggttacggccggcctccaatatccaacgaagaaggcggaaacccctatttcggctactttggttatcacggctttggaggccgtcctccatattattcagaagagatgtttgaacaggattttgagaaacctaaagaggaagacccacctaaggcagagtcaccagggacggagccaactgctaactccacggtcacagaaaccaactcaactcagccaaaccctaaaggatcgcaagggggaaacgacacatctcccaccggcaattccacaccagggctcaacactgggaacaatccacccgctcagaacggaatcggccccttgccggcagtaaacgcttcaggtcaaggagggccaggctcccaaatcccctggagaccatcccagccaaacatccgcgagaaccatccatatcccaacataagaaatttcccttcaggtcgccaatggtacttcaccgggaccgttatggggcaccgccagaatcgtcctttctaccgaaatcaacaagtccagcgcggaccaagatggaacttctttgcctgggaacggaaacaggtagctcgtccaggcaaccccgtttaccataaagcctacccccccacgtcaagagggaattatcctaactacgccggtaaccccgccaacctcagacgaaagcctcagggacccaataagcatcctgttggaactacagtagccccgctcggaccaaagccaggacccgtcgtaagaaatgagaaaatccagaatcctaaggagaaaccattaggaccaaaggaacaaatcattgtacctactaagaatccgactagcccatggaggaacagccaacagtatgaagtgaacaaaagtaactacaaactgcctcatagcgagggctatatgcccgtaccaaatttcaactccgtcgatcagcacgaaaattcttactacccgaggggcgactctagaaaggtgcccaattcagacgggcagactcaaagtcagaatctaccgaagggaatcgtactagggtcaaggagaatgccatatgaaagtgagaccaaccaaagcgaactgaaacactcatcttatcaaccagctgtgtatcctgaagagatccccagccccgcaaaagaacactttccagcaggccgtaatacctgggaccatcaagagatttcccctccctttaaagaagatccgggtcggcaggaggaacatctgccacatccatcacacggctctcgaggctctgtattttacccagaatacaacccatacgaccctagagaaaacagcccctacttgcgcggcaatacctgggatgaacgggatgatagcccaaacaccatgggccagaaggagagcccactgtatcccatcaacaccccggatcagaaagaaattgtaccttacaatgaggaggaccccgtcgacccgacaggagacgaagtgtttcccggacaaaatagatggggtgaggagttgtcatttaagggcggacctaccgtgagacactatgaaggagagcagtacacttccaatcagccgaaggaatacctgccatatagtctggataacccctccaaacccagagaagacttctattactccgaattttatccttggtcccccgacgaaaattttcccagctacaacaccgcatccactatgcctcctcccatcgaatcaaggggctactatgttaacaatgctgccggcccggaagaatctacgttgttccctagcagaaacagctgggaccacaggatccaggcgcagggccagcgtgaacgtcgtccttatttcaatcgcaacatttgggatcaggctacccacctgcagaaagctcccgctagaccccctgaccagaaggggaaccagccatattacagcaatactcccgcaggactgcagaagaatccaatttggcatgaaggagaaaatctgaactatggtatgcagatcacgcgcatgaactcacctgagagagaacactcatccttccccaatttcatccccccctcttatccatcaggacaaaaggaagcgcacctgttccatttgagtcaaaggggatcttgttgcgccggctcaagtacaggccctaaagacaacccacttgcactccaagactatacgccaagttatggattggctcccggcgagaatcaagacacgtctcccctttacacggatggatcccatactaagcaaactcgcgacatcatctctcctacatctattttaccgggtcaacgcaacagttccgagaaaagagagtctcaaaatccttttcgtgacgacgtttccacactgcggcgtaatacgccttgctctatcaaaaatcagctcggtcaaaaagaaattatgcctttccccgaagcttcatcactgcagtccaaaaacacgccatgcttaaagaacgatttgggaggggacggtaacaatattttagaacaagtctttgaagacaaccagcttaacgaacgaacagtggacctgactccagagcagctagtcattggcacaccggatgagggatctaatcccgaaggaatccagtcacaagtgcaggagaacgagagcgagcgacaacagcagaggcctagcaacatcctccacctcccttgttttggatcaaaactcgccaaacatcacagtagcaccacgggcaccccctcaagcgatgggagacaatcccctttcgacggcgactctatcacaccaacagaaaatccaaacacattagtcgaactggccacagaagagcagttcaaatcaatcaatgtggaccccttggatgctgacgagcatagcccattcgaattcttacagcgggggacaaacgtccaggatcaggtgcaggattgcctcctcctacaagcgtag

SEQ ID NO: 222152 - RNA, 3572 nt, Artificial Sequence
  derived and/or modified sequence
gggaaauaagagagaaaagaagaguaagaagaaauauaagagccaccauguugguacuuagaugccgacucggaacgucguuuccgaagcuugauaaccugguccccaaagggaagaugaagauuuugcucguguuucucggcuugcuuggaaacuccguagccaugcccaugcacaugccgagaaugcccggauuuucgucaaaaucggaagagaugaugcgguacaaccaguucaacuuuaugaaugggccgcauauggcgcacuugggccccuuuuucgggaauggacugccucagcaguucccucaguaucaaaugcccauguggccccagcccccaccuaauacauggcacccgcggaagucauccgcgccuaagagacacaauaagacggaccagacccaagaaacgcagaagccgaaucagacccagagcaagaaaccaccgcagaagcgaccccucaagcagccaucccauaaucagccgcaaccagaagaagaggcucagccaccacaggcauuuccgcccuuuggcaaugggcucuuuccguaucaacaaccgccguggcagaucccucaacggcuuccaccaccgggauaugguagaccacccaucucaaacgaagaggguggaaaccccuauuucggcuacuucggguaccauggguuuggcggaaggccaccguauuacucggaagaaauguucgagcaggacuuugaaaagcccaaagaagaggacccaccuaaggccgaauccccugguacugagcccacagcgaacucaacggugacggagacaaauucaacucaaccuaacccgaaagggagccagggcggcaacgauacaucgccgacggguaauagcacgccagggcuuaacacugguaauaacccaccggcgcaaaacgguaucggaccucuucccgcggucaacgcgucgggacaaggugguccggggucgcagauuccauggaggcccagccagccaaauaucagggagaaccacccguacccgaacauucgcaacuuucccucgggacggcagugguacuucaccggaacagugaugggacaucgccaaaauaggccauuuuaccgcaaucagcaggugcagagaggaccacgcuggaacuucuucgcgugggagcgaaaacaggucgcgaggccgggaaacccuguauaccacaaagcauacccacccacuucgcggggaaacuaccccaacuacgccgggaaccccgcuaacuugcgccgaaagccccagggucccaacaagcacccgguggggacuaccguagcgccgcucgggccgaagccugguccgguggugcggaacgagaaaauccagaauccgaaagagaagccccuuggacccaaagagcagaucaucgugcccacuaagaaccccacaucgcccuggcgcaacucccaacaguaugaggugaauaagucaaacuacaagcugccccauucagaaggcuacaugccggugccgaacuucaauagcguagaccagcacgagaacucguauuacccucggggagacucccggaaggucccaaauucggacggacagacgcaaagccaaaaucugcccaagggaauuguccucgguucgcgaaggaugccguacgaguccgagacaaaccagucggagcuuaaacacucauccuaucaacccgccgucuaccccgaagagauuccgucaccagcgaaagaacacuucccagcagggagaaacacuugggaccaccaagaaauuucaccacccuucaaagaggaucccggacgccaggaagagcaucuuccgcacccgagccauggaucgcgagggucgguguucuacccugaguacaacccguaugacccucgggagaacagccccuaucuuagggguaacacgugggacgagcgggacgauagcccaaacacaaugggacagaaagagucgccguuguaucccaucaacacaccagaccagaaagagaucgugccguacaacgaagaagaucccgucgacccgacgggggaugaaguauuucccgggcagaacagguggggcgaagaguugucguuuaaagggggaccuaccgugcggcacuaugagggagagcaguacacaucgaaucagccaaaagaguaucuccccuauucgcucgauaauccgucgaaaccgagggaagauuucuauuacucagaguucuaucccuggucgcccgacgaaaacuuuccaucauauaacacggcgagcaccaugccaccgcccauugagagcaggggguacuaugugaacaacgcagcggguccggaagaaagcacucucuuccccucacgcaauagcugggaucauagaauucaggcccagggccagcgggaacggcgaccuuacuuuaacagaaacaucugggaccaggcgacgcauuugcaaaaggcucccgcucggccacccgaucagaaggggaaccagcccuacuacucgaacacgccagcagggcuccagaagaauccuaucuggcacgagggggaaaacuugaauuauggaaugcagaucacacggaugaauucgcccgaacgggaacacucguccuuccccaacuuuaucccaccuucguauccgucggggcagaaagaggcacacuuguuucaucuuagccagcgcggaucgugcugcgcgggaucguccacgggaccgaaggacaauccgcucgcccuucaagacuauaccccuucguacggguuggcaccgggagaaaaccaggacacaucaccccuguacacugaugguucccacacuaaacagacucgcgacauuaucagccccacaucaauucucccuggccagagaaauagcucagaaaagagagagagccagaaccccuuuagggaugaugugucgacgcuucgccgaaauacccccuguucgaucaagaaccagcuuggucaaaaagagaucaugccguuccccgaggccucaagccugcagucaaagaauacacccugucugaagaaugaccucgggggugacgggaauaacauucuggaacagguauuugaggauaaucagcucaacgaaaggacgguggaucucacucccgagcaacuggucauugguacgccggacgaggggagcaaucccgaagguauccaaucgcagguacaggaaaaugagucagagcggcagcagcagaggccgucgaauaucuugcaccuuccauguuucggaucaaaacuggcaaaacaucauucaucaacaacugguacuccgucgucagacgguaggcagucccccuucgauggagacuccaucacgccuacggagaaucccaacacgcuggucgagcuggcgacugaagagcaguucaaguccaucaauguggauccgcuugaugcggaugagcacuccccguucgaauuucuccagcgggguacuaauguacaagaucagguccaagauugccuucucuugcaagccugauaagcugccuucugcggggcuugccuucuggccaugcccuucuucucucccuugcaccuguaccucuuggucuuugaauaaagccugaguaggaag

SEQ ID NO: 222153 - RNA, 3429 nt, Artificial Sequence
  derived and/or modified sequence
augcugguccucaggugccggcuaggaaccuccuucccuaagcuugacaaccuuguucccaaagguaagaugaaaauccuucugguuuuucuaggucuacucggcaacagcguggcaaugcccaugcacaugccccggaugccggguuuuagcagcaaauccgaggagaugaugcguuacaaccaguucaauuuuaugaauggcccacacauggcccaccugggcccauucuuuggcaauggccuuccucagcaguuuccgcaguaucagaugccuauguggccucagcccccccccaacacguggcaucccagaaaaucguccgcaccuaagaggcauaacaaaaccgaccaaacccaagaaacucagaaaccgaaucagacacaguccaaaaaaccaccucagaaacgaccucugaagcaacccucccauaaccagccacaacccgaagaagaagcccagccuccacaggcguucccuccuuuuggaaacggacuguucccauaucagcaaccgccuuggcaaauuccccagcggcugccuccuccugguuacggaaggccaccaauauccaacgaggaaggaggcaacccguacuuuggguacuuuggcuaccauggcuuuggcggucgaccuccguauuacuccgaggagauguuugaacaggacuucgagaagcccaaggaggaagacccgccuaaagcugagaguccagguaccgagccaacagcaaauucuacagugacagaaaccaacuccacccagcccaauccgaaaggcagccaaggcgggaacgacacaagcccaacuggcaauuccacuccgggauuaaacacuggcaacaaccccccugcucagaacgggaucgggccacuuccagccgucaacgccucgggucagggggggccggggucacaaaucccauggaggccaucccagcccaacauucgagaaaaccaccccuacccaaauauacgcaauuuucccucaggacgccagugguacuuuaccggaacagugaugggucauagacagaaucguccguucuaucguaaucagcaaguccagagaggcccacgcuggaacuucuuugccugggaaaggaagcagguggccagaccgggcaauccaguuuaccacaaagcauaccccccgacaagucggggaaacuauccuaacuacgcagguaauccugcaaaccuucgccggaaaccgcaggggccuaacaagcacccgguuggcacaaccguugcaccccugggaccaaagccuggcccugucgugcggaacgagaaaauucagaaucccaaggaaaagccucucggaccuaaggaacagauaauuguccccaccaaaaacccaaccucccccuggcgaaacucucagcaguaugaggugaauaagagcaacuauaagcuaccccacuccgagggcuauaugccugugcccaauuuuaacucaguagaccagcaugaaaauucuuauuauccccggggcgauagcagaaaagucccaaauagcgacggccaaacccaaagccagaaccucccuaaaggaaucguacuggguucacgccgcaugccauacgaaagugagacuaaccagagcgaguugaagcauucuucauaucaaccagccguuuaccccgaggagauaccgucuccagcaaaggagcauuucccagccggaagaaauacuugggaccaucaagaaauuuccccuccguucaaagaggacccggggagacaggaggaacaccucccacauccgucucacgguucuaggggguccguguucuaccccgaguacaauccuuacgauccucgagaaaauucaccauaucugagagggaacacaugggacgagcgggaugauucuccuaacacaauggggcagaaggaaucaccucuuuauccuauaaacaccccagaucagaaggagauugugccauacaaugaagaagauccaguggacccaacaggugaugaagucuucccuggacagaacagguggggagaagagcucucauuuaaaggcgguccaacgguucgucacuacgagggcgaacaauauaccagcaaucagccaaaggaauaccugccguacucgcuugacaacccgucuaaaccucgcgaggacuucuacuauuccgaguuuuauccauggucucccgaugagaacuuucccuccuacaauacagcuucuacuaugccucccccaauagagucucggggguacuacguaaacaacgcagcugggcccgaagaaucgacccuauuuccuucaagaaauagcugggaucacaggauucaggcacaggggcagagggagaggcggccuuauuuuaacagaaacaucugggaccaagcuacccaucuucaaaaagcgcccgccagaccuccggaucagaaggggaaccagccauauuauucaaauacaccagccggguugcagaaaaacccuauauggcacgaaggugaaaaccucaacuaugguaugcagauaacgcgaaugaacuccccagagagagaacacucaaguuuuccuaauuuuaucccgccaagcuaccccagcggccagaaggaggcacaccucuuucauuugucccaacgcggaucaugcugcgcuggauccaguaccggcccaaaagacaauccccucgcucugcaagauuacacuccuagcuacggccuagcaccuggcgagaaccaggacaccucuccucucuauacagacggcagucacacaaaacaaacucgggacauuauuucacccacgucuauccugccaggccagcguaauagcuccgaaaagcgugagagccagaacccguuucgugaugacgucagcacacucaggcgaaacaccccaugcucuauuaaaaaccagcuugggcaaaaagaaaucaugccguuucccgaggccuccucacugcaguccaagaauaccccaugucugaaaaaugaucugggaggcgacgguaauaacauccuagagcaaguguucgaggacaaccaguuaaacgagcggaccgucgaccugaccccagaacagcucguuauugggacccccgacgaaggaucuaaccccgagggcauucaaagccagguucaagagaacgaaucggaaagacagcagcagaggcccucaaacaucuuacaccugccaugcuuuggaaguaaacuugcuaagcaccauucauccacuaccgggaccccuaguagcgauggacgacagagccccuuugacggagacaguaucacgccuacugagaaccccaacacacuuguugaacuggcuacagaagagcaguucaaaucaaucaauguggaccccuuggaugcugacgagcauagcccauucgaauucuuacagcgggggacaaacguccaggaucaggugcaggauugccuccuccuacaagcguag

SEQ ID NO: 222154 - RNA, 3429 nt, Artificial Sequence
  derived and/or modified sequence
auguuaguucucagaugcaggcugggcacaucuuuucccaagcuggauaauuugguaccaaagggcaaaaugaagauucuuuuaguguuuuugggccuauugggaaacaguguugcaaugccuaugcacaugccccgcaugcccgguuuuaguuccaagagcgaggaaaugaugagguauaaucaauuuaacuuuaugaaugguccgcauauggcccaccuuggacccuucuucgguaacggccuuccccagcaguucccacaguaccaaaugccgauguggccucagcccccucccaauaccuggcacccaagaaagucauccgcccccaaacgccacaauaaaacugaccaaacacaggagacccagaagcccaaucagacccagagcaagaaaccaccccagaagagaccacugaaacaaccgucucauaaccagccccagcccgaagaggaagcccagccaccacaggcauuccccccuuuuggaaaugggcuguucccauaucagcagccgccuuggcaaauaccucagagacugccaccaccugguuacggccggccuccaauauccaacgaagaaggcggaaaccccuauuucggcuacuuugguuaucacggcuuuggaggccguccuccauauuauucagaagagauguuugaacaggauuuugagaaaccuaaagaggaagacccaccuaaggcagagucaccagggacggagccaacugcuaacuccacggucacagaaaccaacucaacucagccaaacccuaaaggaucgcaagggggaaacgacacaucucccaccggcaauuccacaccagggcucaacacugggaacaauccacccgcucagaacggaaucggccccuugccggcaguaaacgcuucaggucaaggagggccaggcucccaaauccccuggagaccaucccagccaaacauccgcgagaaccauccauaucccaacauaagaaauuucccuucaggucgccaaugguacuucaccgggaccguuauggggcaccgccagaaucguccuuucuaccgaaaucaacaaguccagcgcggaccaagauggaacuucuuugccugggaacggaaacagguagcucguccaggcaaccccguuuaccauaaagccuacccccccacgucaagagggaauuauccuaacuacgccgguaaccccgccaaccucagacgaaagccucagggacccaauaagcauccuguuggaacuacaguagccccgcucggaccaaagccaggacccgucguaagaaaugagaaaauccagaauccuaaggagaaaccauuaggaccaaaggaacaaaucauuguaccuacuaagaauccgacuagcccauggaggaacagccaacaguaugaagugaacaaaaguaacuacaaacugccucauagcgagggcuauaugcccguaccaaauuucaacuccgucgaucagcacgaaaauucuuacuacccgaggggcgacucuagaaaggugcccaauucagacgggcagacucaaagucagaaucuaccgaagggaaucguacuagggucaaggagaaugccauaugaaagugagaccaaccaaagcgaacugaaacacucaucuuaucaaccagcuguguauccugaagagauccccagccccgcaaaagaacacuuuccagcaggccguaauaccugggaccaucaagagauuuccccucccuuuaaagaagauccgggucggcaggaggaacaucugccacauccaucacacggcucucgaggcucuguauuuuacccagaauacaacccauacgacccuagagaaaacagccccuacuugcgcggcaauaccugggaugaacgggaugauagcccaaacaccaugggccagaaggagagcccacuguaucccaucaacaccccggaucagaaagaaauuguaccuuacaaugaggaggaccccgucgacccgacaggagacgaaguguuucccggacaaaauagauggggugaggaguugucauuuaagggcggaccuaccgugagacacuaugaaggagagcaguacacuuccaaucagccgaaggaauaccugccauauagucuggauaaccccuccaaacccagagaagacuucuauuacuccgaauuuuauccuuggucccccgacgaaaauuuucccagcuacaacaccgcauccacuaugccuccucccaucgaaucaaggggcuacuauguuaacaaugcugccggcccggaagaaucuacguuguucccuagcagaaacagcugggaccacaggauccaggcgcagggccagcgugaacgucguccuuauuucaaucgcaacauuugggaucaggcuacccaccugcagaaagcucccgcuagacccccugaccagaaggggaaccagccauauuacagcaauacucccgcaggacugcagaagaauccaauuuggcaugaaggagaaaaucugaacuaugguaugcagaucacgcgcaugaacucaccugagagagaacacucauccuuccccaauuucaucccccccucuuauccaucaggacaaaaggaagcgcaccuguuccauuugagucaaaggggaucuuguugcgccggcucaaguacaggcccuaaagacaacccacuugcacuccaagacuauacgccaaguuauggauuggcucccggcgagaaucaagacacgucuccccuuuacacggauggaucccauacuaagcaaacucgcgacaucaucucuccuacaucuauuuuaccgggucaacgcaacaguuccgagaaaagagagucucaaaauccuuuucgugacgacguuuccacacugcggcguaauacgccuugcucuaucaaaaaucagcucggucaaaaagaaauuaugccuuuccccgaagcuucaucacugcaguccaaaaacacgccaugcuuaaagaacgauuugggaggggacgguaacaauauuuuagaacaagucuuugaagacaaccagcuuaacgaacgaacaguggaccugacuccagagcagcuagucauuggcacaccggaugagggaucuaaucccgaaggaauccagucacaagugcaggagaacgagagcgagcgacaacagcagaggccuagcaacauccuccaccucccuuguuuuggaucaaaacucgccaaacaucacaguagcaccacgggcacccccucaagcgaugggagacaauccccuuucgacggcgacucuaucacaccaacagaaaauccaaacacauuagucgaacuggccacagaagagcaguucaaaucaaucaauguggaccccuuggaugcugacgagcauagcccauucgaauucuuacagcgggggacaaacguccaggaucaggugcaggauugccuccuccuacaagcguag

SEQ ID NO: 222155 - protein, 665 aa, Artificial Sequence
  derived and/or modified sequence
MVEAIVEFDYQAQHDDELTISVGEIITNIRKEDGGWWEGQINGRRGLFPDNFVREIKKEMKKDPLTNKAPEKPLHEVPSGNSLLSSETILRTNKRGERRRRRCQVAFSYLPQNDDELELKVGDIIEVVGEVEEGWWEGVLNGKTGMFPSNFIKELSGESDELGISQDEQLSKSSLRETTGSESDGGDSSSTKSEGANGTVATAAIQPKKVKGVGFGDIFKDKPIKLRPRSIEVENDFLPVEKTIGKKLPATTATPDSSKTEMDSRTKSKDYCKVIFPYEAQNDDELTIKEGDIVTLINKDCIDVGWWEGELNGRRGVFPDNFVKLLPPDFEKEGNRPKKPPPPSAPVIKQGAGTTERKHEIKKIPPERPEMLPNRTEEKERPEREPKLDLQKPSVPAIPPKKPRPPKTNSLSRPGALPPRRPERPVGPLTHTRGDSPKIDLAGSSLSGILDKDLSDRSNDIDLEGFDSVVSSTEKLSHPTTSRPKATGRRPPSQSLTSSSLSSPDIFDSPSPEEDKEEHISLAHRGVDASKKTSKTVTISQVSDNKASLPPKPGTMAAGGGGPAPLSSAAPSPLSSSLGTAGHRANSPSLFGTEGKPKMEPAASSQAAVEELRTQVRELRSIIETMKDQQKREIKQLLSELDEEKKIRLRLQMEVNDIKKALQSK

SEQ ID NO: 222156 - DNA, 1998 bp, Artificial Sequence
  derived and/or modified sequence
atggtagaggcaatagtcgaattcgactaccaagctcagcacgacgatgaattgactatttcagtcggagagattattaccaacataagaaaggaagacggcggatggtgggaaggccagattaatggaaggaggggcctttttcctgataattttgtgagggagatcaaaaaagaaatgaaaaaagacccccttactaataaggcaccggaaaaaccattacatgaggtgccctctggtaactctttattgtctagcgagactatcctgcgcacaaacaaacgaggggagaggaggagacgccgttgccaggtggcttttagttatctgccccaaaatgatgacgagctggaactgaaggtgggggacatcattgaagttgtgggagaagtggaagaaggatggtgggaaggcgtcttaaatgggaagacaggcatgttcccctctaatttcataaaggagctaagcggcgaaagcgacgaactgggcatttcccaggatgagcaactgagtaaatcctccttaagggagacgactggctctgaatccgatggaggggactcctccagcaccaagagtgagggggccaacggtacggtcgcaactgcagccattcagccaaagaaggtcaaaggggtgggttttggcgatatctttaaggacaagcccatcaagttaagaccaagaagcattgaggtcgagaatgatttcctccctgttgagaaaaccattggcaagaagctcccagcaactaccgctacccccgactcctccaagaccgaaatggactcccgcacaaagtccaaggactattgcaaagtaatattcccctacgaggctcagaatgacgacgagctgactataaaagagggcgatatcgtaaccctgattaataaggactgtatcgacgtcgggtggtgggaaggcgagctaaatggaagacggggcgtgttccctgacaattttgtgaagctgctgccacccgattttgagaaggaagggaatcgacctaaaaaaccaccacccccctctgctcccgtaattaaacagggcgctggcacaaccgagcgcaaacacgagataaagaagattccccccgagaggcccgagatgctacctaatcgaaccgaagagaaagaacgacctgagcgcgagcccaagcttgatctccagaagccctcagtgcctgcaattccccctaaaaagcctagacctcccaaaacgaatagtctgtctagacccggagcactgccacctagaaggcctgaacgtccagtcgggccgcttacccacacacgtggcgacagtcctaagatcgaccttgccggtagctccctgagtggcatactggacaaagatctctcagatcggtccaacgacatcgacctagagggattcgacagcgtcgtcagcagcaccgagaagctttcccaccctaccactagtagacccaaggctaccggccgacgccctccctcccagagtcttacatccagcagtttgtctagcccagacattttcgacagtcccagccctgaggaggacaaagaagagcatatctctttggcccaccgtggggtagatgcatcaaagaaaacttcaaaaacagtcactatcagtcaagtcagcgacaacaaggctagtctgccacccaagccgggaaccatggctgctggcggaggcggacccgctcccttatcttcagccgcccctagccccctgagttcctcactgggcacggccggccatcgtgccaattccccttccctcttcggaactgagggcaagccaaaaatggaacccgccgccagttcacaggctgcagtagaggagctgcggacgcaggttcgcgagttaagatccatcatcgaaaccatgaaagaccagcagaagcgcgaaataaagcagctgctgagcgaactcgacgaagagaaaaagattcgtctgcgtctccagatggaggtgaacgatatcaaaaaagccttacagtccaagtag

SEQ ID NO: 222157 - DNA, 1998 bp, Artificial Sequence
  derived and/or modified sequence
atggtggaggccatcgtggagtttgactaccaggcccagcatgatgatgagctgaccatctctgtgggggagatcatcaccaacatcaggaaggaggatggcggctggtgggagggccagatcaatggccggcggggcctcttcccagacaactttgtgcgggagatcaagaaggagatgaagaaggaccccctgaccaacaaggcccctgagaagcccctgcacgaggtgcccagcggcaacagcctgctgagcagcgagaccatcctgcggaccaacaagagaggagagaggagaagaagacgctgccaggtggccttctcctacctgccccagaatgatgatgagctggagctgaaggtgggggacatcatcgaggtggtgggggaggtggaggagggctggtgggagggcgtgctgaatggcaagacaggcatgttccccagcaacttcatcaaggagctgagcggggagagtgatgagctgggcatcagccaggatgagcagctgagcaagagcagcctgcgggagaccactggaagtgaaagtgatggaggagacagcagcagcaccaagtctgagggcgccaatggaacagtggccacagctgccatccagcccaagaaggtgaagggcgtgggctttggagacatcttcaaggacaagcccatcaagctgcggcccaggagcattgaggtggagaatgacttcctgcctgtggagaagaccatcggcaagaagctgcctgccaccacagccaccccagacagcagcaagacagagatggacagcaggaccaagagcaaggactactgcaaggtgatcttcccctatgaggcccagaatgatgatgagctgaccatcaaggagggggacatcgtgaccctcatcaacaaggactgcattgatgtgggctggtgggagggggagctgaatggccggcggggcgtcttcccagacaactttgtgaagctgctgcccccagactttgagaaggagggcaaccggcccaagaagcccccaccacccagcgcccctgtgatcaagcagggcgccggcaccacagagaggaagcatgagatcaagaagatccccccagagaggcctgagatgctgcccaacagaacagaggagaaggagaggcctgagcgggagcccaagctggacctgcagaagcccagcgtgcctgccatcccccccaagaagcccaggcctcccaagaccaacagcctgagcaggcctggggccctgcccccccggcggcctgagaggcctgtgggccccctgacccacaccaggggggacagccccaagattgacctggccggcagcagcctgagcggcatcctggacaaggacctgagtgacaggagcaatgacatcgacctggagggctttgacagcgtggtgagcagcacagagaagctgagccaccccaccaccagccggcccaaggccactggaagaagaccacccagccagagcctgaccagcagcagcctgagcagcccagacatctttgacagccccagccctgaggaggacaaggaggagcacatcagcctggcccaccggggcgtggatgccagcaagaagaccagcaagacagtgaccatcagccaggtgtctgacaacaaggccagcctgccccccaagccaggcaccatggccgccggcggcggcggccctgcccccctgagcagcgctgcccccagccccctgagcagcagcctgggcacagctggccaccgggccaacagccccagcctgtttggaacagagggcaagcccaagatggagcctgctgccagcagccaggccgctgtggaggagctgcggacccaggtgcgggagctgcggagcatcatcgagaccatgaaggaccagcagaagcgggagatcaagcagctgctgtctgagctggatgaggagaagaagatccggctgcggctgcagatggaggtgaatgacatcaagaaggccctgcagagcaagtag

SEQ ID NO: 222158 - DNA, 1998 bp, Artificial Sequence
  derived and/or modified sequence
atggtggaggccatcgtggagttcgactaccaggcccagcacgacgatgaattgaccatttctgtaggggagataattacaaacatccggaaagaagacggtggctggtgggaaggacagatcaacggtcgaaggggacttttccccgataacttcgtcagggaaattaagaaggaaatgaagaaagacccattgactaataaggccccagaaaaacctctgcacgaggtgccgtctgggaatagcctgctcagcagtgagacaattttgcgcactaacaagcggggtgagaggaggcggcgccgatgccaagtggcattttcctatctgcctcagaacgacgacgaactcgagcttaaagtgggcgatataattgaagtcgttggcgaggttgaagaagggtggtgggaaggggttttgaacggcaaaaccggaatgtttcctagcaattttatcaaggagctatcaggagagtctgacgagctggggatcagtcaggacgagcagttgagcaagagctctctcagagagactacagggagtgagtcagatggtggagattcctcgagtacaaaatcagagggggctaatggcacggtagctaccgccgccatccaacccaagaaagtgaaaggcgtaggatttggcgacatctttaaggacaagccaatcaaactgcgtcctcggtccatcgaagttgagaatgacttcctgcccgtagaaaagaccattggcaagaagctgcccgcaaccacagcgacaccagacagcagtaaaacagagatggactcccggactaaatcaaaagattactgtaaggttatcttcccatatgaggcgcaaaatgacgatgagctgactatcaaagaaggagacattgtgaccttaatcaacaaagactgtattgatgtgggttggtgggagggcgagttaaacggaagaagaggtgtttttcctgataacttcgtgaaacttcttccccctgactttgaaaaagaaggcaataggcctaaaaagccaccccccccgtccgctccggtgataaaacagggcgctggaaccaccgagcgaaaacatgagattaaaaagatacctcccgaaaggccagagatgttgccaaatagaacagaggagaaggaaagacctgaaagagagcctaagctggatctccagaagccgagtgttcccgctatccctcccaaaaagccacggcccccaaaaacaaacagcctgtcacggcccggagctctgccacctcggcgaccagaacgacccgtgggtcctcttacgcatacccgaggcgattctcctaagatcgacctggctggcagcagcctgtccgggatccttgataaagatcttagtgatagatcgaacgacatcgatctggagggctttgatagcgtggtctccagtaccgagaaactgtcccacccgacaacgtctcgccctaaagccaccggccggcggcctccctcacagagcttaacttccagctctttgagtagtcccgacatcttcgattcccctagtcccgaagaagacaaagaagagcacatttcccttgcccaccgcggcgtggacgcctcaaaaaagaccagtaagaccgtgacaatttcacaggtctccgacaacaaggccagcctgccccccaagccaggcactatggccgctggagggggcggacctgcgcccttatcatcagccgccccgagtccattgtcttccagcctcggcactgcgggccatagagccaattctcccagtttattcggtaccgaaggaaaaccaaagatggagcccgcggccagctcccaagctgccgttgaagaactcaggacgcaggtccgtgaactgcggagcatcattgaaacaatgaaggaccagcaaaagagagagattaagcagctgctgtctgaattggatgaggaaaaaaaaattcgccttagactccagatggaagtcaacgacattaaaaaggctcttcagagcaaatag

SEQ ID NO: 222159 - DNA, 1998 bp, Artificial Sequence
  derived and/or modified sequence
atggtggaagccattgtggaatttgattatcaggcccagcatgacgatgagctgaccattagcgtgggggagattatcactaacattagaaaagaggatggtgggtggtgggagggacaaatcaacgggaggcgcggactgttccctgataattttgtgagagagatcaagaaggaaatgaaaaaggatccgctcacgaacaaagccccagaaaagcccctccacgaggtaccctcaggcaattcacttttatctagtgagacaatcctccggaccaacaaacggggagaaagacgaagacgccgatgccaggtagccttctcttacctgcctcagaatgacgatgagctggaactcaaggtcggagatatcatcgaggtggtgggagaagtggaggagggctggtgggaaggagtactgaacggcaagacggggatgttccctagtaatttcatcaaagagctatccggggagagtgatgaactgggaatcagccaggacgagcagcttagcaagtcatcacttcgagaaactaccggctccgagagtgatggaggcgacagttcctccacgaagtctgaaggcgcaaatggcacagtcgccacagcagctattcagcccaagaaggtaaagggagttggcttcggtgacatatttaaagacaagccaatcaaactgagacctaggagcattgaggtggagaatgactttctgcctgtcgagaaaacaattggcaagaagttaccagccacaactgcaacaccggactcgagcaagactgagatggacagccggacgaaatccaaagactactgtaaggtgatcttcccgtatgaagctcagaacgatgacgaactcactattaaggaaggagacatcgtgacgctgatcaacaaggactgtatagacgtgggctggtgggaaggcgaactcaacggaaggcgcggtgtgtttcctgataatttcgtgaagctgctgcccccagactttgaaaaggaaggaaaccggccaaagaaacctccacctccgagtgctcccgttataaagcagggtgcaggaactaccgagaggaagcacgagatcaagaagatccctcccgaaaggcctgagatgttgcctaaccgcaccgaggagaaggaaagacctgaacgagaacctaaactggacctgcagaagccatcagtgccagctatcccgcctaaaaagccaaggccccctaaaactaacagcctgtctcgcccaggcgcactccctccaagacggccagaaagaccagtcggaccccttacccacacacgtggggactctcccaaaatcgaccttgccggttctagcctgagtgggatcttggataaggacctctcagaccgttccaacgacatagatctggagggtttcgatagcgtcgtttcatccaccgagaaactgagccatccaactacctcgcgacccaaggctaccggtcgcaggccccctagccaatctctgacctccagttccctgtcgagcccagatatctttgacagtccatctcccgaagaggacaaggaggagcatatttccctggcacatcgcggagtggacgctagcaagaaaacttcaaagaccgtcacgatttcccaggttagcgataataaagcgtctctgcctcctaaacccggtaccatggcggcagggggaggtggcccagcccctctgagcagcgcagctcctagccctttaagcagtagcttgggcacagccggtcacagggcaaatagcccatcgctgttcggtacagagggcaagccaaaaatggaacctgccgcaagcagccaggccgctgtcgaggaactgcgaacgcaagtgagagagcttcgatctatcatcgagaccatgaaagaccagcagaagcgggaaatcaaacagttgctgagcgagctggatgaagagaagaagattagactgcggctacagatggaagtgaatgatattaagaaagctctgcagtccaagtag

SEQ ID NO: 222160 - DNA, 4731 bp, Artificial Sequence
  derived and/or modified sequence
cgcaatttccactcgcggggagcaggaaacccggcgcagccgggcgcattgggccgcgatgcaacagcagcagcaggagtcgccccggggcagcagcggcagcagcagcagaggcagcagcgggcggcgctgagccgccgccgccgccactgaggaagaagccggcccagccgccgccgcgtccggaccctcgcgcctggatcccagcgccccgatcccggcgccccaacccccacgcccgcctccgccaactttcacgctgcctcggcggcccggcccggctcgacgccaatggtggaggccatagtggagtttgactaccaggcccagcacgatgatgagctgacgatcagcgtgggtgaaatcatcaccaacatcaggaaggaggatggaggctggtgggagggacagatcaacggcaggagaggtttgttccctgacaactttgtaagagaaataaagaaagagatgaagaaagaccctctcaccaacaaagctccagaaaagcccctgcacgaagtgcccagtggaaactctttgctgtcttctgaaacgattttaagaaccaataagagaggcgagcgacggaggcgccggtgccaggtggcattcagctacctgccccagaatgacgatgaacttgagctgaaagttggcgacatcatagaggtggtaggagaggtagaggaaggatggtgggaaggtgttctcaacgggaagactggaatgtttccttccaacttcatcaaggagctgtcaggggagtcggatgagcttggcatttcccaggatgagcagctatccaagtcaagtttaagggaaaccacaggctccgagagtgatgggggtgactcaagcagcaccaagtctgaaggtgccaacgggacagtggcaactgcagcaatccagcccaagaaagttaagggagtgggctttggagacattttcaaagacaagccaatcaaactaagaccaaggtcaattgaagtagaaaatgactttctgccggtagaaaagactattgggaagaagttacctgcaactacagcaactccagactcatcaaaaacagaaatggacagcaggacaaagagcaaggattactgcaaagtaatatttccatatgaggcacagaatgatgatgaattgacaatcaaagaaggagatatagtcactctcatcaataaggactgcatcgacgtaggctggtgggaaggagagctgaacggcagacgaggcgtgttccccgataacttcgtgaagttacttccaccggactttgaaaaggaagggaatagacccaagaagccaccgcctccatccgctcctgtcatcaaacaaggggcaggcaccactgagagaaaacatgaaattaaaaagatacctcctgaaagaccagaaatgcttccaaacagaacagaagaaaaagaaagaccagagagagagccaaaactggatttacagaagccctccgttcctgccataccgccaaaaaagcctcggccacctaagaccaattctctcagcagacctggcgcactgcccccgagaaggccggagagaccggtgggtccgctgacacacaccaggggtgacagtccaaagattgacttggccggcagttcgctatctggcatcctggacaaagatctctcggaccgcagcaatgacattgacttagaaggttttgactccgtggtatcatctactgagaaactcagtcatccgaccacaagcagaccaaaagctacagggaggcggcctccgtcccagtccctcacatcttcatccctttcaagccctgatatcttcgactccccaagtcccgaagaggataaggaggaacacatttcacttgcgcacagaggagtggacgcgtcaaagaaaacttccaagactgttaccatatcccaagtgtctgacaacaaagcatccctgccgcccaagccggggaccatggcagcaggtggcggtgggccagcccctctgtcctcagcggcgccctcccccctgtcatcctctttgggaacagctggacacagagccaactccccgtctctgttcggcacggaaggaaaaccaaagatggagcctgcggccagcagccaggcggccgtggaggagctaaggacacaggtccgcgagctgaggagcatcatcgagaccatgaaggaccagcagaaacgagagattaaacagttattgtctgagttggatgaagagaagaaaatccggcttcggttgcagatggaagtgaacgacataaagaaagctctacaatcaaaatgaatacttgatcaatgaaatgtcacattattcatcctgagtccgagactcaaattttctgccccagccaaaataatcttgtgccaaaagattaaaggtttgcctcaaaatgtccctgtttgaaagattagcacaaaagtcttgatagcacaacacaaattccatccaagaggagaatcttccccagggtttagtcctggggctggcactcgttgtgacttacacagagcaaaattgtgctaaaggcttttctactctgagatctcaatgcgaaatgaaaactcaggcagtttagtccatagtggtactattttgatgatattttccattaataaaatgtaatttcagattattcgtttacaagctttataattttatgattttttaatcgtgttttgtcacagacttccctagtgtttgtactacacgtagtcagaagcgagtgtccttttcttttgcttcaggctaagagctgcctcgctctttgtccccccattaggattctattacatatgcaattgtaggttcaacctgtccctttccctgccagcaaaccccaccaccctaagagaaattttagcttatatatgacggtatatttacaaaaagagaaagagaaaatctggtatttgcaatgatctgtgccttctttttaccaccctcttgattggagcttttgtgatgcagctaccatgattcaaaaaaattaaaaattaaaaaaaaaaaatctgccacttatccaagtccactagaggccactgtcttcaaagcttctctcaccctagccaaaggtcctaagaggagacagctgtgaagttgggcgtgctctgtggtaccagctgtgacttttctatttctcctagttttaggttgttcatgaaactagaaatgtcatcctgcttgatttttcatcagccaagttaaacccctgctttctgtcctttgcaccttttgcgtgaacagaatatgcattattaaagcaaaaataaataaaagtaaaatgcaaatgaaaacaagggagggaaagttgtattatttcctgcactgggttacccgtgtgtgttatcgtttaaactgtattcacataatgtcatttgccttgctcacttgtaaccccttcctcaggtccaagagaatgggaggagggtcatgttgaagtgtagccactggaactttcttgcatttatggagttgctttttctttcccaaggaaactgatgtttgcctgtccgctttatctttgtagtacatgaacagttcagccttagactatgtaactgttttctcatccttagctgaaaatgaggggcctactgtattgcgagactgttcaggggtaggggtggagggggtggtcccttaatggcccctgaagatgttggatgtgtttctcaaaagctgctttgtctctttcctgagtttaatagtgaaactactaaacattaatagatttgcacagccacaaagaatgagagttgataataccgaagaagtgatgcaaaaacaaaaaatcacattactgatcattgatagtattacaaataaatgtctcttcctttctcttcctcccttcctccccctgccttcctcttaacctatgtgctcatccttgctacttgaggctgttatttccctccgagtatttaaggagcccaaacaccttggtcttcctgggtgggggcataattaagggaagggagtgtataaggaaggaaacctcataccctccattcccatccctggatatattgccttttcagcagcctcgggttcagtgtgcttggggtcaggagtgccaggttcccaagagcagcgtaaaacatccctgtaccccttgacagttataagcatttctgcgttaaacttgaagattccagagattccccacgacctaatgatctaagaatgcagattggattctttgatgttcaaatttctcatttacttatgaaaatccctaattatatagttttatataatgtgtatacagagtaggattgttgatgaaattgagcggttggaacaccctcatggaacactggcaacatggaatgtagagagctgatgtcttccccctcatagaggccattggcttcctttgtataaggagagggagaagtgattctggaaggagaagttggtatgtctagcttcattgcggcccctcgggctacccagcaagaggattctgcatcaaggaactggacgagccgctacccaaactgccaccatctttactctttacaaaatggacccatcgagaatgttgaaaagcttggaagtatcacttttgaaaaaaaaaaaaattattttgcattcagcatggactcgaccaggcatctatggagattatttttttgcttcattttataaagttgtatttagaaaagtcttaagtattgtgctttgtaaagaagatgattaaaatgaaattttgtgagaata

SEQ ID NO: 222161 - DNA, 1998 bp, Artificial Sequence
  derived and/or modified sequence
atggtggaggccatcgtggagttcgactaccaggcccagcacgacgacgagctgaccatcagcgtgggcgagatcatcaccaacatcagaaaggaggacggcggctggtgggagggccagatcaacggcagaagaggcctgttccccgacaacttcgtgagagagatcaagaaggagatgaagaaggaccccctgaccaacaaggcccccgagaagcccctgcacgaggtgcccagcggcaacagcctgctgagcagcgagaccatcctgagaaccaacaagagaggcgagagaagaagaagaagatgccaggtggccttcagctacctgccccagaacgacgacgagctggagctgaaggtgggcgacatcatcgaggtggtgggcgaggtggaggagggctggtgggagggcgtgctgaacggcaagaccggcatgttccccagcaacttcatcaaggagctgagcggcgagagcgacgagctgggcatcagccaggacgagcagctgagcaagagcagcctgagagagaccaccggcagcgagagcgacggcggcgacagcagcagcaccaagagcgagggcgccaacggcaccgtggccaccgccgccatccagcccaagaaggtgaagggcgtgggcttcggcgacatcttcaaggacaagcccatcaagctgagacccagaagcatcgaggtggagaacgacttcctgcccgtggagaagaccatcggcaagaagctgcccgccaccaccgccacccccgacagcagcaagaccgagatggacagcagaaccaagagcaaggactactgcaaggtgatcttcccctacgaggcccagaacgacgacgagctgaccatcaaggagggcgacatcgtgaccctgatcaacaaggactgcatcgacgtgggctggtgggagggcgagctgaacggcagaagaggcgtgttccccgacaacttcgtgaagctgctgccccccgacttcgagaaggagggcaacagacccaagaagccccccccccccagcgcccccgtgatcaagcagggcgccggcaccaccgagagaaagcacgagatcaagaagatcccccccgagagacccgagatgctgcccaacagaaccgaggagaaggagagacccgagagagagcccaagctggacctgcagaagcccagcgtgcccgccatcccccccaagaagcccagaccccccaagaccaacagcctgagcagacccggcgccctgccccccagaagacccgagagacccgtgggccccctgacccacaccagaggcgacagccccaagatcgacctggccggcagcagcctgagcggcatcctggacaaggacctgagcgacagaagcaacgacatcgacctggagggcttcgacagcgtggtgagcagcaccgagaagctgagccaccccaccaccagcagacccaaggccaccggcagaagaccccccagccagagcctgaccagcagcagcctgagcagccccgacatcttcgacagccccagccccgaggaggacaaggaggagcacatcagcctggcccacagaggcgtggacgccagcaagaagaccagcaagaccgtgaccatcagccaggtgagcgacaacaaggccagcctgccccccaagcccggcaccatggccgccggcggcggcggccccgcccccctgagcagcgccgcccccagccccctgagcagcagcctgggcaccgccggccacagagccaacagccccagcctgttcggcaccgagggcaagcccaagatggagcccgccgccagcagccaggccgccgtggaggagctgagaacccaggtgagagagctgagaagcatcatcgagaccatgaaggaccagcagaagagagagatcaagcagctgctgagcgagctggacgaggagaagaagatcagactgagactgcagatggaggtgaacgacatcaagaaggccctgcagagcaagtag

SEQ ID NO: 222162 - protein, 189 aa, Artificial Sequence
  derived and/or modified sequence
MMWSNFFLQEENRRRGAAGRRRAHGQGRSGLTPEREGKVKLALLLAAVGATLAVLSVGTEFWVELNTYKANGSAVCEAAHLGLWKACTKRLWQADVPVDRDTCGPAELPGGLLLLVSLEVFRHSVRALLQRVSPEPPPAPRLTYEYSWSLGCGVGAGLILLLGAGCFLLLTLPSWPWGSLCPKRGHRAT

SEQ ID NO: 222163 - DNA, 570 bp, Artificial Sequence
  derived and/or modified sequence
atgatgtggtccaatttcttcctgcaagaggaaaataggcggagaggcgctgcgggcaggcgaagagcacatgggcagggtcgatcaggactgacccctgagagagagggcaaggtcaagctcgccttactcctcgctgcggtaggggcaaccctcgcggttctgtccgtaggcaccgagttttgggtggaactgaatacatacaaagccaatggctccgcagtgtgtgaagcagcccacttaggactgtggaaggcgtgtaccaagagattgtggcaggccgatgtaccagtggaccgggatacatgcggtccagccgaacttccaggcgggttgctcctgctggtgagccttgaggtgttcagacattcagtcagagctctgctgcagcgcgtttcacctgagccaccaccagcccctcgtctaacctacgagtactcctggtcgctgggctgcggcgtcggcgccgggcttattctgctgttaggcgcaggttgctttctgctgctgaccctgcccagctggccttggggaagcctttgcccaaagagaggtcaccgcgctacgtag

SEQ ID NO: 222164 - DNA, 570 bp, Artificial Sequence
  derived and/or modified sequence
atgatgtggagcaacttcttcctgcaggaggagaacagaagaagaggagctgctggaagaagaagagcccacggccagggccgcagcggcctgaccccagagcgggagggcaaggtgaagctggccctgctgctggccgctgtgggcgccaccctggccgtgctgtctgtgggcacagagttctgggtggagctgaacacctacaaggccaatggatctgctgtgtgtgaggccgcccacctgggcctgtggaaggcctgcaccaagaggctgtggcaggctgatgtgcctgtggaccgggacacctgtggccctgctgagctgcccggcggcctgctgctgctggtgtccctggaggtgttccgccacagcgtgcgggccctgctgcagagggtgtccccagagcccccaccagccccccggctgacctatgagtacagctggagcctgggctgcggcgtgggcgccggcctcatcctgctgctgggcgccggctgcttcctgctgctgaccctgcccagctggccctggggcagcctgtgccccaagaggggccaccgggccacctag

SEQ ID NO: 222165 - DNA, 570 bp, Artificial Sequence
  derived and/or modified sequence
atgatgtggagcaacttcttcctgcaggaggagaaccggcggcggggggccgctggccgaagaagggcccacggtcagggcagatcaggcttaactcccgagcgcgaaggtaaggttaaactcgcactcctactggctgccgtgggcgctactttggctgtgcttagcgtgggaaccgaattttgggtcgagctgaatacctataaagctaacggctcagcagtttgtgaggccgcccacctggggctttggaaagcttgcactaagagactgtggcaagccgacgttcccgtggacagagacacatgcggccctgcggaacttcctgggggactcctcctgctggtgagtttggaggtatttaggcactccgtgagggccctgctgcaacgagtttcccccgaacctccccccgcgccccgcctgacatatgagtatagctggtctctgggatgtggcgtgggggcaggactcatccttctgttaggagcgggttgtttcctacttctgaccctcccatcctggccttggggatctctttgtcctaagcgcgggcaccgggctacctag

SEQ ID NO: 222166 - DNA, 570 bp, Artificial Sequence
  derived and/or modified sequence
atgatgtggtctaacttcttcctgcaggaggagaaccggagaagaggggcagccggaagacgtagagcgcatggacagggcaggtcagggttaacccctgaacgcgaaggaaaagtgaaactcgcgcttcttctggccgctgtaggggctaccctggccgtactctctgtggggacagagttctgggtggaactgaacacttacaaggcaaacggttcggctgtatgtgaggcggctcacctgggcctgtggaaagcttgcactaaaagactgtggcaagccgatgtgcctgttgacagagatacatgcggaccagccgagctgccagggggtctgctccttctggtgtcactggaagtctttcgacatagcgtccgcgctctgcttcagcgggtgtcgccagagcctccccctgcacctaggttgacttacgagtactcctggagcctggggtgtggggttggagccggactcattcttttgctcggcgctggctgttttctgctactgaccctccctagctggccctggggctctctctgccccaagcgcggacatcgcgctacttag

SEQ ID NO: 222167 - DNA, 1635 bp, Artificial Sequence
  derived and/or modified sequence
ccaagtcctctgttctcaaactctgagcccaagggaaccccggccacatctcctccaaacacacacaggacctcaggtcccttcctgggtaccccaaactcttagccctagtggggtgctcagatctctcaggaaaaccagtttcccttttgttaaccccccagcggggaccccaaagcagccccttggagctgcagggagcttcagcgggcaccagttctcattcctctggagctcttggggggactccctcctgggaagccgaattctatctctaaacctcagggtgggggccttgtttttcctctgggccccgtcttctttgccaagttcttgagggcaacctagaccctcctctgaaccccagaggcttccccagccctggggatcatttttctcttctgaaccccagaagcaatctcgactttcgcatttgagattccagacaggactcggctctccctctttcatacccaggggaaactgagtccctcacccccttcaagaccccaggccgctcctcgctcccgcccctcgaggcccttcgccggctctgcctcctcccccttcccgaccccaccggccataagatgatgtggtccaacttcttcctgcaagaggagaaccggcggcggggggccgcgggccggcggcgggcgcacgggcagggcaggtcggggctgacgcccgagcgcgaggggaaggtgaagctggcgctgctgctggccgccgtgggcgccacgctggcggtgctgtccgtgggcaccgagttctgggtggagctcaacacctacaaggccaacggcagcgccgtgtgcgaagcggcccacctggggctgtggaaggcgtgcaccaagcggctgtggcaggcggacgtgcccgtggacagggacacctgcggccccgcggagctgcccggaggcctgctgctcttggtgagcctggaggtgttccggcattccgtgagggccctgctgcagagagtcagcccggagcctcccccggccccacgcctcacctacgagtactcctggtccctgggctgcggcgtgggggccggcctgatcctgctgttgggggccggctgctttctgctgctcacactgccttcctggccctgggggtccctctgtcccaagcgggggcaccgggccacctagagccacgcgtgagacttctctaagcaaccaccgagccctttgaccttctccattgtacccccaagatctttttgccccatctcctagagaaactgtgttctccctgctcgggggcccatgtttttttacacgcctgcctcctgtccccttatcctttctccctctgtaaatacgtttttctctgtggctgtatgtgggttgcttgggggtgggatgggaagaggctctttgcaaacgagggtccccagagaagactggcggggacctgatggggtagctggggtgtggggttgggggatgaggtcagggggtcttgggtgggagttgggggccccttcatttcccaggtctggatcgattcacttgccgggagagactttttacaactcatctgcagctccgggtgcggttgggggagatagcgaagggtctggcctcgctgtgatctgatttgggattaaaggtttggaaattt

SEQ ID NO: 222168 - DNA, 570 bp, Artificial Sequence
  derived and/or modified sequence
atgatgtggagcaacttcttcctgcaggaggagaacagaagaagaggcgccgccggcagaagaagagcccacggccagggcagaagcggcctgacccccgagagagagggcaaggtgaagctggccctgctgctggccgccgtgggcgccaccctggccgtgctgagcgtgggcaccgagttctgggtggagctgaacacctacaaggccaacggcagcgccgtgtgcgaggccgcccacctgggcctgtggaaggcctgcaccaagagactgtggcaggccgacgtgcccgtggacagagacacctgcggccccgccgagctgcccggcggcctgctgctgctggtgagcctggaggtgttcagacacagcgtgagagccctgctgcagagagtgagccccgagcccccccccgcccccagactgacctacgagtacagctggagcctgggctgcggcgtgggcgccggcctgatcctgctgctgggcgccggctgcttcctgctgctgaccctgcccagctggccctggggcagcctgtgccccaagagaggccacagagccacctag

SEQ ID NO: 222169 - protein, 440 aa, Artificial Sequence
  derived and/or modified sequence
MGLGVSAEQPAGGAEGFHLHGVQENSPAQQAGLEPYFDFIITIGHSRLNKENDTLKALLKANVEKPVKLEVFNMKTMRVREVEVVPSNMWGGQGLLGASVRFCSFRRASEQVWHVLDVEPSSPAALAGLRPYTDYVVGSDQILQESEDFFTLIESHEGKPLKLMVYNSKSDSCREVTVTPNAAWGGEGSLGCGIGYGYLHRIPTQPPSYHKKPPGTPPPSALPLGAPPPDALPPGPTPEDSPSLETGSRQSDYMEALLQAPGSSMEDPLPGPGSPSHSAPDPDGLPHFMETPLQPPPPVQRVMDPGFLDVSGISLLDNSNASVWPSLPSSTELTTTAVSTSGPEDICSSSSSHERGGEATWSGSEFEVSFLDSPGAQAQADHLPQLTLPDSLTSAASPEDGLSAELLEAQAEEEPASTEGLDTGTEAEGLDSQAQISTTE

SEQ ID NO: 222170 - DNA, 1323 bp, Artificial Sequence
  derived and/or modified sequence
atgggcctcggcgtgtcagctgaacagccagccggcggcgccgaaggcttccacctgcatggcgtccaggaaaacagcccagcccagcaggcaggcctggagccatatttcgatttcatcatcacgattggacatagcaggttgaacaaggagaatgacaccctgaaggcccttctgaaggccaacgtagagaaacctgtcaagttggaagtttttaacatgaagaccatgagagtgcgggaagtagaggtggtgccgtctaacatgtggggcgggcaaggcctgttgggggcttccgtcaggttctgtagctttcggcgggccagtgagcaggtgtggcacgtcctggacgtggagccctcttctccagctgctctcgccggcctcaggccatatacagattatgtggtcggttcggatcaaatcctgcaggaaagcgaggattttttcaccctgatcgaatcacacgagggaaaacccttaaaactcatggtgtataatagcaagtctgactcctgtagagaggttacagtgactccaaacgcagcttgggggggggaaggatccctcggatgcgggatcgggtacggctacctgcacagaattcctactcagcccccttcttaccataagaagcctccaggaacacctcctcccagcgccctgccgctgggtgccccaccaccagatgctcttcctccgggcccaactcctgaggactctccttctctagaaacaggatccagacaatctgattacatggaagctttgctgcaggccccggggtccagcatggaggatccccttcctggaccagggtctcccagccatagcgcccccgatcccgatggcttaccccacttcatggaaacaccgcttcaaccccctccccctgtccaaagggtgatggaccccggctttttggatgtgagcgggatctccctcttggataattccaacgcttccgtctggcctagtctgcctagcagcacggagctgaccactactgcagtctcaacttccggccctgaagatatctgctcaagcagtagtagtcacgagcggggtggtgaagctacgtggtctgggtctgagttcgaagtaagcttcttagactctcctggagctcaggcccaggcagatcatctgcctcagctcactcttccggatagcctgacatctgctgcatccccggaggacggcctcagcgccgagttgctcgaagcccaagcagaagaagagccagcgtctacagaggggcttgacaccgggactgaagccgaagggcttgatagtcaggcgcagatttcaactaccgaatag

SEQ ID NO: 222171 - DNA, 3722 bp, Artificial Sequence
  derived and/or modified sequence
agatgggagggaggctgttgcaggctctcaggggggagagatggtgctggttctgggctagaagataaaaagataaaaagaaaacccaggagacatcaaggagctggcatttcttgtagacaggattagaagatgagtatagggaagaggtatgagttaaggctaggagattaaatggtgaagccatcaactggggtgggaggcgcaggcgagagtgagctgggtggaagaagggatgatgacaagaagggataatgatagtgattggatgagctggtttggggtagctcaagaaacggggatgctaatttggggctcagggtgcgcagaagccaccggagaagacgcccttgccagggggagtggggcaagaaaaggcaggaccgcctgatataactgaggacagcgaagggtggcaggagagtagcagggcagacggtctctgggtcaggggcggggagtcacgagggagccctcggacagcgcccgggccacgcaccataagggaggagtcattgctgctcatctcgggccgctcgcggctccgagtccgggtctggtggggcggtgcagagcgggattcccgaggcagggtcgtgggcactctatcgcggcgggcggttgaaggcgttacagtccttggaaaccgagctgctagccggttgctaggagcgtccagtgtctggagtgggaggaacaaaacgcctcacgtcacaaggcgcaggaatcgagcgccgagagagcgagtcggtgctactggcgtcgggtcggtccgggtaggcgcagcgggactggacctgggtgccgagcggagccgctgccatgggcctgggcgtcagcgctgagcagcccgcaggcggcgccgagggcttccacctccacggggtgcaggagaactccccagcccagcaggcgggcctggagccctactttgacttcatcatcaccattgggcactcgaggctgaacaaggagaatgacaccctgaaggcactactgaaagccaatgtggagaagcccgtgaagctggaggtgttcaatatgaagaccatgagggtgcgcgaggtggaggtggtgcccagcaacatgtggggcggccagggcctactgggtgccagtgtgcgcttctgcagcttccgcagggccagtgagcaggtgtggcatgtgctggatgtggaaccatcttcacctgctgcccttgccggcctgcgcccctacacagactatgtggttggttcggaccagattctccaggagtccgaggacttctttacgctcatcgagtctcatgaggggaagcccttgaagctgatggtgtataactccaagtcagactcctgccgggaggtgactgtaactcccaacgcagcctggggtggagagggcagtctgggatgtggcattggctatgggtatctacaccggatcccaactcagccccccagctaccacaagaagccacctggcaccccaccaccttctgctctaccacttggtgccccaccacctgatgctctaccacctggacccacccccgaggactctccttccctggagacaggttccaggcagagtgactacatggaggccctgctgcaggcacctggctcctccatggaggatccccttcctgggcctgggagtcccagccacagtgctccagaccctgatggacttccccatttcatggagactcctcttcagcccccacctccagtgcagcgagttatggacccaggcttcctggacgtgtcgggaatttctctcttggacaacagcaatgccagtgtgtggcccagcctgccctcttccacagaactgaccaccacagctgtctcaacctcagggccagaggacatctgctccagcagcagttctcatgagcggggtggtgaggctacatggtctgggtcagagtttgaggtctccttcctggacagcccaggtgcccaagcccaggcggaccacctgcctcagctgactcttcctgacagtctcacctctgcagcctcaccagaagatgggctgtccgccgagctgcttgaagctcaggctgaggaggaaccagcaagcacagagggcctagatactgggacggaggctgaggggctggacagccaggcccagatctctaccacagaataacaccctgggctgtgacaaggcccatgatgacatttcatgaggcccagatgtgggcaggcagcccgggctgcactatgcggtcaggattccttgctgctttggtgggacatgaggcctcagtgggtggtgagagggggccatgggccttgtgggaggatatcttttggccgtgtaccctcaggtccagtgcttggtcctgctctggtcactggggcttcccaggaggcagcagggtctggtcataatccagtgtgaagatgaggtgaggaaggaaggggttgctgtccagtgttggcctggtcgctttgattcttcctgcacagctcagcccaccccatctgtactggaagggaccctggagccctgggaccaccccctttcaagtcccaaacactgagtcctctgtcatgtgtccttgtccctaggctacaatgctacacttggctcaggctgatcaccatgctagtcacaggagggagagagaggcagtgtacttgcccccatctcctggagggaggtgcgttggaaattctaggcccttcagcagagacccatttgtgcccagaccacaatatttcttcttcctcagggactacatgccacagacctgtatccccagtggcaactcctgttagctcccaaacttaaacagtgatctcttctaaatatacaaggcatctacccagccccaatagtgaataaaagtcacaaatttaagttcaacaccctaagcaatttctcaaagccagtctacctgactaggtctatccacgcacggttcccaaccccaagggggaattaggggattagattaagagtaggtaaagacccttttgttctttcctgttgtaggggaggaagctgttctccccaccccaggtgcctttggaggttaaggctaggttaggccctgcactccacctggggacggcccctcatcacctgaagtcctctgctgtgttgactggaccctcagttcccacactgctaattactatgaaagctgctctggcctcgtcttctagcttgtgcctagttgaaagtctcacctttacaggatcatttgtaatgctggtgtacatgcagggaactcacaagctgtgtcaggtatgcaggacaaggaatgtctgctctggggggcacaggccaactatatggagggagggtcccaaattagcaaacccttcatttaaagcaaacccttgtcaagcctaccagagcagctgatacgtgtgcataacagtgaggcattgtgtcctggatcgtctgggagcccagtgtcaagtctgctggaatgcaggaagtagaacagaatcgccacaggactgttctggggccagcttcccttaactctgtagcctggcagtctgacccaaagttgccctcacccaaaggttctggctcttccctccctcacttttactttcccttcccccataagttggaggataaaatgggtatcaatgctaatatttccagggagaacatgaaaccagaggtttctttctttctctgtaatctgctatgaaagaaaataacaaatgaaaataaatgtgtactacactttgaaatatttt

SEQ ID NO: 222172 - DNA, 1323 bp, Artificial Sequence
  derived and/or modified sequence
atgggcctgggcgtgtctgctgagcagcctgctggaggagctgagggcttccacctgcacggcgtgcaggagaacagccctgcccagcaggccggcctggagccctactttgacttcatcatcaccatcggccacagccggctgaacaaggaaaatgacaccctgaaggccctgctgaaggccaacgtggagaagcctgtgaagctggaggtgttcaacatgaagaccatgagggtgcgggaggtggaggtggtgcccagcaacatgtggggcggccagggcctgctgggcgcctctgtgcgcttctgcagcttccggcgggccagcgagcaggtgtggcacgtgctggatgtggagcccagcagccctgctgccctggccggcctgcggccctacacagattatgtggtgggcagtgaccagatcctgcaggagagcgaggacttcttcaccctgattgagagccatgagggcaagcccctgaagctgatggtgtacaacagcaagagtgacagctgccgggaggtgacagtgaccccaaatgctgcctggggcggggagggcagcctgggctgcggcatcggctacggctacctgcaccgcatccccacccagccccccagctaccacaagaagcccccaggcaccccaccacccagcgccctgcccctgggcgcccctcctccagatgccctgcccccaggccccaccccagaggacagccccagcctggagaccggcagccggcagagcgactacatggaggccctgctgcaggcccctggcagctccatggaggaccccctgcccggccctggcagccccagccacagcgccccagaccctgatggcctgccccacttcatggagacccccctgcagcccccacctcctgtgcagagggtgatggaccccggcttcctggatgtgtctggcatcagcctgctggacaacagcaatgcctctgtgtggcccagcctgcccagcagcacagagctgaccaccacagctgtgtccaccagcggccctgaggacatctgcagcagcagcagcagccatgagcggggcggggaggccacctggagcggcagcgagtttgaggtgtccttcctggacagccctggggcccaggcccaggccgaccacctgccccagctgaccctgcctgacagcctgaccagcgctgccagcccagaagatggcctgtctgctgagctgctggaggcccaggccgaggaggagcccgccagcacagagggcctggacacaggaacagaagctgagggcctggacagccaggcccagatcagcaccacagaatag

SEQ ID NO: 222173 - DNA, 1323 bp, Artificial Sequence
  derived and/or modified sequence
atgggcctgggcgtgagcgccgagcagcccgccggcggcgccgagggcttccacctgcatggtgttcaggaaaactctcccgctcaacaggcaggcctcgagccttacttcgactttatcataacaatcggccattccaggctcaataaagaaaacgacactctcaaggccctattgaaagccaatgtagagaaacccgttaaattagaagtttttaacatgaagaccatgagggtgcgcgaagttgaagttgtgccatccaatatgtgggggggtcaggggctgctgggggcttcagtgaggttttgttcgtttaggcgggcctcagagcaggtttggcacgtgctcgacgtcgagccgtccagtccagccgccttagcagggctccgaccgtataccgactatgttgtgggctcggatcagatccttcaggagagtgaggatttctttaccttgattgagtcccatgaaggcaagccattaaagctaatggtctacaactccaaaagtgactcgtgtcgcgaggtcacagtcacaccaaacgccgcctggggcggggaaggcagcctgggctgtgggattggttatgggtatctgcatagaatccctacccagcctccatcgtaccacaagaaacctccgggcactcctccgcccagtgccctgcctctgggggcaccccccccggacgccctgcccccagggccgaccccggaggacagcccttctctggaaacaggcagtcggcagtccgactacatggaggcactgcttcaggctcccggcagttctatggaagatcctctccctggtcccggctcgccatctcattcagcacccgatcccgacggtctgcctcactttatggaaacccccctccaacctccccctccagtacagagggtaatggaccctggcttcttagatgtgtcagggatttcattactcgataattccaacgcttctgtttggccaagcctgccaagctcaacggagctgaccacaacagctgtgagcacatccggcccggaagatatctgctcctcttccagcagccacgaacgaggcggagaggcaacttggagtggaagtgagtttgaggtgtcttttcttgattcgccaggagcgcaagcccaggcagatcacttacctcaattaaccctgcccgactctctgaccagcgccgcaagcccggaagacggcttatccgctgagctcttggaagcgcaggctgaagaggagccagctagcaccgaaggactcgataccggcaccgaagctgaggggctggactcacaagcccagattagcactacagagtag

SEQ ID NO: 222174 - DNA, 1323 bp, Artificial Sequence
  derived and/or modified sequence
atggggctcggtgttagcgccgagcagcccgctgggggtgctgagggattccacctgcacggagtgcaggagaacagcccagcacagcaggccggactggagccatattttgattttattattactattggacactcgagactgaataaggagaacgataccctgaaggccctgttgaaggcaaacgtagagaaaccggttaagcttgaggtgtttaacatgaaaaccatgagggtgagggaagtcgaagtggtcccctccaacatgtggggaggccaaggcttactcggagctagtgtgaggttctgctcctttcgaagagcttccgaacaggtttggcatgtgcttgacgtcgagcctagcagccctgccgctctggcgggacttaggccgtacaccgattacgtggtgggctcagaccagatcctgcaggagtcagaagacttcttcacgcttatcgagagccacgaaggcaagccactgaagctgatggtttacaactcaaaaagcgactcttgtcgcgaagtgacagtgactccaaatgctgcttggggaggcgaggggagtctgggatgtggaatcgggtacggctacctgcatcgtattcctacccagccgcctagttatcacaaaaagcctccagggaccccaccaccttcagccctgcccctgggtgcacccccaccggacgctctgcccccaggccctactcccgaggactcaccctccctggagactggctcacgccagtcagactatatggaagccctactgcaggcccctggatctagtatggaagatcccctgccaggccctgggtctccctctcacagcgcccctgatcctgatgggctgccccacttcatggaaacgcccttgcaaccaccccctcccgttcagcgcgtgatggacccaggttttctggacgtttccggtatatcactgctggataattcaaatgcatccgtttggccgtccttgccctcttctacagaactgaccactacagcggtgtctacttctggacctgaggatatctgcagctctagcagttctcacgaaagaggaggagaggccacttggtcgggatcagaattcgaagtgagcttcctcgattcccccggtgcccaagctcaggcggatcatttgcctcaactcactttgccggactcactcacctccgccgcaagccctgaggatggcctgagcgccgagcttctggaggcacaggctgaagaggagccagcttcaactgagggtcttgacacgggcaccgaagctgaaggactagacagccaggcgcagattagtaccaccgaatag

SEQ ID NO: 222175 - DNA, 1323 bp, Artificial Sequence
  derived and/or modified sequence
atgggcctgggcgtgagcgccgagcagcccgccggcggcgccgagggcttccacctgcacggcgtgcaggagaacagccccgcccagcaggccggcctggagccctacttcgacttcatcatcaccatcggccacagcagactgaacaaggagaacgacaccctgaaggccctgctgaaggccaacgtggagaagcccgtgaagctggaggtgttcaacatgaagaccatgagagtgagagaggtggaggtggtgcccagcaacatgtggggcggccagggcctgctgggcgccagcgtgagattctgcagcttcagaagagccagcgagcaggtgtggcacgtgctggacgtggagcccagcagccccgccgccctggccggcctgagaccctacaccgactacgtggtgggcagcgaccagatcctgcaggagagcgaggacttcttcaccctgatcgagagccacgagggcaagcccctgaagctgatggtgtacaacagcaagagcgacagctgcagagaggtgaccgtgacccccaacgccgcctggggcggcgagggcagcctgggctgcggcatcggctacggctacctgcacagaatccccacccagccccccagctaccacaagaagccccccggcacccccccccccagcgccctgcccctgggcgcccccccccccgacgccctgccccccggccccacccccgaggacagccccagcctggagaccggcagcagacagagcgactacatggaggccctgctgcaggcccccggcagcagcatggaggaccccctgcccggccccggcagccccagccacagcgcccccgaccccgacggcctgccccacttcatggagacccccctgcagccccccccccccgtgcagagagtgatggaccccggcttcctggacgtgagcggcatcagcctgctggacaacagcaacgccagcgtgtggcccagcctgcccagcagcaccgagctgaccaccaccgccgtgagcaccagcggccccgaggacatctgcagcagcagcagcagccacgagagaggcggcgaggccacctggagcggcagcgagttcgaggtgagcttcctggacagccccggcgcccaggcccaggccgaccacctgccccagctgaccctgcccgacagcctgaccagcgccgccagccccgaggacggcctgagcgccgagctgctggaggcccaggccgaggaggagcccgccagcaccgagggcctggacaccggcaccgaggccgagggcctggacagccaggcccagatcagcaccaccgagtag

SEQ ID NO: 222176 - protein, 514 aa, Artificial Sequence
  derived and/or modified sequence
MTLIWRHLLRPLCLVTSAPRILEMHPFLSLGTSRTSVTKLSLHTKPRMPPCDFMPERYQSLGYNRVLEIHKEHLSPVVTAYFQKPLLLHQGHMEWLFDAEGSRYLDFFSGIVTVSVGHCHPKVNAVAQKQLGRLWHTSTVFFHPPMHEYAEKLAALLPEPLKVIFLVNSGSEANELAMLMARAHSNNIDIISFRGAYHGCSPYTLGLTNVGTYKMELPGGTGCQPTMCPDVFRGPWGGSHCRDSPVQTIRKCSCAPDCCQAKDQYIEQFKDTLSTSVAKSIAGFFAEPIQGVNGVVQYPKGFLKEAFELVRARGGVCIADEVQTGFGRLGSHFWGFQTHDVLPDIVTMAKGIGNGFPMAAVITTPEIAKSLAKCLQHFNTFGGNPMACAIGSAVLEVIKEENLQENSQEVGTYMLLKFAKLRDEFEIVGDVRGKGLMIGIEMVQDKISCRPLPREEVNQIHEDCKHMGLLVGRGSIFSQTFRIAPSMCITKPEVDFAVEVFRSALTQHMERRAK

SEQ ID NO: 222177 - DNA, 1545 bp, Artificial Sequence
  derived and/or modified sequence
atgacactcatttggcggcatttgctccggcccctgtgcctggtgacatctgctccccgtatcctggaaatgcatccctttctgagtctgggcacttcccggacgtctgtgactaagctgagccttcataccaagccccgaatgccaccatgtgattttatgcccgagcgataccagtcccttggctataacagagtgctggaaatccacaaagaacatctgtccccagtcgtcacagcatacttccagaaacctctgttattacaccaggggcacatggaatggctgttcgatgccgagggcagcaggtatctggatttcttcagcggaattgtcaccgtgtctgtgggccactgccaccccaaggttaacgcagtcgctcagaagcagttgggcaggctgtggcatacaagcacagtattcttccacccacctatgcatgagtacgccgagaagctggcagccctactgccggaaccattgaaggtaatctttctggtgaacagcggctctgaggccaatgagctggccatgctcatggccagagcacattccaataacattgatatcatctcttttcgaggcgcttatcacggctgttcgccatacaccctgggcttaacgaacgtgggaacttataagatggagttgccgggaggcaccggctgccagccaactatgtgtcctgatgttttccgaggaccgtggggaggtagtcattgtcgagacagtcctgttcaaaccattcgaaagtgctcatgtgcaccggactgctgccaggctaaagatcagtatattgagcagttcaaagacacgctgtcaacatccgtggctaagtcaattgctggatttttcgccgagcctatccaaggtgtgaacggagtggtgcagtatccaaaaggcttcttaaaggaggccttcgagctggtcagggctagaggcggtgtttgtattgccgacgaggtccagacagggttcgggaggctggggtcccacttttggggttttcagactcacgacgtgcttcccgatatagtaactatggccaaaggcatagggaatggcttccctatggcagccgtcatcacaacacctgagatagcaaaatcgctggccaaatgcttgcagcatttcaatacatttggagggaatccgatggcatgcgccatcgggtcagccgtcctggaagtgattaaagaagagaaccttcaggaaaactcacaagaagttggcacttacatgctactgaagtttgctaagctccgtgacgagtttgagatagtgggagatgtgagaggaaagggtcttatgatcggaatcgagatggtgcaagacaaaattagctgccggccacttcctcgggaggaggtgaaccagatccacgaggactgcaagcacatgggcctgctggtgggccgagggtccatctttagtcagaccttccgcatcgctccgtcaatgtgtattactaaaccagaggtggatttcgctgtggaggtattcagatctgcccttacccagcatatggaacgccgcgcgaagtag

SEQ ID NO: 222178 - DNA, 2364 bp, Artificial Sequence
  derived and/or modified sequence
ctctttttctcccccttgaaggcactgttactagaaatagagagctctggggcttgcctgaagccatgggcagtcaccactccaggattccccttttagcgcctcctccccatcttaatctcaaagtccagcaggatagtgagcagttagagcccggcctccaatctgcttccatgggggttggctttctgagtgggagaaatgactctaatctggagacatttgctgagacccttgtgcctggtcacttccgctcccaggatccttgagatgcatcctttcctgagcctaggtacttcccggacatcagtaaccaagctcagtcttcatacaaagcccagaatgcctccatgtgacttcatgcctgaaagataccagtcccttggctacaaccgtgtcctggaaatccacaaggaacatctttctcctgtggtgacggcatatttccagaaacccctgctgctccaccaggggcacatggagtggctctttgatgctgaaggaagcagatacctggatttcttttccgggattgttactgtcagtgttggccattgccacccaaaggtgaatgcagtggcacaaaagcagctcggccgcctgtggcatacaagcaccgtcttcttccaccctccaatgcatgaatatgcagagaagcttgccgcacttcttcctgagcctcttaaggtcattttcttggtgaacagtggctcagaagccaatgagctggccatgctgatggccagggcgcactcaaacaacatagacatcatttctttcagaggagcctaccatggatgcagtccttacacacttggcttgacaaacgtagggacctacaagatggaactccctggtgggacaggttgccaaccaacaatgtgtccagatgtttttcgtggcccttggggaggaagccactgtcgagattctccagtgcaaacaatcaggaagtgcagctgtgcaccagactgctgccaagctaaagatcagtatattgagcaattcaaagatacgctgagcacatctgtggccaagtcaattgctggatttttcgcagaacctattcaaggtgtgaatggagttgtccagtacccaaaggggtttctaaaggaagcctttgagctggtgcgagcaaggggaggcgtgtgcattgcagatgaagtgcagacaggatttggaaggttgggctctcacttctggggcttccaaacccacgatgtcctgcctgacattgtcaccatggctaaagggattgggaatggctttcccatggcagcagtcataaccactccagagattgccaaatctttggcgaaatgcctgcagcacttcaacacctttggagggaaccccatggcctgtgccattggatctgctgtgcttgaggtgattaaagaagaaaatctacaggaaaacagtcaagaagttgggacctacatgttactaaagtttgctaagctgcgggatgaatttgaaattgttggagacgtccgaggcaaaggtctcatgataggcatagaaatggtgcaggataagataagctgtcggcctcttccccgtgaagaagtaaatcagatccatgaggactgcaagcacatgggactcctcgttggcagaggcagcattttttctcagacatttcgcattgcgccctcaatgtgcatcactaaaccagaagttgattttgcagtagaagtatttcgttctgccttaacccaacacatggaaagaagagctaagtaacattgtcagaaataaataaaaccacaagtctcaagaatttgccacgtatgttcaagggtgaatttgaagaatttcagaaccactggtatccagagaaagcctgcagctctccacaggagctgtaaaagtcatggttgactgcctaccaaccatatttgttagcagagcccctcttatcttgagaactccattcttcagggaaaggatctccctagctcagagaataaatcctaattagtttatgttaggtatggtaatttgattcccctttgcagtgattggtttatgcatgaatatgtgatgtatttttgtccagtgaatcttgaagaaaaatcttttggtggaggtgccttcagggaaagttttcttcaccctcactcttcagttcaagaagagatgtcttcttgttgcgctgagaacaccatatgttcatgacgagattcctggcaccatgtcagccggcttgtagtcatgaggacaaccctttttggtgaggttggaagatggatggaagccaagtgcttagtgatgtcaaagaagcactcacttaagcattcctggagccaccctacctcagggcctcttgatatttgaggtaataaattcattgttctgtat

SEQ ID NO: 222179 - DNA, 1545 bp, Artificial Sequence
  derived and/or modified sequence
atgaccctcatctggaggcacctgctgcggcccctgtgcctggtgaccagcgccccccgcatcctggagatgcaccccttcctgagcctgggcaccagcaggacctctgtgaccaagctgagcctgcacaccaagcccaggatgccaccctgtgacttcatgcctgagcgctaccagagcctgggctacaacagagtgctggagatccacaaggagcacctgagccctgtggtgacagcctacttccagaagcccctgctgctgcaccagggccacatggagtggctgtttgatgctgagggcagccgctacctggacttcttctctggaattgtgacagtgtctgtgggccactgccaccccaaggtgaatgctgtggcccagaagcagctgggccgcctgtggcacaccagcacagtgttcttccacccccccatgcatgaatatgcagagaagctggccgccctgctgcctgagcccctgaaggtgatcttcctggtgaacagcggcagcgaggccaatgagctggccatgctgatggcccgggcccacagcaacaacatcgacatcatctccttccggggggcctaccacggctgcagcccctacaccctgggcctgaccaacgtgggcacctacaagatggagctgcccggcggcaccggctgccagcccaccatgtgcccagatgtgttccggggcccctggggcggcagccactgccgggacagccctgtgcagaccatcaggaagtgcagctgtgccccagactgctgccaggccaaggaccagtacatcgagcagttcaaggacaccctgagcacctctgtggccaagagcattgctggcttctttgctgagcccatccagggcgtgaatggagtggtgcagtaccccaagggcttcctgaaggaggcctttgagctggtgcgggcccggggcggcgtgtgcatcgcagatgaggtgcagacaggcttcggccgcctgggcagccacttctggggcttccagacccatgatgtgctgcctgacatcgtgaccatggccaagggcattggaaatggcttccccatggccgccgtcatcaccaccccagaaattgccaagagcctggccaagtgcctgcagcacttcaacacctttggaggcaaccccatggcctgtgccatcggcagcgctgtgctggaggtgatcaaggaggagaacctgcaggagaacagccaggaggtgggcacctacatgctgctgaagtttgccaagctgagagatgaatttgaaattgtgggagatgtgcggggcaagggcctgatgattggcatcgagatggtgcaggacaagatcagctgccggcccctgccccgggaggaggtgaaccagatccacgaggactgcaagcacatgggcctgctggtgggccggggcagcatcttcagccagaccttcagaattgcccccagcatgtgcatcaccaagccagaggtggactttgctgtggaggtgttccgcagcgccctgacccagcacatggagcggcgggccaagtag

SEQ ID NO: 222180 - DNA, 1545 bp, Artificial Sequence
  derived and/or modified sequence
atgaccctgatctggcggcacctgctgcggcccctgtgcctggtgacatccgccccgcgcatcttggagatgcaccctttcctgagtctgggtacatctaggaccagcgttaccaagctgtctcttcacactaagccccgcatgcctccttgtgacttcatgcccgagcgctatcagtcgctgggatacaatcgggtgttagaaattcataaggagcatctcagcccagttgtaaccgcttatttccagaagcctttgctgttacatcaagggcatatggagtggctttttgatgccgagggcagcagatatctggatttttttagtggcattgtgaccgtcagtgtcggccattgccatcccaaggttaacgcagtggcacaaaaacaactgggacggctctggcacacatcaactgtgttctttcaccctccaatgcatgagtacgccgagaaactagcagctctgttgcctgagccactgaaggtaattttcttggtgaatagcggcagcgaagcgaacgagctggccatgctgatggcaagggctcacagcaacaacatcgacattatcagctttagaggagcttatcatggatgcagcccctacacattggggctcactaacgtaggtacatacaaaatggagcttcctggcggtacaggttgccagcccacaatgtgtcctgacgtgttccgggggccctgggggggctcacattgtcgcgacagtcctgtgcaaacaatacgcaagtgctcttgcgcgccagattgttgtcaggctaaggatcagtatatcgagcagtttaaggatactctgtctacaagcgtggcgaagtccatagccgggttctttgcagaaccgattcaaggggtgaacggcgtagtgcagtacccgaaaggcttccttaaggaagcttttgagcttgtcagggcgcgcggcggcgtgtgtatcgccgatgaagtgcagacaggattcggtcgattgggctcccatttttggggctttcaaactcatgacgtgttacccgatatcgtgacaatggcaaaggggattgggaatggctttcctatggcggccgtcattacaacaccagagattgctaaatctctagcaaaatgtctacaacatttcaacacgttcggcggcaatccaatggcttgtgccatcggctcggcagtgctggaagtgatcaaagaggagaatctccaagagaacagtcaagaggtgggtacttacatgttgctgaaattcgccaaattaagggacgaatttgagatcgttggtgatgtgagaggcaagggtcttatgatcgggatagagatggtccaggacaagatctcatgccgaccactaccacgggaggaggtgaaccagatccacgaggactgcaagcacatgggcctgctcgtgggacgcggcagtatcttttcgcagacatttagaatcgctcctagcatgtgcatcacaaaacccgaggttgattttgccgtggaagtatttcggtcagctcttactcagcatatggagcgcagagctaagtag

SEQ ID NO: 222181 - DNA, 1545 bp, Artificial Sequence
  derived and/or modified sequence
atgaccctcatctggagacacttactgcggccactgtgtctggttaccagcgcaccccgaattctggaaatgcacccgtttctgtctttggggacatcacgaacaagcgttaccaaactgtccctgcataccaagcctcgcatgcccccttgcgatttcatgcccgagcggtatcagtccctaggatacaaccgagtgcttgaaatacacaaagaacatctgtctcccgtggtgactgcttatttccagaaaccgctgcttctacatcaagggcatatggagtggctgttcgatgcggaggggagtaggtatctcgatttcttctctgggatcgtgaccgtctccgtgggccattgtcatcccaaggtgaacgctgtggcacagaagcagctgggcaggctgtggcacacttctacagtcttcttccaccctccaatgcatgagtacgccgaaaagcttgccgctctcctgccagaacctctgaaggttatctttctggtcaatagcgggtcagaagctaacgaactggcaatgctgatggctagggctcactctaataacatcgatattatctctttccgcggtgcataccacgggtgctccccgtacactcttgggcttaccaatgtgggtacctataaaatggaattgcctggaggtacagggtgccagcccactatgtgcccagatgtgtttcgcggaccctgggggggaagccattgcagagattcgcccgtgcagacaattagaaagtgttcctgcgcgcctgattgctgccaggcgaaggaccagtatattgagcagtttaaagatacactcagcacgtctgtagccaaatcgatagctggattcttcgctgaacccattcagggggtcaatggagtggtgcagtatcccaaaggattcctgaaggaagcgtttgagcttgtgagagccaggggcggtgtgtgtatcgcggacgaggtacaaaccggctttgggagactgggatcacacttttggggttttcagacgcacgatgtattgcctgatattgtgaccatggccaaaggcatcggaaacggcttccccatggccgcagtgatcactaccccggagatcgcaaagtctctggctaagtgcctgcagcacttcaacactttcggagggaaccctatggcttgcgcaattggttccgcagtcttggaggtaataaaagaggaaaacttacaggaaaactcccaagaggtgggcacctatatgctcctcaaattcgccaagctaagggacgaatttgagatcgtaggggatgtgcggggaaagggcctcatgataggcatagaaatggtgcaggacaaaatctcttgtcgccctcttccccgagaagaggtcaaccagatacatgaagattgtaagcatatgggactcctggtgggaagggggagtatcttttcacagacctttcggatcgccccatcaatgtgtatcacaaagccagaggtggacttcgccgttgaagtgttccgcagtgccctgacacaacacatggaacgcagggccaagtag

SEQ ID NO: 222182 - DNA, 1545 bp, Artificial Sequence
  derived and/or modified sequence
atgaccctgatctggagacacctgctgagacccctgtgcctggtgaccagcgcccccagaatcctggagatgcaccccttcctgagcctgggcaccagcagaaccagcgtgaccaagctgagcctgcacaccaagcccagaatgcccccctgcgacttcatgcccgagagataccagagcctgggctacaacagagtgctggagatccacaaggagcacctgagccccgtggtgaccgcctacttccagaagcccctgctgctgcaccagggccacatggagtggctgttcgacgccgagggcagcagatacctggacttcttcagcggcatcgtgaccgtgagcgtgggccactgccaccccaaggtgaacgccgtggcccagaagcagctgggcagactgtggcacaccagcaccgtgttcttccacccccccatgcacgagtacgccgagaagctggccgccctgctgcccgagcccctgaaggtgatcttcctggtgaacagcggcagcgaggccaacgagctggccatgctgatggccagagcccacagcaacaacatcgacatcatcagcttcagaggcgcctaccacggctgcagcccctacaccctgggcctgaccaacgtgggcacctacaagatggagctgcccggcggcaccggctgccagcccaccatgtgccccgacgtgttcagaggcccctggggcggcagccactgcagagacagccccgtgcagaccatcagaaagtgcagctgcgcccccgactgctgccaggccaaggaccagtacatcgagcagttcaaggacaccctgagcaccagcgtggccaagagcatcgccggcttcttcgccgagcccatccagggcgtgaacggcgtggtgcagtaccccaagggcttcctgaaggaggccttcgagctggtgagagccagaggcggcgtgtgcatcgccgacgaggtgcagaccggcttcggcagactgggcagccacttctggggcttccagacccacgacgtgctgcccgacatcgtgaccatggccaagggcatcggcaacggcttccccatggccgccgtgatcaccacccccgagatcgccaagagcctggccaagtgcctgcagcacttcaacaccttcggcggcaaccccatggcctgcgccatcggcagcgccgtgctggaggtgatcaaggaggagaacctgcaggagaacagccaggaggtgggcacctacatgctgctgaagttcgccaagctgagagacgagttcgagatcgtgggcgacgtgagaggcaagggcctgatgatcggcatcgagatggtgcaggacaagatcagctgcagacccctgcccagagaggaggtgaaccagatccacgaggactgcaagcacatgggcctgctggtgggcagaggcagcatcttcagccagaccttcagaatcgcccccagcatgtgcatcaccaagcccgaggtggacttcgccgtggaggtgttcagaagcgccctgacccagcacatggagagaagagccaagtag

SEQ ID NO: 222183 - protein, 343 aa, Artificial Sequence
  derived and/or modified sequence
MGGPRGAGWVAAGLLLGAGACYCIYRLTRGRRRGDRELGIRSSKSAGALEEGTSEGQLCGRSARPQTGGTWESQWSKTSQPEDLTDGSYDDVLNAEQLQKLLYLLESTEDPVIIERALITLGNNAAFSVNQAIIRELGGIPIVANKINHSNQSIKEKALNALNNLSVNVENQIKIKIYISQVCEDVFSGPLNSAVQLAGLTLLTNMTVTNDHQHMLHSYITDLFQVLLTGNGNTKVQVLKLLLNLSENPAMTEGLLRAQVDSSFLSLYDSHVAKEILLRVLTLFQNIKNCLKIEGHLAVQPTFTEGSLFFLLHGEECAQKIRALVDHHDAEVKEKVVTIIPKI

SEQ ID NO: 222184 - DNA, 1032 bp, Artificial Sequence
  derived and/or modified sequence
atgggtgggcctcgcggggcaggatgggttgcagccgggctgctgctgggcgctggtgcctgctactgtatctacagacttaccagaggccggagacggggagacagggagctggggattcgcagcagtaagtcagctggcgcccttgaggagggcaccagcgagggtcagctgtgtggacgcagtgcgcggccacaaacagggggcacttgggagagccaatggtcaaagacatcccagcccgaggatcttaccgatggaagttacgacgacgtgctgaatgccgagcagttgcaaaagctactgtacctgctcgaaagcacggaggaccccgttataatagagcgcgccttaattactctggggaataacgcagccttctctgttaaccaggcgatcatacgcgaactaggtggcatccccatcgtggctaacaagatcaatcacagtaatcagtcaatcaaagagaaggcactgaacgctctgaacaacctctccgtgaatgtcgagaatcagattaagatcaaaatttacatctcccaggtgtgtgaggatgtcttttcaggaccccttaactctgccgtacagctggctggcctgacgctattgacaaacatgactgtcaccaacgaccatcagcatatgctgcactcatatattaccgatctgtttcaggtcctgctcaccggcaatggaaatactaaagtgcaagtgttaaagctactgctgaacctgtcggaaaatcctgcgatgaccgaaggattgctccgcgcccaggtggacagtagtttcctttccctgtacgacagtcacgttgctaaggaaatcctgctccgagttctgaccctattccagaatatcaaaaactgcctcaagatcgagggccatctggccgtgcagccgacatttacagaaggcagccttttttttctgttacatggtgaggaatgcgcccagaaaatccgtgcactggttgaccaccatgacgccgaagtcaaggaaaaagtcgtgaccatcatccccaaaatctag

SEQ ID NO: 222185 - DNA, 1032 bp, Artificial Sequence
  derived and/or modified sequence
atgggcggccccagaggagctggctgggtggccgccggcctgctgctgggcgctggggcctgctactgcatctaccgcctgacccggggcagaagaagaggagaccgggagctgggcatccgcagcagcaagtctgctggggccctggaggagggcaccagcgagggccagctgtgtggccgcagcgcccggccccagacaggaggcacctgggagagccagtggagcaagaccagccagcctgaggacctgacagatggcagctatgatgatgtgctgaatgctgagcagctgcagaagctgctgtacctgctggagagcacagaagatcctgtgatcatcgagcgggccctgatcaccctgggcaacaatgctgccttctctgtgaaccaggccatcatccgggagctgggcggcatccccatcgtggccaacaagatcaaccacagcaaccagagcatcaaggagaaggccctgaatgccctgaacaacctgtctgtgaatgtggagaaccagatcaagatcaagatctacatcagccaggtgtgtgaagatgtgttcagcggccccctgaacagcgctgtgcagctggccggcctgaccctgctgaccaacatgacagtgaccaatgaccaccagcacatgctgcacagctacatcacagacctcttccaggtgctgctgactggaaatggaaacaccaaggtgcaggtgctgaagctgctgctgaacctgtctgaaaatcctgccatgacagagggcctgctgcgggcccaggtggacagcagcttcctgagcctgtatgacagccacgtggccaaggagatcctgctgcgggtgctgaccctcttccagaacatcaagaactgcctgaagattgagggccacctggccgtgcagcccaccttcacagagggcagcctcttcttcctgctgcatggagaggagtgtgcccagaagatccgggccctggtggaccaccatgatgctgaggtgaaggagaaggtggtgaccatcatccccaagatctag

SEQ ID NO: 222186 - DNA, 1032 bp, Artificial Sequence
  derived and/or modified sequence
atgggcggcccccggggcgccggctgggtggccgccggcctgctgttaggggccggagcgtgctactgcatatatagactgacgcgaggacggaggcgtggtgacagggaattaggaattagaagcagcaaatctgctggagccctggaggagggcacaagcgagggtcagctgtgcgggagatccgcacgacctcagaccgggggaacctgggagagccagtggtcgaagacatcccagccggaggacctaacggatggcagctacgacgacgtgttaaacgcagagcagctgcagaagctcctttacctacttgaatccacggaagacccggtgatcattgaacgcgccctgataacccttggtaacaatgctgcttttagtgtcaatcaggcaatcatcagggagttgggtggaataccaatcgttgcaaataagattaaccatagcaaccaaagtatcaaggagaaagctctgaacgccctcaacaatcttagcgtgaatgttgaaaaccaaataaaaattaagatttacataagccaggtttgtgaagacgtgtttagcggtccgctgaactccgcggtgcaactcgcaggcttgaccctgcttaccaacatgactgttaccaatgatcaccaacacatgctgcactcctacatcaccgatttgtttcaggtacttctgactgggaacggtaatacgaaggtgcaagttctgaagctgctgttgaacctcagtgaaaatcccgccatgacagaaggcctgctgcgggcccaggtggattccagctttctgagtttatatgacagccatgttgctaaggaaatcctgctgcgagtgctgaccctatttcaaaatattaagaattgcctgaaaattgaaggacacttggctgtgcagccgacattcactgaaggatcattgttcttcctgctgcacggtgaagaatgcgcccagaagataagggccctggtggatcaccacgacgcagaggtcaaggagaaagtggttaccataataccgaagatctag

SEQ ID NO: 222187 - DNA, 1032 bp, Artificial Sequence
  derived and/or modified sequence
atgggaggacctcggggagccggttgggtagctgccggactcctgctcggggcaggcgcatgctactgtatctaccggttgacacggggtagaaggcggggtgatagggagctcgggattagatcatccaaatctgctggcgcactagaggagggaacaagtgagggtcagctgtgcggtcgctctgcgagaccgcaaactggaggcacatgggaaagccaatggagtaagacctcccagcccgaggacttaaccgatggttcttatgatgatgtgctaaacgcagaacagttgcaaaaactcctgtacctgctggagtccactgaggaccccgtgattatcgaaagggcccttatcaccctgggcaataatgccgcattctcggtgaatcaagctatcatccgggaactgggtggcatacccatcgtggctaataaaattaaccactccaaccagtcgatcaaggaaaaagctctcaatgccttgaataatttgtcagtgaacgtggagaatcagattaaaattaagatttatatctcccaagtttgcgaagacgtgtttagtgggccactgaactcagccgttcagctcgcgggtctgacactgctgaccaacatgaccgtgaccaacgaccatcagcacatgctccactcctacattacggacttgtttcaggtgttgctgaccgggaatggcaacaccaaggtccaagtgctcaagctgctactgaatttgtccgagaaccccgcaatgacggaggggctccttcgagcccaggtggactcatctttcctgagcctgtatgactcccatgtggctaaggagatcctgcttagggtcctgactttgttccagaacatcaagaactgcctaaaaattgaaggtcatctggcagttcagcctacttttacagaaggctctctgtttttcctcctccacggagaggagtgcgcgcagaaaatccgagctctggtggatcatcacgacgctgaagtcaaggaaaaagtggtcactatcatccccaagatatag

SEQ ID NO: 222188 - DNA, 2629 bp, Artificial Sequence
  derived and/or modified sequence
accgccccgcgctccgctgccaggggcgggagggaggaatggttgcttcacgccccgggggaagagacgggaagctcggctctgggttgcgggccccggcgtctccgcgtggggcgcaccgtccgacccccccctcccggtgtgcagcgccccgcaccgccccgcctcgcctgggagaagccgccgggacgcgccgggctggagtgggcggttataggctttgagctaggccgtttccgggaggcggagctcagaccccatttcctttctccacatccaggtcaggtggcgtttgctgtggcggctaggcccgcgtgcgctggagacctccgcgctggcccccgcgagcctcctgccctggcccggcgctgcggctctgccgcggcggcagcatgggtggcccccggggcgcgggctgggtggcggcgggcctgctgctcggcgcgggcgcctgctactgcatttacaggctgacccggggtcggcggcggggcgaccgcgagctcgggatacgctcttcgaagtccgcaggtgccctggaagaagggacgtcagagggtcagttgtgcgggcgctcggcccggcctcagacgggaggtacctgggagtcacagtggtccaagacctcgcagcctgaagacttaactgatggttcatatgatgatgttctaaatgctgaacaacttcagaaactcctttacctgctggagtcaacggaggatcctgtaattattgaaagagctttgattactttgggtaacaatgcagccttttcagttaaccaagctattattcgtgaattgggtggtattccaattgttgcaaacaaaatcaaccattccaaccagagtattaaagagaaagctttaaatgcactaaataacctgagtgtgaatgttgaaaatcaaatcaagataaagatatacatcagtcaagtatgtgaggatgtcttctctggtcctctgaactctgctgtgcagctggctggactgacattgttgacaaacatgactgttaccaatgaccaccagcacatgcttcacagttacattacagacctgttccaggtgttacttactggaaatggaaacacgaaggtgcaagttttgaaactgcttttgaatttgtctgaaaatccagccatgacagaaggacttctccgtgcccaagtggattcatcattcctttccctttatgacagccacgtagcaaaggagattcttcttcgagtacttacgctatttcagaatataaagaactgcctcaaaatagaaggccatttagctgtgcagcctactttcactgaaggttcattgtttttcctgttacatggagaagaatgtgcccagaaaataagagctttagttgatcaccatgatgcagaggtgaaggaaaaggttgtaacaataatacccaaaatctgattggtcatatttttccaaagagtaatgcagtctggatataaacgtattttctgtcttccttataaggggattctcccagctgctaaatttaaacagtaaatatcacattttgtcattaacacagctataacttgccgtggttctcagatttattttggactattttgatgccaagtgaatataagagcttgtactgaaaccatttatttctttctattttgctatttgcaaatgcttgttatcttccctacatgaagtggcagtaacctttttcacatttaagctacccttctaccttttgaagtgatttgcagttactcatctgagacagcatcagtatttgactaaatcattgtttcacaactgaatagtcttgttcttttagtagcaacgaaatcctaagctcttgaggccattcacctgccaacctgaccatactgctttcaaaagtcttttctcatcagtagaatctattttggtcacttctagtcaatgaaaaatgtaaacttttaggagagaatgtttcttaggactcacccactccattcaatgttatatataaaatagtgtgatcaatcacaatgtccatctttagacagttggttaaataaattatctggtctttgaaaagaccgtgctgggcgcggtggctcttgcctgtaatcccagcactttgggaggctgaggcgggcagatcacctgagatcgggagtttgagaccaagcctgaccaatatggagaaaccctgtctctactaagaacacaaaattagctgggcatggtggtgcatgcctgtaatcccagctacttgggaggccgaggcaggagaattgcttgaacccgggaggcagaggttgcagtgagctgagatagcgccattgcactccagcctgggcaacaagagcaaaactctgtctcaaaaaaaaaaaaaaatgatggagctccgaatgtgcttaagtggaaagatatctatgaaatatggtggttttttaaaacacaaaaattatagaatatgggatcccgtgtgtgtgtgtgtgtgtttgaatgaaaaatgcttatgtattgacagaacacttctagaatgatacccaaactcctggagtgggagtggggaatgccttctacgtacacactgttctactgtttgaattttttaatatgagcccaaattgtataatctttttttaataaaggggagaaaaatc

SEQ ID NO: 222189 - DNA, 1032 bp, Artificial Sequence
  derived and/or modified sequence
atgggcggccccagaggcgccggctgggtggccgccggcctgctgctgggcgccggcgcctgctactgcatctacagactgaccagaggcagaagaagaggcgacagagagctgggcatcagaagcagcaagagcgccggcgccctggaggagggcaccagcgagggccagctgtgcggcagaagcgccagaccccagaccggcggcacctgggagagccagtggagcaagaccagccagcccgaggacctgaccgacggcagctacgacgacgtgctgaacgccgagcagctgcagaagctgctgtacctgctggagagcaccgaggaccccgtgatcatcgagagagccctgatcaccctgggcaacaacgccgccttcagcgtgaaccaggccatcatcagagagctgggcggcatccccatcgtggccaacaagatcaaccacagcaaccagagcatcaaggagaaggccctgaacgccctgaacaacctgagcgtgaacgtggagaaccagatcaagatcaagatctacatcagccaggtgtgcgaggacgtgttcagcggccccctgaacagcgccgtgcagctggccggcctgaccctgctgaccaacatgaccgtgaccaacgaccaccagcacatgctgcacagctacatcaccgacctgttccaggtgctgctgaccggcaacggcaacaccaaggtgcaggtgctgaagctgctgctgaacctgagcgagaaccccgccatgaccgagggcctgctgagagcccaggtggacagcagcttcctgagcctgtacgacagccacgtggccaaggagatcctgctgagagtgctgaccctgttccagaacatcaagaactgcctgaagatcgagggccacctggccgtgcagcccaccttcaccgagggcagcctgttcttcctgctgcacggcgaggagtgcgcccagaagatcagagccctggtggaccaccacgacgccgaggtgaaggagaaggtggtgaccatcatccccaagatctag

SEQ ID NO: 222190 - protein, 913 aa, Artificial Sequence
  derived and/or modified sequence
MAALFLRGFVQIGNCKTGISKSKEAFIEAVERKKKDRLVLYFKSGKYSTFRLSDNIQNVVLKSYRGNQNHLHLTLQNNNGLFIEGLSSTDAEQLKIFLDRVHQNEVQPPVRPGKGGSVFSSTTQKEINKTSFHKVDEKSSSKSFEIAKGSGTGVLQRMPLLTSKLTLTCGELSENQHKKRKRMLSSSSEMNEEFLKENNSVEYKKSKADCSRCVSYNREKQLKLKELEENKKLECESSCIMNATGNPYLDDIGLLQALTEKMVLVFLLQQGYSDGYTKWDKLKLFFELFPEKICHGLPNLGNTCYMNAVLQSLLSIPSFADDLLNQSFPWGKIPLNALTMCLARLLFFKDTYNIEIKEMLLLNLKKAISAAAEIFHGNAQNDAHEFLAHCLDQLKDNMEKLNTIWKPKSEFGEDNFPKQVFADDPDTSGFSCPVITNFELELLHSIACKACGQVILKTELNNYLSINLPQRIKAHPSSIQSTFDLFFGAEELEYKCAKCEHKTSVGVHSFSRLPRILIVHLKRYSLNEFCALKKNDQEVIISKYLKVSSHCNEGTRPPLPLSEDGEITDFQLLKVIRKMTSGNISVSWPATKESKDILAPHIGSDKESEQKKGQTVFKGASRRQQQKYLGKNSKPNELESVYSGDRAFIEKEPLAHLMTYLEDTSLCQFHKAGGKPASSPGTPLSKVDFQTVPENPKRKKYVKTSKFVAFDRIINPTKDLYEDKNIRIPERFQKVSEQTQQCDGMRICEQAPQQALPQSFPKPGTQGHTKNLLRPTKLNLQKSNRNSLLALGSNKNPRNKDILDKIKSKAKETKRNDDKGDHTYRLISVVSHLGKTLKSGHYICDAYDFEKQIWFTYDDMRVLGIQEAQMQEDRRCTGYIFFYMHNEIFEEMLKREENAQLNSKEVEETLQKE

SEQ ID NO: 222191 - DNA, 2742 bp, Artificial Sequence
  derived and/or modified sequence
atggccgccctgttcctgagaggcttcgtgcagatcggcaactgcaagaccggcatcagcaagagcaaggaggccttcatcgaggccgtggagagaaagaagaaggacagactggtgctgtacttcaagagcggcaagtacagcaccttcagactgagcgacaacatccagaacgtggtgctgaagagctacagaggcaaccagaaccacctgcacctgaccctgcagaacaacaacggcctgttcatcgagggcctgagcagcaccgacgccgagcagctgaagatcttcctggacagagtgcaccagaacgaggtgcagccccccgtgagacccggcaagggcggcagcgtgttcagcagcaccacccagaaggagatcaacaagaccagcttccacaaggtggacgagaagagcagcagcaagagcttcgagatcgccaagggcagcggcaccggcgtgctgcagagaatgcccctgctgaccagcaagctgaccctgacctgcggcgagctgagcgagaaccagcacaagaagagaaagagaatgctgagcagcagcagcgagatgaacgaggagttcctgaaggagaacaacagcgtggagtacaagaagagcaaggccgactgcagcagatgcgtgagctacaacagagagaagcagctgaagctgaaggagctggaggagaacaagaagctggagtgcgagagcagctgcatcatgaacgccaccggcaacccctacctggacgacatcggcctgctgcaggccctgaccgagaagatggtgctggtgttcctgctgcagcagggctacagcgacggctacaccaagtgggacaagctgaagctgttcttcgagctgttccccgagaagatctgccacggcctgcccaacctgggcaacacctgctacatgaacgccgtgctgcagagcctgctgagcatccccagcttcgccgacgacctgctgaaccagagcttcccctggggcaagatccccctgaacgccctgaccatgtgcctggccagactgctgttcttcaaggacacctacaacatcgagatcaaggagatgctgctgctgaacctgaagaaggccatcagcgccgccgccgagatcttccacggcaacgcccagaacgacgcccacgagttcctggcccactgcctggaccagctgaaggacaacatggagaagctgaacaccatctggaagcccaagagcgagttcggcgaggacaacttccccaagcaggtgttcgccgacgaccccgacaccagcggcttcagctgccccgtgatcaccaacttcgagctggagctgctgcacagcatcgcctgcaaggcctgcggccaggtgatcctgaagaccgagctgaacaactacctgagcatcaacctgccccagagaatcaaggcccaccccagcagcatccagagcaccttcgacctgttcttcggcgccgaggagctggagtacaagtgcgccaagtgcgagcacaagaccagcgtgggcgtgcacagcttcagcagactgcccagaatcctgatcgtgcacctgaagagatacagcctgaacgagttctgcgccctgaagaagaacgaccaggaggtgatcatcagcaagtacctgaaggtgagcagccactgcaacgagggcaccagaccccccctgcccctgagcgaggacggcgagatcaccgacttccagctgctgaaggtgatcagaaagatgaccagcggcaacatcagcgtgagctggcccgccaccaaggagagcaaggacatcctggccccccacatcggcagcgacaaggagagcgagcagaagaagggccagaccgtgttcaagggcgccagcagaagacagcagcagaagtacctgggcaagaacagcaagcccaacgagctggagagcgtgtacagcggcgacagagccttcatcgagaaggagcccctggcccacctgatgacctacctggaggacaccagcctgtgccagttccacaaggccggcggcaagcccgccagcagccccggcacccccctgagcaaggtggacttccagaccgtgcccgagaaccccaagagaaagaagtacgtgaagaccagcaagttcgtggccttcgacagaatcatcaaccccaccaaggacctgtacgaggacaagaacatcagaatccccgagagattccagaaggtgagcgagcagacccagcagtgcgacggcatgagaatctgcgagcaggccccccagcaggccctgccccagagcttccccaagcccggcacccagggccacaccaagaacctgctgagacccaccaagctgaacctgcagaagagcaacagaaacagcctgctggccctgggcagcaacaagaaccccagaaacaaggacatcctggacaagatcaagagcaaggccaaggagaccaagagaaacgacgacaagggcgaccacacctacagactgatcagcgtggtgagccacctgggcaagaccctgaagagcggccactacatctgcgacgcctacgacttcgagaagcagatctggttcacctacgacgacatgagagtgctgggcatccaggaggcccagatgcaggaggacagaagatgcaccggctacatcttcttctacatgcacaacgagatcttcgaggagatgctgaagagagaggagaacgcccagctgaacagcaaggaggtggaggagaccctgcagaaggagtag

SEQ ID NO: 222192 - DNA, 2742 bp, Artificial Sequence
  derived and/or modified sequence
atggcggcccttttcctcaggggattcgtccagatcggaaattgtaagaccggcatctcaaagagcaaggaagcttttatcgaagccgtggagaggaagaagaaagaccgcctggtgttgtattttaagagcggcaaatactcgaccttcaggctgtcagacaacatccagaatgtggtgctgaaaagctatcgcgggaaccagaatcatcttcaccttacacttcagaacaataacggcctgtttattgagggcctcagtagcacggacgcggagcagctcaagatctttctggatagggtgcatcagaacgaggtccagcctccagtgaggcctggaaagggcggctctgtgttctcatctacaacacagaaagagataaacaagacctccttccacaaagtggacgagaagagctctagcaagagcttcgaaattgccaaaggctcgggtaccggcgtccttcaaaggatgcccttattgacatcaaagctcacactaacctgcggcgagctctctgagaaccaacacaaaaaaagaaagcgcatgctgtcctcgtcctcagagatgaatgaggaattcctcaaggagaacaattccgttgaatataaaaaatctaaggcggactgcagccggtgcgtgtcatacaatcgggagaagcagctgaagttgaaggagctggaagagaacaaaaagcttgagtgcgaatcctcctgtatcatgaacgctactgggaacccgtatctagacgatattggcctacttcaggctctgaccgagaaaatggtgctcgtctttctactgcagcagggctattctgatggctacacaaaatgggataaactcaagttgtttttcgagctcttcccggagaaaatctgtcatgggcttcctaatctaggtaatacatgctatatgaatgccgtgctccagagtctcctgtcgatacccagcttcgccgacgacctgctgaatcagtcgttcccgtggggtaagatccccctcaacgccctgacaatgtgtctggcaaggctcctcttctttaaggatacctacaatatcgaaatcaaggaaatgctcctgttgaacttgaagaaggcaattagcgcagcagccgagatttttcacgggaatgcacaaaacgacgcacacgaatttctggcacactgtcttgaccagctcaaagataatatggagaagctgaacacaatttggaagcccaagagtgagtttggggaagataactttcccaaacaggttttcgccgacgaccctgacacgagcggattttcctgcccagtgattaccaactttgagctggagctgctccactccattgcatgcaaagcgtgtgggcaggtaattctgaaaacagaactcaacaactatctctctatcaatctccctcagaggattaaggctcacccctccagcatccagtctacctttgacttattttttggtgctgaagaacttgagtacaaatgtgctaaatgcgagcataagacaagcgtgggtgtgcattcatttagccggttgccgaggatcctcatagtgcaccttaagcgctattctctgaatgagttttgcgccttgaagaagaacgatcaggaggtaattatttctaaatatctcaaagtgtcctctcactgtaacgaaggaaccagacccccgcttcccctgagcgaggatggagaaatcaccgatttccagctgttgaaagtcatccgaaagatgacatctggcaatattagcgttagctggccggccaccaaggagtccaaagacatactcgcgccacacattgggtccgacaaggagtctgagcagaagaaaggacagaccgtcttcaagggcgcctcccggcgacagcagcagaagtacctgggtaaaaattccaagccaaacgagttggagtccgtgtactctggagatcgggcctttattgaaaaggagcctctggcccatctgatgacttacctggaggacacttctctgtgccagttccacaaggccggaggcaaacctgcgtcttccccaggcacaccactgagtaaagtggattttcaaactgtccctgaaaatccaaaaaggaagaagtacgtcaaaacgagcaagtttgtggctttcgatcggatcatcaaccccacaaaagatctgtatgaggataaaaatattagaattcctgagagatttcaaaaagtctctgagcagacccagcagtgcgacggaatgaggatttgtgagcaggctccacagcaggccctgccacaatcattccctaaacctggcacgcagggccacactaaaaatctcctacgccccacgaaactcaatctgcagaaaagcaatagaaattcactgctggcccttggttcaaacaagaatcccaggaacaaggacatccttgacaagataaagtctaaggcaaaggaaactaagagaaacgacgacaagggtgatcacacctataggctcatctctgtagtgtcccatctgggcaaaacgctgaaatccggtcactacatttgcgacgcttatgattttgaaaagcagatttggttcacctacgatgatatgagagtactggggatacaagaagcccagatgcaggaagatcgaagatgcactgggtacatttttttctacatgcacaatgagatcttcgaggagatgctcaagagggaagaaaatgctcagctcaatagtaaggaggtggaagaaacgttacaaaaggagtag

SEQ ID NO: 222193 - DNA, 2742 bp, Artificial Sequence
  derived and/or modified sequence
atggccgcgctcttcctaagaggattcgtgcagattggcaattgcaagacagggatcagcaaatctaaagaagccttcatcgaagccgtggaacgtaaaaaaaaagaccgtctcgtgctctatttcaaatccggcaaatacagtacgttcaggctttcagataatattcagaacgtggtgttgaaaagctacaggggaaatcaaaatcacctgcatttaacactgcagaacaacaacggactctttattgagggactttcttcgacggatgccgagcagctgaagatcttccttgatcgggtgcatcagaatgaggttcagcccccggttcggccaggaaaggggggctcagtgttttcgagcacaacgcagaaagaaattaataagacatcattccataaggttgatgagaaatccagctccaagagctttgagatcgccaaaggatccggcaccggtgttcttcagcggatgcctctgctaacttctaagttaaccttgacttgtggagaactgtccgagaatcagcacaaaaagaggaagcgtatgctgagctcctctagcgaaatgaacgaagaattcctgaaggagaacaactcagtcgagtacaaaaagtcgaaagccgattgcagcaggtgtgtgtcatacaaccgcgaaaagcagctgaaattaaaagagctcgaagaaaacaagaagcttgaatgtgaatcaagctgcattatgaacgcaaccgggaatccctacctcgatgacattggattactccaggccttgactgagaagatggtcctcgtgtttctactgcaacagggctactccgacggctacactaagtgggacaaactgaagctgtttttcgagctcttcccagagaaaatctgtcacggcttgccaaacctagggaacacatgttatatgaatgccgtccttcagagcctgttaagtatcccatcctttgcagatgacttgttgaaccagtctttcccttggggtaagatccctctgaacgcattaaccatgtgtctcgcccgcctgttatttttcaaggatacgtataacatagagattaaggagatgcttcttctgaatctcaagaaagcaatttctgccgccgctgagatttttcacgggaatgcacaaaacgatgcccacgaattccttgcccattgtttggaccaacttaaggataatatggaaaagcttaatactatctggaagccgaaatcagaatttggagaggataattttcctaagcaagtatttgctgacgacccagacactagtggattttcctgccctgtaatcacaaacttcgagcttgagttactccactccatagcgtgcaaggcctgcggccaagtgatcctgaagacggagctgaacaattatttgagtattaatctcccacagcggattaaggctcacccatccagcattcagtccactttcgacctgttctttggggcagaggaattggagtataaatgtgccaaatgtgaacataagacctcagttggagtccactctttctcgaggctgcctcgcattcttatcgttcatctcaaaaggtacagtctgaacgagttctgtgctctgaagaaaaatgatcaagaggttataatctctaagtacctcaaggttagcagtcattgcaacgaagggacccgcccccccctgcctttaagcgaggatggtgaaatcaccgattttcagctgctgaaagttatccgaaaaatgacctcaggaaatatcagtgtatcatggcccgcaactaaggaaagtaaggacattttagccccccatatcggctcggataaagaatccgagcagaagaaggggcagactgtgttcaaaggcgccagtagaagacagcagcagaagtatcttggtaagaattccaagcctaacgagctggagagtgtgtactccggagaccgagcttttatcgagaaggaacccttggcccacctgatgacttacctggaagacacgagtctgtgtcagttccataaggccggaggaaagccagcttcgtctcccggaacacctctgtctaaagtcgattttcagactgttccggaaaatcctaagaggaagaaatacgtgaagaccagtaagttcgtcgctttcgaccggatcatcaaccctactaaggatctctacgaagacaaaaatattcgtatcccggaacggttccagaaggtgagcgagcagacacagcagtgtgacggaatgagaatttgtgagcaggcaccccagcaggctctaccccagtccttccccaaaccaggcacccaaggccacactaaaaatctactaagaccaacaaaactaaacttgcagaagtccaacagaaactccctcctggctttgggatcgaacaagaaccctcgcaataaggatatactggacaagatcaagagtaaagcaaaagaaacaaagcggaatgatgacaagggggatcatacgtatcgtttgatcagtgtggtgtcccacctgggcaaaacacttaaaagtgggcactatatttgtgacgcttatgactttgagaagcagatttggttcacgtacgacgatatgcgcgtcctcggcattcaggaagcccagatgcaagaggaccgacggtgcaccggatacatctttttttacatgcacaatgagatcttcgaggagatgctcaagagagaggagaacgcccagctgaatagcaaggaagtagaagaaacacttcaaaaggaatag

SEQ ID NO: 222194 - DNA, 2742 bp, Artificial Sequence
  derived and/or modified sequence
atggccgccctcttcctgcggggctttgtgcagatcggcaactgcaagacaggcatcagcaagagcaaggaggccttcattgaagctgtggagaggaagaagaaggaccggctggtgctgtacttcaagagcggcaagtacagcaccttccggctgagtgacaacatccagaatgtggtgctgaagagctaccggggcaaccagaaccacctgcacctgaccctgcagaacaacaacggcctcttcatcgagggcctgagcagcacagatgctgagcagctgaagatcttcctggacagagtgcaccagaatgaggtgcagccccctgtgcggcctgggaagggcggctctgtgttcagcagcaccacccagaaggagatcaacaagaccagcttccacaaggtggatgagaagagcagcagcaagagctttgagatcgccaagggcagcggcaccggggtgctgcagaggatgcccctgctgaccagcaagctgaccctgacctgtggggagctgtctgagaaccagcacaagaagaggaagaggatgctgagcagcagcagcgagatgaatgaggagttcctgaaggagaacaacagcgtggagtacaagaagagcaaggctgactgcagccgctgtgtgtcctacaaccgggagaagcagctgaagctgaaggagctggaggagaacaagaagctggagtgtgagagcagctgcatcatgaatgccaccggcaacccctacctggatgacatcggcctgctgcaggccctgacagagaagatggtgctggtgttcctgctgcagcagggctacagtgatggctacaccaagtgggacaagctgaagctgttctttgagctgtttcctgagaagatctgccacggcctgcccaacctgggcaacacctgctacatgaatgctgtgctgcagagcctgctgagcatccccagctttgctgatgacctgctgaaccagagcttcccctggggcaagatccccctgaatgccctgaccatgtgcctggcccggctgctcttcttcaaggacacctacaacatcgagatcaaggagatgctgctgctgaacctgaagaaggccatctctgctgctgctgagatcttccacggcaatgcccagaatgatgcccacgagttcctggcccactgcctggaccagctgaaggacaacatggagaagctgaacaccatctggaagcccaagtcagaatttggagaggacaacttccccaagcaggtgtttgctgatgatcctgacaccagcggcttcagctgccctgtgatcaccaactttgagctggagctgctgcacagcatcgcctgcaaggcctgtggccaggtgatcctgaagacagagctgaacaactacctgagcatcaacctgccccagaggatcaaggcccaccccagcagcatccagagcacctttgacctcttctttggagctgaggagctggagtacaagtgtgccaagtgtgagcacaagacctctgtgggcgtgcacagcttcagccggctgccccgcatcctgattgtgcacctgaagcgctacagcctgaatgagttctgtgccctgaagaagaatgaccaggaggtgatcatcagcaagtacctgaaggtgagcagccactgcaatgaaggcaccaggcctcccctgcccctgtctgaagatggagagatcacagacttccagctgctgaaggtgatcaggaagatgaccagcggcaacatctctgtgtcctggccagccaccaaggagagcaaggacatcctggccccccacatcggcagtgacaaggagagcgagcagaagaagggccagacagtgttcaagggggccagccggcggcagcagcagaagtacctgggcaagaacagcaagcccaatgagctggagagcgtgtacagcggggaccgggccttcatcgagaaggagcccctggcccacctgatgacctacctggaggacaccagcctgtgccagttccacaaggccggcggcaagccagccagcagccctggcacccccctgagcaaggtggacttccagacagtgcctgagaaccccaagaggaagaagtatgtgaagaccagcaagtttgtggcctttgaccgcatcatcaaccccaccaaggacctgtatgaggacaagaacatccgcatccctgagcgcttccagaaggtgtctgagcagacccagcagtgtgatggcatgaggatctgtgagcaggccccccagcaggccctgccccagagcttccccaagccaggcacccagggccacaccaagaacctgctgcggcccaccaagctgaacctgcagaagagcaacagaaacagcctgctggccctgggcagcaacaagaaccccaggaacaaggacatcctggacaagatcaagagcaaggccaaggagaccaagagaaatgatgacaagggggaccacacctaccgcctcatctctgtggtgagccacctgggcaagaccctgaagagcggccactacatctgtgatgcctatgactttgagaagcagatctggttcacctatgatgacatgagggtgctgggcatccaggaggcccagatgcaggaggaccggcgctgcaccggctacatcttcttctacatgcacaatgagatctttgaggagatgctgaagcgggaggagaatgcccagctgaacagcaaggaggtggaggagaccctgcagaaggagtag

SEQ ID NO: 222195 - DNA, 2742 bp, Artificial Sequence
  derived and/or modified sequence
atggccgccctgttcctgcggggcttcgtgcagatcggcaactgcaaaaccgggatctcaaaaagcaaggaagcctttatcgaggctgtggagcgcaaaaagaaggataggctcgtgctgtactttaaaagtggcaaatatagcacctttaggctctcagataatattcagaatgtcgtgctaaaaagctacaggggaaaccagaatcatctgcatcttacacttcagaacaacaacggcctcttcattgaaggtctcagttcgacagacgccgagcaactcaagattttcctcgatcgagtgcaccagaatgaggtgcagccgccggtacgccccggtaaaggcggctccgtcttttcaagcacaactcaaaaagagatcaataagaccagctttcataaggtcgatgaaaagagctctagcaaaagctttgagatagccaagggctctggaacaggggtgctacaacgtatgccactcctgacatcaaaactgacattgacttgcggtgagctctccgagaatcagcacaagaagcgcaagagaatgctgtcctcctcatccgaaatgaatgaggaattccttaaagagaacaattccgtggagtacaagaaatcgaaagctgactgctccagatgtgtttcctacaacagggaaaagcagctcaagctgaaggaattagaagagaacaaaaagctggagtgtgagtcttcttgcattatgaacgccacagggaacccctacttagacgatattggtctgctccaggctcttacagaaaagatggtgttggtgttcttgctccagcagggttacagcgatggctacacaaagtgggataagctcaaactctttttcgaactattccctgagaagatatgtcacggacttcctaaccttggtaacacgtgctatatgaacgcggttctgcagtcgcttctcagcatcccatctttcgcggacgacctgttaaaccaaagctttccatggggtaagatccctctgaatgcgcttactatgtgcctggcccggctgttattcttcaaggacacatataacattgagattaaagagatgctgttgctcaatctgaaaaaggcgatttctgccgccgccgagatctttcatggcaatgcacagaacgacgcccacgagtttctggcacattgtctggatcagctgaaagacaacatggagaaactaaacacaatttggaaacctaagtcagaatttggtgaggacaacttccctaagcaggtctttgccgacgaccctgacacctccgggttttcctgccccgtgattaccaatttcgaactagagcttctgcacagcatagcatgtaaggcctgtggccaggtgatcctgaaaactgaactgaacaactacctgagcataaaccttccccagaggatcaaggcccatccctcctcaattcagtctacgtttgatcttttctttggggccgaggagcttgagtacaagtgtgccaagtgtgaacataaaacctctgtcggggtgcacagttttagtcgacttccccgtatactcattgtgcatctcaagcgctactcactcaacgaattctgtgctctgaagaagaacgatcaggaagtgatcattagtaagtacctcaaggtatcgtctcactgcaacgaaggcacgaggccccctctgccactctccgaggacggcgaaatcaccgatttccaacttctcaaagtcatacgcaagatgacaagcggcaacatctctgtgagttggccagcaacgaaggagtctaaggatatcctagccccccatatcggtagcgataaggagagcgaacagaagaagggccagactgtcttcaaaggcgcctctaggagacagcagcagaagtatcttggtaaaaattccaagccaaatgagttagaatctgtctatagcggcgaccgtgcctttattgaaaaggaacctctcgctcaccttatgacctatctggaagatacatccctctgtcagtttcataaggctgggggaaagcctgctagctcgcccggcacgccactgagcaaggtagactttcaaacagtccctgagaacccgaagagaaaaaaatatgtcaaaaccagcaaattcgtggcttttgatagaattattaacccaaccaaggacctctacgaagacaagaatatcagaattcccgaaaggtttcagaaagtgtctgagcagacccagcagtgtgacggcatgcggatatgtgaacaggccccacagcaggcactgccccaatcatttcccaagccaggcacacaagggcataccaagaaccttctccggccgaccaagctgaatctgcagaaatccaacagaaatagtttactggcgttaggaagcaacaagaatccacgcaacaaggatatccttgacaaaatcaagagcaaagctaaagaaaccaagagaaacgatgataagggtgaccacacctatcgtctgataagcgtcgtgagtcatcttgggaagacattaaagagcgggcattatatctgcgatgcctacgatttcgagaagcaaatttggtttacgtacgatgacatgcgggtgctggggatccaggaggcacagatgcaggaagaccgccggtgcacagggtacatcttcttttacatgcataacgagattttcgaggaaatgctgaagcgagaggaaaatgcccagttgaactctaaggaggtcgaagaaacgctgcagaaggaatag

SEQ ID NO: 222196 - DNA, 2742 bp, Artificial Sequence
  derived and/or modified sequence
atggccgccctgttcctgcggggcttcgtgcagatcggcaactgcaagaccggtatatctaagtctaaggaggcgttcatcgaggccgtggagagaaaaaaaaaagaccgactggtgctttattttaagtcagggaagtatagtactttccgactgtccgataatatccagaacgtggttctgaagagctatagagggaaccagaaccatctgcatttaactctgcagaacaacaacggcctcttcattgagggcttgagctctactgatgcggagcaactgaagatttttctagaccgcgtgcaccagaatgaggtccagccacccgtaagacccgggaagggaggtagcgttttttcatctactacacagaaagaaatcaacaagacttcgttccataaagtggatgagaaaagttcctccaagtcttttgagatcgcaaagggctcaggaaccggcgtgctgcaaaggatgcctctcctcaccagtaagctgacgctcacgtgcggcgagctgagcgaaaaccagcacaaaaaaagaaaacgtatgctgagctcctcctccgaaatgaacgaagaattcctgaaagagaataactctgtcgaatataaaaagagtaaggcagattgttccaggtgtgtctcttacaacagggagaaacaactaaagttgaaggagcttgaagagaacaaaaagttggaatgcgagtccagctgcataatgaatgcaactggcaacccttatcttgatgatataggcctgctccaggctcttaccgagaaaatggttcttgtcttccttctccagcagggatattccgatggatacacgaagtgggacaagttaaaactcttcttcgaactcttccccgagaaaatctgtcatgggctgcctaatttgggaaatacgtgctacatgaacgctgtccttcagtctctgctttcaatcccctcctttgccgatgatctcctgaaccagtccttcccttggggcaagattcctcttaacgcattgacaatgtgtctggctcgacttctcttttttaaagatacatataatatagaaattaaagaaatgctgttattgaatctcaaaaaggcaatatccgcagccgcagaaatcttccatggtaacgcgcagaatgacgcccatgagtttcttgcccactgcctcgaccagctcaaggacaacatggagaaactgaacaccatttggaagccaaaatccgagttcggtgaagacaatttccctaagcaggtgttcgcagatgacccggacacctccggattcagttgccctgtaatcacaaacttcgaactcgagttactgcactccatcgcctgtaaggcatgtgggcaagtgatcctgaagaccgaacttaataattacctgtccattaacttgccacagcggattaaggctcatccaagttccatccagagcacctttgatctgttcttcggggccgaagaattggagtataagtgcgcaaaatgcgaacacaaaacgagcgtgggcgtgcattcattctccaggttgccccggattcttatcgtccacttaaaacgctattcactgaacgaattctgcgcgttaaagaaaaatgaccaggaagttatcatttccaagtacctgaaggtatcttcacactgcaacgagggaaccagaccccctctgccactgtcggaagacggagagatcacagattttcaactgctgaaggtgattcgtaagatgacttcaggaaatataagtgtctcatggccggcgacaaaggagagtaaggacatcttggcaccgcacatcggctccgacaaagaatctgaacaaaagaagggccagacagtatttaagggcgcctcccgcagacagcagcagaagtatctgggcaagaatagcaaacccaatgagctggagtcagtttacagcggcgatagggcctttatagagaaggaaccccttgcccacctgatgacatacctcgaggatacaagcttgtgtcaattccacaaggccggcggaaagcccgcatcttcccccggtacccccctgagcaaagtggacttccaaacagttccagaaaatccgaagaggaagaagtacgtcaaaacatccaagtttgtagccttcgaccgtatcatcaacccaacgaaggatctttacgaggataagaacattaggattcccgagcgcttccagaaggtgagcgagcagacacaacaatgcgatggtatgaggatctgtgaacaggcgccacaacaggctctgcctcaaagcttcccaaagccagggacccaaggtcacacaaagaatttgttgcggccaactaagctcaacttacagaaatctaataggaactctttacttgcactgggatccaataagaaccctcggaataaggatattctcgataaaatcaagtccaaagccaaggagacaaaacgaaacgacgacaaaggagaccacacttatcggctcattagcgtggtctcccatctgggcaagactctgaaatcagggcactatatttgcgatgcctacgactttgaaaagcagatctggttcacatacgatgatatgagggtactgggaatacaggaagcccagatgcaagaagatcgtcgatgtactgggtacatttttttttatatgcacaatgagatattcgaggagatgctgaaaagagaggaaaatgcccagctgaatagcaaggaagtggaggagaccctacaaaaagagtag

SEQ ID NO: 222197 - DNA, 2742 bp, Artificial Sequence
  derived and/or modified sequence
atggctgcgctctttttgcgcggattcgtccagattgggaactgcaaaacaggaatcagtaaatcaaaggaagcattcatcgaagccgtggaacggaagaagaaggacagattagtgctgtacttcaagtctgggaagtactctacctttcgcttgtccgataacatccaaaatgttgtgctgaagagctaccggggtaaccagaatcacctacatctaaccttgcagaacaacaacgggctctttatcgagggactgtctagcacagacgccgaacagctgaagatcttcctcgaccgcgtgcaccagaacgaggttcagcctccagtgagaccagggaagggcggtagcgtgttttccagcacgacccagaaagaaattaacaagacttcattccacaaggtggatgagaagtccagttccaaatcatttgagatagctaagggctctggaaccggcgtgctgcagcgcatgccgctcttaacatcaaaactgactttgacatgtggagaacttagcgaaaaccagcataagaaaaggaagagaatgttatcctcctcatccgagatgaatgaagagttcctgaaagaaaacaattccgtggaatacaagaagagcaaagctgactgttcacggtgcgtaagctataaccgagagaaacagctgaagttaaaagagctggaagagaacaaaaaactggagtgcgagtcctcctgtatcatgaatgcaactggtaacccctacctggatgacattggtttgctccaggccctgactgaaaagatggtactggtctttcttctgcagcagggatacagcgatgggtacaccaagtgggataaacttaaactcttctttgagctgtttcctgaaaagatttgccatggattgcccaaccttggcaacacatgctacatgaatgccgtcctgcaatctttgcttagcataccaagcttcgctgacgatcttctcaatcagtcttttccttgggggaaaatccccttgaacgctctgaccatgtgcctggccaggttactgttctttaaggacacatacaacatcgagattaaggaaatgttacttctcaatctaaagaaggcaattagcgccgctgcggaaatatttcatggcaacgctcaaaacgacgctcatgaattcctggcccactgcctggatcaactgaaagataacatggaaaagctgaatactatctggaagcctaagtctgagttcggggaggataattttccgaagcaagtttttgcagacgaccccgatacttccgggttttcctgccccgtgatcacgaattttgagctggagcttctccactcaatcgcatgcaaagcctgtggacaggttattttgaagaccgagctgaataattaccttagcataaacttgccccagaggataaaagcccatccctcgagcatccaatccacttttgatttgttttttggggctgaggagctagagtataagtgtgcaaaatgcgaacacaagacaagcgtgggtgtccacagcttttcaagactgccacgaatactgatcgtacatctcaaaagatacagtctcaatgagttttgcgccttaaagaaaaatgatcaggaggttatcatcagtaagtatctgaaggtgtcctcacactgcaatgagggcacacgcccacccctccctctaagtgaagatggggagattacagatttccagctgctgaaggtcatccgcaagatgacaagcggtaatattagcgtgtcatggcccgcaactaaagagtcaaaggatatcctagcaccgcatatcggctccgacaaggagagtgaacaaaaaaaggggcaaaccgtgttcaaaggggcaagtagaagacagcagcagaaatatctcggaaagaacagcaagcccaacgaactggaatctgtgtacagcggcgacagggcgtttattgagaaagagcctttggctcacctcatgacatatttagaagatacatccctgtgccaattccataaagccggtggtaagcccgctagttcaccagggactccccttagcaaggtggatttccagaccgtgcctgagaaccctaaacgcaagaaatacgtgaagacaagtaagtttgtggcatttgatcgcattattaaccccacaaaggatctctacgaggacaagaatattcgaattccggaaagatttcagaaagtttctgagcagacacaacaatgtgacggcatgcgtatctgcgaacaggcaccacagcaggctctgcctcagtcattccctaaaccaggaactcagggtcataccaaaaacctgctgagacccactaagctgaacctgcagaagtcaaaccggaactccctgctcgcactgggttccaacaaaaacccacggaataaggatatcctggacaagatcaagtcaaaggccaaagagaccaaaaggaatgacgacaagggcgatcacacgtacaggctcatctctgtcgtgagtcacttgggcaagactctgaagtctgggcattatatctgtgacgcctacgactttgagaagcaaatttggtttacatatgacgatatgagagtgctcggtatccaagaggcgcagatgcaagaagacagaagatgcacaggatatatatttttttacatgcacaacgagatattcgaagaaatgctcaagcgcgaggaaaacgctcagctgaattccaaggaggtcgaggagaccctacaaaaagagtag

SEQ ID NO: 222198 - DNA, 2742 bp, Artificial Sequence
  derived and/or modified sequence
atggcggcattgtttttgaggggatttgtacaaatcggaaactgtaaaaccgggatatctaagagcaaagaagctttcattgaagccgttgaaaggaagaaaaaggatcggctagtgctgtacttcaaaagcggcaaatatagcacgtttcggctaagcgacaatatccaaaacgtggtcctgaagagttatcgaggaaatcagaaccacttgcatctgaccctgcagaataacaatggcctcttcatcgagggtctgagctctacagatgcagagcaactgaaaatcttcctggaccgggtgcaccagaatgaagtgcagccaccggtcaggccaggtaagggtggtagcgtgttctctagcactacccaaaaagaaattaacaaaacatcctttcataaggtggacgagaagtcatcgagcaagtcattcgagatcgccaaaggctctggaacgggggtcttacagaggatgcctctgctaacatctaagcttaccctcacgtgtggcgagctgagcgagaaccagcataagaaacgcaagcgcatgcttagctcttcaagcgaaatgaatgaggagtttctcaaagagaataacagtgtcgaatacaaaaaatccaaggcagattgttcccgatgtgtatcctataatagggagaagcagcttaaactcaaggaacttgaagagaataaaaaactggagtgcgagagcagttgtattatgaacgccacaggaaatccgtatcttgatgatattgggctgctgcaagcactgaccgaaaaaatggtgctggtgtttctcctccagcaaggctactctgatggatacactaaatgggacaagctaaaactcttttttgagctgttccctgagaagatctgccatgggcttcccaatctgggcaatacttgctatatgaatgccgtgctgcaatccttactgagtatcccttcattcgctgatgatctgctcaaccagagtttcccttggggaaaaatccccttaaatgcccttacgatgtgcctggcgagactcttattctttaaagatacctacaatatagaaattaaggagatgcttctgttgaatttgaagaaggctataagtgctgcagccgaaatcttccatggaaacgcgcagaatgatgcacatgaattcctggcccactgcttagaccagttgaaggataacatggagaaacttaacaccatctggaaaccaaagagcgaattcggcgaagacaactttcccaagcaagtttttgccgacgaccccgacacaagtgggtttagttgtcctgtcatcaccaactttgagctggaactgttgcacagcattgcatgcaaggcttgcgggcaagtcatactaaagaccgagctgaataattacctgtccattaatttgccacagagaattaaggctcacccctcaagcattcagtctacattcgacctctttttcggggctgaagagttggaatacaaatgcgcgaaatgcgaacataaaacaagtgtgggggttcattcatttagtaggctgccccgtattctgatcgtgcatctgaaacgctattcactcaatgagttctgcgccctgaaaaaaaacgatcaagaggtcattatcagcaagtacctcaaggtgtcaagtcattgcaacgagggcacaagacccccactacccctaagcgaggatggagaaatcaccgatttccagctccttaaggtgatccgcaaaatgacctctggtaacatctccgtgagctggcccgctaccaaggaatcgaaagatatcctggctcctcacattggttccgacaaggagagtgaacagaaaaagggccaaactgtgtttaaaggcgcttccaggagacagcagcaaaagtacctggggaagaactctaagcccaacgaattggagtctgtatacagcggggacagagccttcattgagaaagagcctcttgcacacctaatgacttatttagaggatactagcctgtgccagtttcacaaagccggaggcaaaccagcttcaagtcccggaacccccctgagtaaagtggatttccagacggtgccagaaaaccctaaacgaaaaaagtacgtcaaaacatctaagttcgtagctttcgataggatcattaatccaacgaaggatctctacgaggataagaatataaggatccctgagaggtttcagaaggtaagcgagcagactcagcagtgcgacggcatgaggatttgcgagcaagccccacagcaggctctcccacaatcttttcctaagcctggtacccaaggccacactaaaaacctcctcagaccaaccaaattaaacctgcaaaagagtaacagaaactccctgctcgctctcggaagcaacaaaaaccccaggaacaaagacatcctggataaaattaagtctaaagccaaggaaaccaaaagaaacgatgataaaggggatcatacttacagactaattagcgtggtgtcacatctgggtaagacccttaaatcagggcattacatttgcgacgcatatgatttcgagaagcagatctggttcacctatgatgatatgagagttctgggcatccaggaggcccagatgcaggaggacaggcggtgtacagggtacatattcttctatatgcacaatgaaatcttcgaagaaatgctcaagagagaagaaaatgcacaactgaacagtaaagaagtggaggagacactgcagaaagagtag

SEQ ID NO: 222199 - DNA, 3642 bp, Artificial Sequence
  derived and/or modified sequence
cttcaagattatcaataatcggagatacgtatattttatttgtaaagaaaacatggctgccctattcctacgtggttttgtccaaatagggaactgcaagactgggatatctaagtcaaaagaagcattcattgaagcagtggaaagaaagaagaaagatagactggtgctgtatttcaaaagtggaaaatatagcacttttcggctaagtgataatattcaaaatgtagtccttaaatcctatagaggaaaccaaaatcacctgcatttaactttacaaaataataatggcttgtttattgaaggattatcctccacagatgctgaacaattgaagatattcttggacagagttcatcaaaacgaggttcagccacctgtgagacctggtaagggtgggagtgtcttttctagcacaacacagaaggaaatcaacaaaacttcattccacaaagttgatgagaaatcaagtagcaaatcttttgagatagcaaaaggaagtgggacaggtgtccttcagaggatgcctttgcttacatcaaaattgacacttacttgcggagagttatcagaaaatcagcacaagaagaggaaaagaatgctctcatctagctcagagatgaatgaggaattcttgaaagaaaataattctgtagaatacaagaaatccaaggcagattgttcgaggtgtgtaagctataatcgagagaaacaattgaagttaaaagagttagaagagaataagaaattggaatgtgaatcttcatgcatcatgaacgccactggaaatccttacctagatgacattggtcttctccaagctctcactgagaaaatggttttggtatttctgttacaacaagggtatagtgacggttacacaaagtgggataaattaaaactattttttgaattatttccagagaaaatatgccacggcctccccaatttgggaaacacctgttatatgaatgcagtgttacagtctctactttcaatcccatcgtttgctgatgatttacttaatcagagtttcccatggggtaaaattccccttaatgctcttaccatgtgcttggcacggctacttttttttaaagatacctataatatagaaatcaaggagatgttactcttgaatcttaaaaaggccatttcagcagctgcagagatattccatggcaatgcacagaacgatgctcatgagtttttagctcactgtttagatcaactgaaagataacatggaaaaactcaacacaatttggaagcctaaaagtgaatttggggaagataattttcctaaacaggtttttgctgatgatcctgacaccagtgggttttcttgccctgtcattactaattttgagttagagttgttgcactccattgcttgtaaagcttgtggtcaggttattctcaagacagaactgaataattacctctccatcaaccttccccaaagaataaaagcacatccttcatctattcagtctacttttgatcttttttttggagcagaagagcttgagtataaatgtgcaaaatgtgagcacaagacttccgttggagtgcactcattcagtaggctacctagaatccttattgttcacctcaaacgctatagcttgaatgagttttgtgcattaaagaagaatgaccaggaagtcatcatttccaaatatttaaaggtgtcttctcattgcaatgaaggcaccagaccacctcttcccttgagtgaggatggagaaattacagatttccaattattaaaagttattcgaaagatgacttctggaaacatcagtgtatcatggcctgcaacaaaggaatccaaagatatcctggctccacacattggatcagataaggagtctgaacaaaaaaaaggccagacagtctttaaaggggcaagcagaagacagcagcaaaagtaccttggaaaaaattctaaaccaaatgagctagaatctgtatactcaggagatcgagcattcattgaaaaagaaccgttagctcacttaatgacgtatctggaagatacctcactttgtcagttccacaaagctggaggtaaacctgccagcagcccaggcacacctctctcaaaagttgactttcaaacagtgcccgaaaatccaaaacgaaagaaatatgtgaaaaccagtaagtttgtagcttttgataggattatcaatcctactaaagatttgtatgaagataaaaatatcagaattccagaaagattccaaaaagtgtctgaacagactcagcagtgtgacggtatgagaatctgtgaacaagcccctcagcaggcactgcctcaaagctttccaaagccaggcacccaggggcacacaaagaacctcctaagacctacaaaattaaatctacagaagtctaacaggaattccctacttgcactgggttccaataagaatccaagaaacaaagacattttagataagataaaatctaaagccaaggaaacaaaaagaaatgatgataagggagatcatacctaccggctcattagtgttgtcagccatcttgggaagactctaaagtcaggccattatatctgtgatgcctatgactttgagaaacagatctggttcacttacgatgatatgcgggtgttaggtatccaggaggcccagatgcaggaggataggcgttgcactgggtacatcttcttttacatgcataatgagatctttgaagagatgttgaaaagagaagagaatgcccagcttaatagcaaggaggtagaggagacccttcagaaggaataagaggaacgtactcctccttgtacagatctgcctgactgtctcactcgataccacttcctccatggaaggaaaactgtgaactttatccagagatgaaaatgcaattagtctaggaccaaaggtcaaacagaaacacttaatggggagatctgcattctaatcctgacacagacacctcaatcccatagctctggctgatgagcatccttctctcctacaagactgaaattgtgtttttcatgttcttcttcattttaatatagtcagggtcttgctctgtcatcctggctagagtgcagtccttcaataataactcactgcagcctcaaactcctggcatcaagcgattctctctcagcctcctgaaaagagagggacttatcttcttgcttgagatgggactatagatgtgtgccaccaggcctagctatttttttttttttttttgctttttgcagagacagggtctcactatgctgcccaggttggacttgaactcctggcctcaagcaatcttcctgcctctttccatgttctaatacagtggtttaaaaagtatgctccttaaactagcagcaccaggagcatgggggtagtcatttgaaatgcaaaatcttgggttccactgtagacctactgattcagaaacttggggtaagggatagcaatctgatggagaccgtgatgcttgatacagtttgagaaccactactgtactacatacactaccttggttgtatatttaaattgcttattttgtaaaaggttttgattacatttttgtgtttttcatattaatgtatgccttgcctttgtgaacttattaaaagccaaactcacaaaaatca

SEQ ID NO: 222200 - DNA, 3342 bp, Artificial Sequence
  derived and/or modified sequence
caacagattccctgtttctgctttaacctgggctgcttgctaagtgcttgcctctcaggatccttgtggagctgaacttgcaaaacagattggaacttcaagattatcaataatcggagatacgtatattttatttgtaaagaaaacatggctgccctattcctacgtggttttgtccaaatagggaactgcaagactgggatatctaagtcaaaagaagcattcattgaagcagtggaaagaaagaagaaagatagactggtgctgtatttcaaaagtggaaaatatagcacttttcggctaagtgataatattcaaaatgtagtccttaaatcctatagaggaaaccaaaatcacctgcatttaactttacaaaataataatggcttgtttattgaaggattatcctccacagatgctgaacaattgaagatattcttggacagagttcatcaaaacgaggttcagccacctgtgagacctggtaagggtgggagtgtcttttctagcacaacacagaaggaaatcaacaaaacttcattccacaaagttgatgagaaatcaagtagcaaatcttttgagatagcaaaaggaagtgggacaggtgtccttcagaggatgcctttgcttacatcaaaattgacacttacttgcggagagttatcagaaaatcagcacaagaagaggaaaagaatgctctcatctagctcagagatgaatgaggaattcttgaaagaaaataattctgtagaatacaagaaatccaaggcagattgttcgaggtgtgtaagctataatcgagagaaacaattgaagttaaaagagttagaagagaataagaaattggaatgtgaatcttcatgcatcatgaacgccactggaaatccttacctagatgacattggtcttctccaagctctcactgagaaaatggttttggtatttctgttacaacaagggtatagtgacggttacacaaagtgggataaattaaaactattttttgaattatttccagagaaaatatgccacggcctccccaatttgggaaacacctgttatatgaatgcagtgttacagtctctactttcaatcccatcgtttgctgatgatttacttaatcagagtttcccatggggtaaaattccccttaatgctcttaccatgtgcttggcacggctacttttttttaaagatacctataatatagaaatcaaggagatgttactcttgaatcttaaaaaggccatttcagcagctgcagagatattccatggcaatgcacagaacgatgctcatgagtttttagctcactgtttagatcaactgaaagataacatggaaaaactcaacacaatttggaagcctaaaagtgaatttggggaagataattttcctaaacaggtttttgctgatgatcctgacaccagtgggttttcttgccctgtcattactaattttgagttagagttgttgcactccattgcttgtaaagcttgtggtcaggttattctcaagacagaactgaataattacctctccatcaaccttccccaaagaataaaagcacatccttcatctattcagtctacttttgatcttttttttggagcagaagagcttgagtataaatgtgcaaaatgtgagcacaagacttccgttggagtgcactcattcagtaggctacctagaatccttattgttcacctcaaacgctatagcttgaatgagttttgtgcattaaagaagaatgaccaggaagtcatcatttccaaatatttaaaggtgtcttctcattgcaatgaaggcaccagaccacctcttcccttgagtgaggatggagaaattacagatttccaattattaaaagttattcgaaagatgacttctggaaacatcagtgtatcatggcctgcaacaaaggaatccaaagatatcctggctccacacattggatcagataaggagtctgaacaaaaaaaaggccagacagtctttaaaggggcaagcagaagacagcagcaaaagtaccttggaaaaaattctaaaccaaatgagctagaatctgtatactcaggagatcgagcattcattgaaaaagaaccgttagctcacttaatgacgtatctggaagatacctcactttgtcagttccacaaagctggaggtaaacctgccagcagcccaggcacacctctctcaaaagttgactttcaaacagtgcccgaaaatccaaaacgaaagaaatatgtgaaaaccagtaagtttgtagcttttgataggattatcaatcctactaaagatttgtatgaagataaaaatatcagaattccagaaagattccaaaaagtgtctgaacagactcagcagtgtgacggtatgagaatctgtgaacaagcccctcagcaggcactgcctcaaagctttccaaagccaggcacccaggggcacacaaagaacctcctaagacctacaaaattaaatctacagaagtctaacaggaattccctacttgcactgggttccaataagaatccaagaaacaaagacattttagataagataaaatctaaagccaaggaaacaaaaagaaatgatgataagggagatcatacctaccggctcattagtgttgtcagccatcttgggaagactctaaagtcaggccattatatctgtgatgcctatgactttgagaaacagatctggttcacttacgatgatatgcgggtgttaggtatccaggaggcccagatgcaggaggataggcgttgcactgggtacatcttcttttacatgcataatgagatctttgaagagatgttgaaaagagaagagaatgcccagcttaatagcaaggaggtagaggagacccttcagaaggaataagaggaacgtactcctccttgtacagatctgcctgactgtctcactcgataccacttcctccatggaaggaaaactgtgaactttatccagagatgaaaatgcaattagtctaggaccaaaggtcaaacagaaacacttaatggggagatctgcattctaatcctgacacagacacctcaatcccatagctctggctgatgagcatccttctctcctacaagactgaaattgtgtttttcatgttcttcttcattttaatatagtcagggtcttgctctgtcatcctggctagagtgcagtccttcaataataactcactgcagcctcaaactcctggcatcaagcgattctctctcagcctcctgaaaagagagggacttatcttcttgcttgagatgggactatagatgtgtgccaccaggcctagctatttttttttttttttttgctttt

SEQ ID NO: 222201 - protein, 112 aa, Artificial Sequence
  derived and/or modified sequence
MFVLLYVTSFAICASGQPRGNQLKGENYSPRYICSIPGLPGPPGPPGANGSPGPHGRIGLPGRDGRDGRKGEKGEKGTAGLRGKTGPLGLAGEKGDQGETGKKGPIGPEGEK

SEQ ID NO: 222202 - DNA, 339 bp, Artificial Sequence
  derived and/or modified sequence
atgttcgtgctactatatgtaactagttttgcgatatgcgctagcggccagcctagaggtaatcagctgaaaggcgagaactactctccacgctacatatgctcaatacctggccttcccggtccccctggccctcccggagccaatgggagccccggtcctcacggccgaattggtctgcctggcagagacggtagagacggaaggaaaggggagaaaggggagaagggaactgccggtctgaggggcaaaactggcccattgggcctggctggcgaaaaaggtgaccagggggagactggcaagaagggtccgatcggacccgaaggtgagaaatag

SEQ ID NO: 222203 - DNA, 870 bp, Artificial Sequence
  derived and/or modified sequence
atgtttgtgctgctgtacgtcacaagcttcgccatttgtgccagcgggcagccgcgtgggaaccaattgaagggtgaaaattactcaccacgctacatctgcagtattccgggactgcctggcccacctggtccacccggtgctaacgggtctcccggacctcacggaagaatcggcctcccgggtcgcgatgggcgtgacgggcgtaagggagaaaagggcgaaaaaggcaccgccggtctgaggggtaagacgggccctctgggcctggctggggagaaaggagaccaaggcgaaactggaaagaagggtcccatcggaccggaaggcgagaagggtgaggtgggtccaattggacccccaggtcccaagggtgaccgaggcgaacaaggggatcctgggcttcccggtgtgtgtaggtgcggcagtatcgtactgaagtcagctttcagtgtgggtatcactacaagctaccctgaggagcgactccccatcatcttcaataaggtgctttttaatgaaggagagcattacaatcccgcaacaggaaaattcatttgcgcatttcccggaatctattacttctcgtatgacatcactctggcaaataaacacctagccattggcttggtgcataatgggcagtataggataaagacattcgatgcaaacaccggcaatcatgatgtggcctcgggtagcacggtaatttacctacagcccgaggacgaggtctggttagaaattttttttactgatcaaaacggactgttctctgacccaggttgggccgattcgctcttttccgggttcttgttatatgttgatactgattatctcgactccatctcggaggatgacgagctgtag

SEQ ID NO: 222204 - DNA, 870 bp, Artificial Sequence
  derived and/or modified sequence
atgtttgttttgctgtatgtgacatcattcgctatctgtgcttccgggcagccacgcggaaaccagctcaagggcgagaactactctccgagatacatttgtagcattcctggtttgccaggaccaccagggcctccaggagccaatggaagtcctggacctcatggtcggattggactgcccggacgggacggcagagacgggagaaagggggagaaaggtgagaaaggaactgcgggattacgcggaaagacgggcccacttggcttggctggcgaaaaaggtgaccagggcgagacaggaaaaaagggcccaattggaccggaaggagagaaaggcgaagtgggcccaatcgggcctcccggaccaaaaggcgatcgcggtgaacagggcgaccctggcctacctggtgtgtgccggtgtggcagtatagtgctgaagtccgccttttccgtggggattactacctcttacccggaggagcggctccccataatcttcaataaagtcctgttcaacgagggagaacactacaatcctgcaacgggcaagttcatttgcgcgttccctggcatatattacttcagctacgatatcacattggccaacaagcacctggctatcggcctcgtgcacaacgggcagtaccggattaagacttttgacgcaaataccggaaaccatgatgttgccagtggctcgaccgtcatatatcttcagcccgaggacgaggtgtggctggagatcttttttacagatcagaatgggctcttctccgatcctggatgggccgacagcctcttctctgggttcctactctatgtggatactgactatctagattctatctctgaagatgacgagctgtag

SEQ ID NO: 222205 - DNA, 339 bp, Artificial Sequence
  derived and/or modified sequence
atgtttgtgctcttatacgttacctctttcgccatctgtgcatcaggtcaacccagaggcaaccaactcaagggagaaaattactctcctaggtacatctgttcgattcctggattacccggccccccaggtccacccggagcgaatggatccccaggaccacatggtcgaattggcctacccggtcgagatggtagagacggccgcaaaggggagaaaggggaaaaaggcacagcagggttacgaggaaaaacaggcccactcggactggcaggcgaaaagggggaccagggagagactggcaaaaaaggacctatagggccggaaggggagaagtag

SEQ ID NO: 222206 - DNA, 870 bp, Artificial Sequence
  derived and/or modified sequence
atgtttgtgttactatacgtcacctcctttgccatctgcgctagtggacagccccgcggaaatcagctcaagggcgaaaactactccccccgctatatttgttccattccagggctgccgggccctcctgggccacccggtgccaacggctctccaggaccccacggaaggatcgggctgcccgggagggacggtcgtgacggacgtaagggcgagaaaggtgagaagggaactgcaggtctacgcggcaagaccggaccactagggctcgcaggcgaaaagggcgatcagggcgagactggtaaaaaaggaccaattggtcctgagggagagaagggcgaagtgggaccaataggccctccaggtccaaagggggatcgcggcgagcaaggagacccaggcctcccgggagtttgtcggtgcggcagcatcgtgctaaagagtgcttttagcgtcggcatcacaacaagctatcctgaggagagactgcctatcatttttaacaaggtcttgtttaacgagggtgagcactacaacccagctactggtaaatttatctgcgcattcccgggcatctactatttcagttacgacatcaccctggctaataaacatttggcaatcggactcgttcacaacgggcaatacaggatcaaaaccttcgatgctaatacggggaaccacgacgtggcctctgggtccacagtgatatacctgcagccagaggacgaggtgtggttggagatatttttcactgatcagaatggactcttctcagaccctggatgggcagattccctgttttctggattcttgctttatgtcgacactgactacctggattcgatatccgaagacgacgagttgtag

SEQ ID NO: 222207 - DNA, 870 bp, Artificial Sequence
  derived and/or modified sequence
atgtttgttctgctgtacgttaccagttttgccatctgcgccagtggacagcctagaggaaatcagctcaagggagaaaattactcacctcgttacatctgctccatccctggcctgcccggccctcccggacccccaggcgcaaacggatcgccagggccacacgggagaataggacttccaggccgcgacggtagggacgggagaaagggcgaaaagggagagaagggcacggcagggctacgcggaaagaccggtcctctaggattggcaggtgaaaagggcgatcaaggtgaaacgggaaagaagggtcccataggcccggagggtgaaaaaggagaagttggaccaatcggtccaccaggacccaaaggcgataggggagaacagggtgatcccggcctgccgggggtttgccggtgcggctccatagtgttgaaaagcgcttttagcgttggaatcaccacgagttaccccgaggagaggttgcctatcatttttaacaaggtgttgttcaatgagggagagcattataatccagccactggcaagttcatttgcgcttttcccggtatctactatttcagctatgacattaccctagcaaacaagcacttggcgatcggactggtgcataacgggcagtataggattaaaactttcgacgccaatacaggtaatcacgatgtggcttctggctccactgtaatttatctacagcctgaggacgaagtttggctggaaatctttttcaccgaccagaatggattattctctgacccaggctgggcagattccttgttttctggctttctgctgtacgttgatacagactatctggatagtataagcgaagacgacgagctctag

SEQ ID NO: 222208 - DNA, 339 bp, Artificial Sequence
  derived and/or modified sequence
atgtttgtgcttctgtatgtcacgtcttttgccatttgtgcatcgggacagccccgcggaaaccagcttaaaggggagaattatagtccccgctatatttgctctatccctggcctccctggccctcccggacctcccggcgctaatggatcacctggccctcacgggcgaataggactccccggcagagacggacgtgatggaaggaaaggggagaaaggagagaaaggaaccgccggcttgcggggtaagactggaccattaggccttgccggcgaaaagggggaccagggagagactggaaaaaaaggtcctataggccccgaaggagagaagtag

SEQ ID NO: 222209 - DNA, 870 bp, Artificial Sequence
  derived and/or modified sequence
atgtttgtactattgtacgtgactagtttcgctatttgtgcatctggacagcctagaggcaatcagctaaaaggtgagaattactccccccgatatatctgcagcattccaggcttgcccgggcccccagggccacctggagctaacggcagcccaggaccgcatggacgcattggcctgccggggagggatggaagggacggacgaaagggggagaaaggagagaaagggaccgccggactgcgaggtaagactggtccactgggattggctggcgaaaagggggatcagggagagacaggaaagaaaggaccgattggacccgaaggagagaaaggtgaggtgggtcctatcgggccccccggccccaagggcgataggggcgagcaaggagacccagggcttccaggcgtgtgtcggtgtgggagcattgtactgaaatctgcgttttctgttggtatcacaacaagctaccccgaggaacgtctacccattatcttcaacaaagttcttttcaatgagggcgagcactacaaccccgctactggcaaattcatctgcgcttttccaggcatttattacttttcatacgatatcacactggccaataaacacttggcgattggcttagttcataacggccaatatcgcattaagactttcgacgcaaataccggcaatcacgatgtcgcgagcggatctactgttatttaccttcagcctgaggacgaagtttggctggagatctttttcaccgatcagaatggattgttttccgatcccggttgggccgattccttattttccggatttctcttgtatgtggataccgactacctggacagtatatcagaagacgatgagctctag

SEQ ID NO: 222210 - DNA, 870 bp, Artificial Sequence
  derived and/or modified sequence
atgttcgtgctgctgtatgtgactagttttgccatctgtgcctcagggcagcctaggggaaaccaacttaaaggagaaaactatagcccaaggtacatttgctcaatcccaggactgcccggcccgcctggcccaccgggcgcaaacggctcaccgggtccccatggccgcatcggtttgcctggaagagacggacgggacggaagaaaaggagagaagggggagaaggggactgcaggactgcgcgggaagacaggaccgttaggccttgccggagagaaaggcgaccagggggagaccggaaaaaaaggcccaatcggccccgaaggagaaaagggcgaagtgggccctattggtccaccaggccccaaaggcgaccggggagagcaaggcgacccgggcctcccaggcgtttgtcgatgtggatccatagtcctgaaatctgctttttccgtgggaattacaacttcatacccagaggagagacttcctatcatcttcaacaaagttctctttaacgagggcgagcactacaaccctgcaactggcaagttcatctgtgcttttccaggaatttattacttttcatacgatattactctggcaaacaagcaccttgcaattggattggttcacaatggccagtatcgcattaaaacttttgacgcaaacacaggcaaccacgacgtggcatccggcagcacagttatctaccttcagcccgaagacgaggtatggctcgagatcttcttcacagaccagaacgggttgttttccgatccaggatgggccgattctttgttcagtggattccttctgtacgtggatacagattacttggacagcattagcgaagacgacgagctttag

SEQ ID NO: 222211 - DNA, 339 bp, Artificial Sequence
  derived and/or modified sequence
atgttcgtgctgctgtacgtgaccagcttcgccatctgcgccagcggccagcccagaggcaaccagctgaagggcgagaactacagccccagatacatctgcagcatccccggcctgcccggcccccccggcccccccggcgccaacggcagccccggcccccacggcagaatcggcctgcccggcagagacggcagagacggcagaaagggcgagaagggcgagaagggcaccgccggcctgagaggcaagaccggccccctgggcctggccggcgagaagggcgaccagggcgagaccggcaagaagggccccatcggccccgagggcgagaagtag

SEQ ID NO: 222212 - DNA, 870 bp, Artificial Sequence
  derived and/or modified sequence
atgttcgtgctgctgtacgtgaccagcttcgccatctgcgccagcggccagcccagaggcaaccagctgaagggcgagaactacagccccagatacatctgcagcatccccggcctgcccggcccccccggcccccccggcgccaacggcagccccggcccccacggcagaatcggcctgcccggcagagacggcagagacggcagaaagggcgagaagggcgagaagggcaccgccggcctgagaggcaagaccggccccctgggcctggccggcgagaagggcgaccagggcgagaccggcaagaagggccccatcggccccgagggcgagaagggcgaggtgggccccatcggcccccccggccccaagggcgacagaggcgagcagggcgaccccggcctgcccggcgtgtgcagatgcggcagcatcgtgctgaagagcgccttcagcgtgggcatcaccaccagctaccccgaggagagactgcccatcatcttcaacaaggtgctgttcaacgagggcgagcactacaaccccgccaccggcaagttcatctgcgccttccccggcatctactacttcagctacgacatcaccctggccaacaagcacctggccatcggcctggtgcacaacggccagtacagaatcaagaccttcgacgccaacaccggcaaccacgacgtggccagcggcagcaccgtgatctacctgcagcccgaggacgaggtgtggctggagatcttcttcaccgaccagaacggcctgttcagcgaccccggctgggccgacagcctgttcagcggcttcctgctgtacgtggacaccgactacctggacagcatcagcgaggacgacgagctgtag

SEQ ID NO: 222213 - DNA, 339 bp, Artificial Sequence
  derived and/or modified sequence
atgttcgtgttgctgtatgtcacttccttcgccatttgtgcctcaggccagcccagaggaaatcaactcaagggagagaattactctccccggtatatctgtagcattccaggcctgcctggtcctccaggaccaccgggtgctaatgggtcaccgggtccgcacggccgcatcggcttacccggtcgtgacgggagagatgggcgaaagggtgaaaaaggagaaaagggtaccgctggtctgcgaggaaaaacgggtcccctgggactggcgggcgagaagggtgatcagggagaaacaggaaaaaaaggtccgatcgggcccgaaggggagaagtag

SEQ ID NO: 222214 - DNA, 870 bp, Artificial Sequence
  derived and/or modified sequence
atgtttgtgctgttgtacgtgacttctttcgctatttgcgcgtctggccagcccaggggaaaccaactgaagggagagaactatagcccccgctacatttgctcgattcccgggttgccaggtccaccgggaccccctggtgccaacgggagcccaggtccacacgggcgcatcggattgcccgggcgggacggcagggacgggcgtaaaggtgaaaagggcgagaaagggaccgcaggtcttagaggcaaaaccggcccactggggctagccggcgaaaagggtgatcagggggaaactggtaaaaaaggacctatcggacctgaaggagaaaagggcgaggtcggacccattggcccacccggtcctaaaggcgaccgcggagaacagggtgatccaggcttgcctggggtctgcagatgcggatccatagtcttaaagagcgcattctctgtcgggataactacttcgtaccctgaggagaggctgcccatcatctttaacaaagtccttttcaatgaaggcgagcactacaaccccgccacgggaaagttcatatgtgcctttcctgggatatactacttctcctacgacataaccttggccaataagcatctcgccatagggctagtacataacggccaatatcgcattaaaacattcgacgcgaacactggcaatcatgacgtggcaagtgggtcaacagtgatatatctgcagccagaagacgaggtttggttggaaatcttctttacggatcagaacggtctcttttctgacccgggctgggccgattctctgttcagcgggttcctattgtacgtcgatacggactatttggattccatatccgaagatgacgaactgtag

SEQ ID NO: 222215 - DNA, 870 bp, Artificial Sequence
  derived and/or modified sequence
atgtttgtgctgctgtatgttaccagctttgccatatgtgctagcggtcagccacgagggaaccagctcaagggtgaaaactattcccccaggtacatatgtagcattccagggttaccagggcctcccggcccccctggagccaacggttctcctggtccccatggcagaatcgggctcccggggcgagatggccgggatggaaggaaaggagagaaaggcgaaaagggaacagccggtctgaggggaaagacaggacccttggggctggcaggagaaaagggggaccaaggcgagacgggcaaaaaaggcccaattggacccgaaggcgagaaaggcgaggttgggccaattggaccccccggacccaaaggtgaccggggcgagcagggagaccccggcctgcccggcgtatgcagatgcgggtccatcgtcttaaagagtgccttctccgtaggcattaccacgtcataccctgaggagaggctccctattattttcaataaggtcctcttcaacgagggcgaacactacaatccagcgacgggaaagtttatctgcgcctttcctggcatatactatttttcttatgacattacacttgccaataagcacctcgccattggactggtccataacggacaataccgcatcaaaaccttcgatgctaacactgggaatcacgacgtggcttcaggatccacagtgatttatctgcaacccgaagacgaggtttggctcgagatcttcttcacagaccagaatggtttgttcagtgaccctgggtgggccgatagtcttttcagtggcttcctattatacgtcgacactgattatttagacagcatatctgaagatgacgagctgtag

SEQ ID NO: 222216 - DNA, 339 bp, Artificial Sequence
  derived and/or modified sequence
atgtttgtgctgctgtatgtgaccagctttgccatctgtgccagcggccagccccggggcaaccagctgaagggggagaactacagcccccgctacatctgcagcatccctggcctgcccggccccccaggccccccaggggccaacggcagccctggcccccacggccgcatcggcctgcccggcagagatggaagagatggcaggaagggggagaagggggagaagggcacagctggcctgcggggcaagacaggccccctgggcctggccggggagaagggggaccagggcgagaccgggaagaagggccccatcggccctgagggggagaagtag

SEQ ID NO: 222217 - DNA, 870 bp, Artificial Sequence
  derived and/or modified sequence
atgtttgtgctgctgtatgtgaccagctttgccatctgtgccagcggccagccccggggcaaccagctgaagggggagaactacagcccccgctacatctgcagcatccctggcctgcccggccccccaggccccccaggggccaacggcagccctggcccccacggccgcatcggcctgcccggcagagatggaagagatggcaggaagggggagaagggggagaagggcacagctggcctgcggggcaagacaggccccctgggcctggccggggagaagggggaccagggcgagaccgggaagaagggccccatcggccctgagggggagaagggggaggtgggccccatcggccccccaggccccaagggggacagaggagagcagggcgaccccggcctgcccggggtgtgccgctgtggcagcatcgtgctgaagagcgccttctctgtgggcatcaccaccagctacccagaggagcggctgcccatcatcttcaacaaggtgctcttcaatgaaggagagcactacaacccagccaccgggaagttcatctgtgccttccctggcatctactacttctcctatgacatcaccctggccaacaagcacctggccatcggcctggtgcacaacggccagtaccgcatcaagacctttgatgccaacacaggcaaccatgatgtggccagcggcagcaccgtcatctacctgcagccagaagatgaggtgtggctggagatcttcttcacagaccagaatggcctcttcagtgaccccggctgggccgacagcctcttcagcggcttcctgctgtatgtggacacagactacctggacagcatcagtgaagatgatgagctgtag

SEQ ID NO: 222218 - DNA, 339 bp, Artificial Sequence
  derived and/or modified sequence
atgttcgtgctgctgtacgtgaccagcttcgccatctgcgccagcggacagcccagaggcaaccagctcaagggcgagaactacagtcctcgctatatatgttcaatcccaggccttccaggcccaccagggcctcctggggcaaatggcagtcctggaccacacggccggattgggctgcctggaagggatgggagagacggaaggaaaggtgagaaaggtgagaagggaacagctggtttgcgcgggaaaaccggccccctgggtctggccggggagaagggtgatcaaggagagaccggcaaaaagggcccaattggccccgagggtgaaaaatag

SEQ ID NO: 222219 - DNA, 870 bp, Artificial Sequence
  derived and/or modified sequence
atgttcgtgctgctgtacgtgaccagcttcgccatctgcgccagcgggcaacctcgagggaaccagctcaagggagagaattacagcccccggtatatatgcagcatacccggactgcctgggccacccggaccgccaggagctaacggtagtccaggtccgcatggccgaattgggttacctggccgagacggtcgggatgggaggaagggtgagaagggtgagaaaggcacagccgggttaaggggcaagactgggccactcggcctggccggggagaagggagaccagggtgaaacggggaaaaagggtccaattggtccagaaggagagaaaggagaggtcggcccaataggtcctccaggccctaagggtgataggggggaacagggagaccctggattaccgggtgtgtgtcggtgcggatcgatcgtactcaagtctgcattctcagtaggtatcaccacgtcttaccccgaggaacggctacctataatctttaataaagtcctttttaatgagggagagcattacaaccctgcgacaggtaaatttatttgtgcttttcctggcatctactacttcagctatgacattaccctggcaaataagcatcttgccattgggctggtccataatggacagtatagaataaaaactttcgatgcgaacactggcaaccacgatgtcgcctcagggagcactgtcatttatcttcaaccggaagacgaagtgtggctggagattttcttcactgatcagaacgggttattctctgatccagggtgggctgacagcctgttcagtggcttccttctgtacgttgatacagattatctggatagcatctctgaggatgacgagttgtag

SEQ ID NO: 222220 - DNA, 870 bp, Artificial Sequence
  derived and/or modified sequence
atgttcgtgctgctgtacgtgaccagcttcgccatctgcgccagcggccagcctagaggtaatcagctcaaaggagagaactattccccacgctatatttgcagtattccaggcctccctgggcctcctggccctccaggggccaatggcagtccaggcccgcacggcaggataggattgccgggtagggatggcagggatggacgtaagggggagaaaggggaaaagggaaccgcaggacttcggggcaaaaccgggccattgggtctggctggcgagaagggggatcaaggtgagactggaaaaaaggggcccattggtccagagggagagaaaggggaggtcgggcccattggtccccctggccccaaaggggaccgcggtgaacagggtgaccctggcctgccaggggtgtgcaggtgcggaagcatcgtactcaagtccgccttttcagtggggataacaactagctaccccgaggagagattgcccatcatttttaacaaggtcttgttcaatgagggtgagcattacaacccagccaccggcaaattcatttgtgcgtttcctggcatctactactttagctatgatattacgctggccaataaacacctggccattggtctggtgcataatggtcagtacaggatcaaaacatttgatgcaaacaccggcaaccacgacgtagcgagcgggtccacagtaatctacttacagccagaagacgaagtgtggctggagatcttcttcactgaccaaaatggtctgtttagcgatcccggatgggccgactctctcttctctggctttctgctgtacgtggatacagactacctcgactccatctcagaggatgatgagctgtag

SEQ ID NO: 222221 - RNA, 339 nt, Artificial Sequence
  derived and/or modified sequence
auguuugugcucuuauacguuaccucuuucgccaucugugcaucaggucaacccagaggcaaccaacucaagggagaaaauuacucuccuagguacaucuguucgauuccuggauuacccggccccccagguccacccggagcgaauggauccccaggaccacauggucgaauuggccuacccggucgagaugguagagacggccgcaaaggggagaaaggggaaaaaggcacagcaggguuacgaggaaaaacaggcccacucggacuggcaggcgaaaagggggaccagggagagacuggcaaaaaaggaccuauagggccggaaggggagaaguag

SEQ ID NO: 222222 - RNA, 870 nt, Artificial Sequence
  derived and/or modified sequence
auguuuguguuacuauacgucaccuccuuugccaucugcgcuaguggacagccccgcggaaaucagcucaagggcgaaaacuacuccccccgcuauauuuguuccauuccagggcugccgggcccuccugggccacccggugccaacggcucuccaggaccccacggaaggaucgggcugcccgggagggacggucgugacggacguaagggcgagaaaggugagaagggaacugcaggucuacgcggcaagaccggaccacuagggcucgcaggcgaaaagggcgaucagggcgagacugguaaaaaaggaccaauugguccugagggagagaagggcgaagugggaccaauaggcccuccagguccaaagggggaucgcggcgagcaaggagacccaggccucccgggaguuugucggugcggcagcaucgugcuaaagagugcuuuuagcgucggcaucacaacaagcuauccugaggagagacugccuaucauuuuuaacaaggucuuguuuaacgagggugagcacuacaacccagcuacugguaaauuuaucugcgcauucccgggcaucuacuauuucaguuacgacaucacccuggcuaauaaacauuuggcaaucggacucguucacaacgggcaauacaggaucaaaaccuucgaugcuaauacggggaaccacgacguggccucuggguccacagugauauaccugcagccagaggacgaggugugguuggagauauuuuucacugaucagaauggacucuucucagacccuggaugggcagauucccuguuuucuggauucuugcuuuaugucgacacugacuaccuggauucgauauccgaagacgacgaguuguag

SEQ ID NO: 222223 - RNA, 870 nt, Artificial Sequence
  derived and/or modified sequence
auguuuguucugcuguacguuaccaguuuugccaucugcgccaguggacagccuagaggaaaucagcucaagggagaaaauuacucaccucguuacaucugcuccaucccuggccugcccggcccucccggacccccaggcgcaaacggaucgccagggccacacgggagaauaggacuuccaggccgcgacgguagggacgggagaaagggcgaaaagggagagaagggcacggcagggcuacgcggaaagaccgguccucuaggauuggcaggugaaaagggcgaucaaggugaaacgggaaagaagggucccauaggcccggagggugaaaaaggagaaguuggaccaaucgguccaccaggacccaaaggcgauaggggagaacagggugaucccggccugccggggguuugccggugcggcuccauaguguugaaaagcgcuuuuagcguuggaaucaccacgaguuaccccgaggagagguugccuaucauuuuuaacaagguguuguucaaugagggagagcauuauaauccagccacuggcaaguucauuugcgcuuuucccgguaucuacuauuucagcuaugacauuacccuagcaaacaagcacuuggcgaucggacuggugcauaacgggcaguauaggauuaaaacuuucgacgccaauacagguaaucacgauguggcuucuggcuccacuguaauuuaucuacagccugaggacgaaguuuggcuggaaaucuuuuucaccgaccagaauggauuauucucugacccaggcugggcagauuccuuguuuucuggcuuucugcuguacguugauacagacuaucuggauaguauaagcgaagacgacgagcucuag

SEQ ID NO: 222224 - RNA, 339 nt, Artificial Sequence
  derived and/or modified sequence
auguuugugcuucuguaugucacgucuuuugccauuugugcaucgggacagccccgcggaaaccagcuuaaaggggagaauuauaguccccgcuauauuugcucuaucccuggccucccuggcccucccggaccucccggcgcuaauggaucaccuggcccucacgggcgaauaggacuccccggcagagacggacgugauggaaggaaaggggagaaaggagagaaaggaaccgccggcuugcgggguaagacuggaccauuaggccuugccggcgaaaagggggaccagggagagacuggaaaaaaagguccuauaggccccgaaggagagaaguag

SEQ ID NO: 222225 - RNA, 870 nt, Artificial Sequence
  derived and/or modified sequence
auguuuguacuauuguacgugacuaguuucgcuauuugugcaucuggacagccuagaggcaaucagcuaaaaggugagaauuacuccccccgauauaucugcagcauuccaggcuugcccgggcccccagggccaccuggagcuaacggcagcccaggaccgcauggacgcauuggccugccggggagggauggaagggacggacgaaagggggagaaaggagagaaagggaccgccggacugcgagguaagacugguccacugggauuggcuggcgaaaagggggaucagggagagacaggaaagaaaggaccgauuggacccgaaggagagaaaggugagguggguccuaucgggccccccggccccaagggcgauaggggcgagcaaggagacccagggcuuccaggcgugugucggugugggagcauuguacugaaaucugcguuuucuguugguaucacaacaagcuaccccgaggaacgucuacccauuaucuucaacaaaguucuuuucaaugagggcgagcacuacaaccccgcuacuggcaaauucaucugcgcuuuuccaggcauuuauuacuuuucauacgauaucacacuggccaauaaacacuuggcgauuggcuuaguucauaacggccaauaucgcauuaagacuuucgacgcaaauaccggcaaucacgaugucgcgagcggaucuacuguuauuuaccuucagccugaggacgaaguuuggcuggagaucuuuuucaccgaucagaauggauuguuuuccgaucccgguugggccgauuccuuauuuuccggauuucucuuguauguggauaccgacuaccuggacaguauaucagaagacgaugagcucuag

SEQ ID NO: 222226 - RNA, 870 nt, Artificial Sequence
  derived and/or modified sequence
auguucgugcugcuguaugugacuaguuuugccaucugugccucagggcagccuaggggaaaccaacuuaaaggagaaaacuauagcccaagguacauuugcucaaucccaggacugcccggcccgccuggcccaccgggcgcaaacggcucaccggguccccauggccgcaucgguuugccuggaagagacggacgggacggaagaaaaggagagaagggggagaaggggacugcaggacugcgcgggaagacaggaccguuaggccuugccggagagaaaggcgaccagggggagaccggaaaaaaaggcccaaucggccccgaaggagaaaagggcgaagugggcccuauugguccaccaggccccaaaggcgaccggggagagcaaggcgacccgggccucccaggcguuugucgauguggauccauaguccugaaaucugcuuuuuccgugggaauuacaacuucauacccagaggagagacuuccuaucaucuucaacaaaguucucuuuaacgagggcgagcacuacaacccugcaacuggcaaguucaucugugcuuuuccaggaauuuauuacuuuucauacgauauuacucuggcaaacaagcaccuugcaauuggauugguucacaauggccaguaucgcauuaaaacuuuugacgcaaacacaggcaaccacgacguggcauccggcagcacaguuaucuaccuucagcccgaagacgagguauggcucgagaucuucuucacagaccagaacggguuguuuuccgauccaggaugggccgauucuuuguucaguggauuccuucuguacguggauacagauuacuuggacagcauuagcgaagacgacgagcuuuag

SEQ ID NO: 222227 - protein, 886 aa, Artificial Sequence
  derived and/or modified sequence
MRAEEPCAPGAPSALGAQRTPGPELRLSSQLLPELCTFVVRVLFYLGPVYLAGYLGLSITWLLLGALLWMWWRRNRRGKLGRLAAAFEFLDNEREFISRELRGQHLPAWIHFPDVERVEWANKIISQTWPYLSMIMESKFREKLEPKIREKSIHLRTFTFTKLYFGQKCPRVNGVKAHTNTCNRRRVTVDLQICYIGDCEISVELQKIQAGVNGIQLQGTLRVILEPLLVDKPFVGAVTVFFLQKPHLQINWTGLTNLLDAPGINDVSDSLLEDLIATHLVLPNRVTVPVKKGLDLTNLRFPLPCGVIRVHLLEAEQLAQKDNFLGLRGKSDPYAKVSIGLQHFRSRTIYRNLNPTWNEVFEFMVYEVPGQDLEVDLYDEDTDRDDFLGSLQICLGDVMTNRVVDEWFVLNDTTSGRLHLRLEWLSLLTDQEVLTEDHGGLSTAILVVFLESACNLPRNPFDYLNGEYRAKKLSRFARNKVSKDPSSYVKLSVGKKTHTSKTCPHNKDPVWSQVFSFFVHNVATERLHLKVLDDDQECALGMLEVPLCQILPYADLTLEQRFQLDHSGLDSLISMRLVLRFLQVEERELGSPYTGPEALKKGPLLIKKVATNQGPKAQPQEEGPTDLPCPPDPASDTKDVSRSTTTTTSATTVATEPTSQETGPEPKGKDSAKRFCEPIGEKKSPATIFLTVPGPHSPGPIKSPRPMKCPASPFAWPPKRLAPSMSSLNSLASSCFDLADISLNIEGGDLRRRQLGEIQLTVRYVCLRRCLSVLINGCRNLTPCTSSGADPYVRVYLLPERKWACRKKTSVKRKTLEPLFDETFEFFVPMEEVKKRSLDVAVKNSRPLGSHRRKELGKVLIDLSKEDLIKGFSQWYELTPNGQPRS

SEQ ID NO: 222228 - DNA, 2661 bp, Artificial Sequence
  derived and/or modified sequence
atgagagccgaggagccctgcgcccccggcgcccccagcgccctgggcgcccagagaacccccggccccgagctgagactgagcagccagctgctgcccgagctgtgcaccttcgtggtgagagtgctgttctacctgggccccgtgtacctggccggctacctgggcctgagcatcacctggctgctgctgggcgccctgctgtggatgtggtggagaagaaacagaagaggcaagctgggcagactggccgccgccttcgagttcctggacaacgagagagagttcatcagcagagagctgagaggccagcacctgcccgcctggatccacttccccgacgtggagagagtggagtgggccaacaagatcatcagccagacctggccctacctgagcatgatcatggagagcaagttcagagagaagctggagcccaagatcagagagaagagcatccacctgagaaccttcaccttcaccaagctgtacttcggccagaagtgccccagagtgaacggcgtgaaggcccacaccaacacctgcaacagaagaagagtgaccgtggacctgcagatctgctacatcggcgactgcgagatcagcgtggagctgcagaagatccaggccggcgtgaacggcatccagctgcagggcaccctgagagtgatcctggagcccctgctggtggacaagcccttcgtgggcgccgtgaccgtgttcttcctgcagaagccccacctgcagatcaactggaccggcctgaccaacctgctggacgcccccggcatcaacgacgtgagcgacagcctgctggaggacctgatcgccacccacctggtgctgcccaacagagtgaccgtgcccgtgaagaagggcctggacctgaccaacctgagattccccctgccctgcggcgtgatcagagtgcacctgctggaggccgagcagctggcccagaaggacaacttcctgggcctgagaggcaagagcgacccctacgccaaggtgagcatcggcctgcagcacttcagaagcagaaccatctacagaaacctgaaccccacctggaacgaggtgttcgagttcatggtgtacgaggtgcccggccaggacctggaggtggacctgtacgacgaggacaccgacagagacgacttcctgggcagcctgcagatctgcctgggcgacgtgatgaccaacagagtggtggacgagtggttcgtgctgaacgacaccaccagcggcagactgcacctgagactggagtggctgagcctgctgaccgaccaggaggtgctgaccgaggaccacggcggcctgagcaccgccatcctggtggtgttcctggagagcgcctgcaacctgcccagaaaccccttcgactacctgaacggcgagtacagagccaagaagctgagcagattcgccagaaacaaggtgagcaaggaccccagcagctacgtgaagctgagcgtgggcaagaagacccacaccagcaagacctgcccccacaacaaggaccccgtgtggagccaggtgttcagcttcttcgtgcacaacgtggccaccgagagactgcacctgaaggtgctggacgacgaccaggagtgcgccctgggcatgctggaggtgcccctgtgccagatcctgccctacgccgacctgaccctggagcagagattccagctggaccacagcggcctggacagcctgatcagcatgagactggtgctgagattcctgcaggtggaggagagagagctgggcagcccctacaccggccccgaggccctgaagaagggccccctgctgatcaagaaggtggccaccaaccagggccccaaggcccagccccaggaggagggccccaccgacctgccctgcccccccgaccccgccagcgacaccaaggacgtgagcagaagcaccaccaccaccaccagcgccaccaccgtggccaccgagcccaccagccaggagaccggccccgagcccaagggcaaggacagcgccaagagattctgcgagcccatcggcgagaagaagagccccgccaccatcttcctgaccgtgcccggcccccacagccccggccccatcaagagccccagacccatgaagtgccccgccagccccttcgcctggccccccaagagactggcccccagcatgagcagcctgaacagcctggccagcagctgcttcgacctggccgacatcagcctgaacatcgagggcggcgacctgagaagaagacagctgggcgagatccagctgaccgtgagatacgtgtgcctgagaagatgcctgagcgtgctgatcaacggctgcagaaacctgaccccctgcaccagcagcggcgccgacccctacgtgagagtgtacctgctgcccgagagaaagtgggcctgcagaaagaagaccagcgtgaagagaaagaccctggagcccctgttcgacgagaccttcgagttcttcgtgcccatggaggaggtgaagaagagaagcctggacgtggccgtgaagaacagcagacccctgggcagccacagaagaaaggagctgggcaaggtgctgatcgacctgagcaaggaggacctgatcaagggcttcagccagtggtacgagctgacccccaacggccagcccagaagctag

SEQ ID NO: 222229 - DNA, 4407 bp, Artificial Sequence
  derived and/or modified sequence
ggtgcatttccaggcgctgctctccgtcgcagagaaccctgagctcggcgcgccgagagtcccagcagggcaagggggcgcggcgtcctggtcctcgagcttgggagacagatgcgcatgggcgtgggggcatgcggacctaagctcgggtgaagctctcgggaagggcaagactgcggcgacgagatgcgagcagaggagccctgcgcccccggggcccccagcgccctgggagcccagcgcacgccgggccccgagctgcgcctgtccagccagctgctgcccgagctctgtaccttcgtggtgcgcgtgctgttctacctggggcctgtctacctagctggctacctggggctcagcataacctggttgctgctcggcgccctgctgtggatgtggtggcgcaggaaccgccgcgggaagcttgggcgcctggccgccgccttcgaattccttgacaatgaacgcgagttcatcagccgcgagctgcggggccagcacctgccagcctggatccacttcccggacgtggagcgggtcgagtgggccaacaagatcatctctcagacctggccctacctaagcatgatcatggaaagcaagttccgggagaaacttgagcccaagatccgagagaagagcatccacctgaggacctttacctttaccaagctctactttggacagaagtgtcccagggtcaacggtgtcaaggcacacactaatacgtgcaaccgaagacgtgtgactgtggacctgcagatctgctacatcggggactgtgagatcagtgtggagctgcagaagattcaggctggtgtgaacgggatccagttgcagggcaccctgcgggtcatcctggagcccctcctagtggacaagccctttgtgggagccgtgactgtgttcttccttcagaagccgcacctacagatcaactggactggcctgaccaacctgctggatgcgccgggaatcaatgatgtgtcagacagcttactggaggacctcattgccacccacctggtgctgcccaaccgtgtgactgtgcctgtgaagaaggggctggatctgaccaacctgcgcttccctctgccctgtggggtgatcagagtgcacttgctggaggcagagcagctggcccagaaggacaactttctggggctccgaggcaagtcagatccctacgccaaggtgagcatcggcctacagcatttccggagtaggaccatctacaggaacctgaaccccacctggaacgaagtgtttgagttcatggtgtacgaagtccctggacaggacctggaggtagacctgtatgatgaggataccgacagggatgacttcctgggcagcctgcagatctgccttggagatgtcatgaccaacagagtggtggatgagtggtttgtcctgaatgacacaaccagcgggcggctgcacctgcggctggagtggctttcattgcttactgaccaagaagttctgactgaggaccatggtggcctttccactgccattctcgtggtcttcttggagagtgcctgcaacttgccgagaaacccttttgactacctgaatggtgaatatcgagccaaaaaactctccaggtttgccagaaacaaggtcagcaaagacccttcttcctatgtcaaactatctgtaggcaagaagacacatacaagtaagacctgtccccacaacaaggaccctgtgtggagccaggtgttctccttctttgtgcacaatgtggccactgagcggctccatctgaaggtgcttgatgatgaccaggagtgtgctctgggaatgctggaggtccccctgtgccagatcctcccctatgctgacctcactcttgagcagcgctttcagctggaccactcaggcctggacagcctcatctccatgaggctggtgcttcggttcctgcaagtggaggaacgagagctggggagcccatacacaggacctgaagccctaaagaaaggccctctgctcatcaagaaagtggctaccaaccagggtcccaaagcccaacctcaggaagaaggccctacagatttgccatgtcccccagaccctgcttctgatactaaggacgtatccaggagtaccacaaccaccaccagtgctaccaccgttgccactgagcccacatcccaagagacaggcccagagcctaaaggcaaggacagtgccaaaaggttctgtgagcccatcggggagaagaagagtccagccaccatcttcctgactgtcccaggtccccactctccagggcccatcaagtcacccagacccatgaaatgccctgcctccccattcgcatggccgcccaagaggctggctcccagcatgtcctcgctcaactccttggcctcttcttgctttgacctggcagatatcagcctcaacattgaaggtggggacctcaggcgacggcagctgggtgagattcagctcacagtgcgctatgtgtgtctgcggcgctgcctcagcgtgctaatcaatggctgcagaaacctaacaccatgtaccagcagtggagctgatccctacgtccgtgtctacttgttgccagaaaggaagtgggcatgtcgtaagaagacttcagtgaagcggaagaccttggaacccctgtttgatgagacatttgaattttttgttcccatggaagaagtaaagaagaggtcactagatgttgcagtgaaaaatagtaggccacttggctcacacagaagaaaggagttaggaaaagtactgattgacttatcaaaagaagatctgattaagggcttttcacaatggtatgagctgactccaaatggacagcccagaagctgatgatgagaattcttatcactcacctttatattaaaatgtatatatatgtatatattttttcctttggatcacttacatccaatatatgtatattttgtcatttaaatcagaacaaccacttgaaattatatacatacaattcttgtgtggaatttaactccatgactgaatagcataaggaagaggttatttaaaagcaagaactactttttttggttggatttttttgttcaagtccagaaagaaatgttatatttgtgcctactaaattatccaaacctcagtgtttatatacttaaacaagtgccactttttagtaggtaattatataccatctgatttaggacttacctgaatgtatgtaccagaaagtgtcctgcctctggcataggggctgggggaggtctgtttctggagccactaccagcattcctgggcagtgactggccaaagggaagtcacttttttatggaaatagaaagtgacccaactcaaaactgccaagagctaacactgccaaagcccttctggctgccacctgtggtacttgtatgcctggatatttgttcttttatttgacctggagctaaaaatgtatttccctactggcaaaaatgttatactgatatacttaaataccttgagttaaatactcttgtgtagtctaagggccaaactccagcgtgtagcattatttccataggaaaatgcaaaccaagttccaagcccaggtctatgtctgactctcatagcaaagcactggagactgctgaagagtgtcaccatcagagaaaaggaagctttcagataagtttaggctattcaacttttctaaagagatggttggttcacctaaataacatgttaaaagcaaagtattaaattatatgcttaaacaagcgcctcttttacatttcagactttacaagaccaaatatacttctcatcccctccaacattcctggacctcctcttctctcttaccaacaccaacactacctgccgtcagttttctgtctctgcctctgccttcactgccacttttctgaagcagggcaacattcgagaacaaagttttgtcatgttactcttattccagtttcctgccatctgattcacatgcagatgttctattccagagtagtccaaatactatgctctgctgactcaagtcatgtctcaaacctatttcctctattaagtaagtcagtcaatccatagtgaaatggactcttcctaccgcctgtagcatttactgttgatactgagtattttccattttaatagttcccagcctttataacactaagttttaagaaatgttgattaggcatctgctaaggttacatgctaagcagctacttatattgtatttggtatttaattttgtttattctccagttgaacagtagggaacaattcaagctacttgaattgtttttcaccctcaccatccaagaccgtgttaagtacatagaagatgcatggtgaaattcgtttctgctgaggtttctattttaaatggcaaattctcataataaaatggagcattgatgccta

SEQ ID NO: 222230 - DNA, 2661 bp, Artificial Sequence
  derived and/or modified sequence
atgcgagctgaggaaccctgtgctcctggggccccaagcgccctgggtgcacagagaactccaggcccagagcttaggctgtccagccagcttctgccagagctatgtaccttcgtagtgagagttctgttttatttgggaccggtctatctcgccggatacctgggcctgtccattacatggctcctgcttggagcacttctatggatgtggtggaggagaaaccgacgtgggaaactgggtcgtctggctgccgcctttgaatttctcgacaacgaaagagagtttatttccagggagctccgaggacagcacctcccggcctggattcatttccctgacgtcgagcgggtggagtgggccaataagatcatctcccaaacctggccttacctgtctatgattatggagtcaaaattccgggagaaattggagcccaaaattcgcgagaagagcatccatcttagaacttttacgtttactaaactgtacttcgggcagaaatgtccccgcgtgaacggcgtgaaggcccacaccaatacctgcaatagaagaagggtgaccgtcgacctccagatttgctatattggcgattgcgagattagcgtagaactgcagaagattcaggcaggagtcaatggaattcagttgcaggggactttgagggtaatactggagcctctactggtcgacaaaccgtttgttggagccgtcactgtttttttcctgcaaaagcctcacctccagatcaattggactggcctcaccaatctattggatgctccagggattaatgatgtgtccgactctttgcttgaggatttgatcgcgacccatttagttttgcctaaccgagtgaccgtgccggtgaagaagggcctagatctgactaatctgcgtttcccactgccctgcggggtgatacgagtgcacctcctcgaagctgagcagctggcccaaaaagataattttttaggacttagggggaagtcggatccctatgctaaggtgtcgatcggactccagcacttccgcagcagaaccatctacaggaacttaaatcccacttggaatgaagttttcgagtttatggtgtacgaggttcctggtcaggatctggaagtcgacctctatgacgaggacaccgacagggatgacttcctggggagtctgcaaatttgtttgggggacgtgatgactaacagggttgtggatgaatggtttgtgcttaacgatactactagtgggagattacacctcaggctggaatggctttccttactgacagatcaagaagtcttgaccgaagaccacgggggcctgtcaactgcaatcctggtggtgtttctggagagcgcatgcaacctaccccgaaacccatttgattatctgaatggcgaatatcgagcaaagaagctgtcaaggttcgcccgcaataaagtgagcaaggatccatctagttatgtgaaactaagcgtaggaaagaagacacatacctccaagacctgcccgcacaataaagatcccgtgtggtcccaagttttcagtttcttcgttcataacgtggctacagagcgtctccacctgaaggtccttgacgacgatcaggagtgcgctctaggcatgctcgaagtgcccttatgtcagatactcccatatgcggatctcacactggaacagcgcttccaactggaccactccggcctggattccttgatttctatgagactggtgctgcggtttcttcaggtggaagagagagagttgggctccccgtacaccggaccagaagcgctgaaaaagggtccgctgttgatcaagaaagtggccacaaatcagggacccaaagctcagccccaggaggagggacccactgacctcccatgtcctcctgatcccgcctctgatacaaaagatgtatcacggagcaccaccacgacaacatccgcaacaacagtggctaccgagcccaccagccaggagacaggccccgagcccaagggcaaggactcagccaagagattttgtgagccgatcggtgaaaaaaagtcacccgccactatctttcttacagtccctggcccacattctccgggcccaattaaaagccccaggcctatgaaatgtcccgcctctccattcgcgtggccaccaaaacgactggcaccttctatgagctcactgaattccctcgcgtcctcctgtttcgatttggctgatatctccctgaatatagagggcggtgatttgcgaagacgacagctgggtgaaatccaactgactgttcgctatgtctgcctccgtcgttgcctcagtgtactgatcaacggctgtaggaacttgaccccgtgcacatccagcggtgctgacccctatgtgagggtctatctgctgccagagagaaaatgggcatgccgcaagaagacgtctgtgaagcgcaagaccttggaacctctgtttgacgagacgttcgagttctttgtccccatggaagaggtgaaaaaaaggagcctggatgtcgctgtgaagaactccaggcctctgggctcacaccgtagaaaagagctggggaaagtgctgatcgacctgtccaaggaagatctaattaaaggcttttcacagtggtatgaattgacacccaatgggcagccgcgatcttag

SEQ ID NO: 222231 - DNA, 2661 bp, Artificial Sequence
  derived and/or modified sequence
atgagagctgaggagccctgtgcccctggggcccccagcgccctgggcgcccagaggaccccaggccctgagctgcggctgagcagccagctgctgcctgagctgtgcacctttgtggtgcgggtgctcttctacctgggccctgtgtacctggccggctacctgggcctgagcatcacctggctgctgctgggcgccctgctgtggatgtggtggaggaggaacagaagaggcaagctgggccgcctggccgccgcctttgagttcctggacaatgaaagagagttcatcagccgggagctgcggggccagcacctgcctgcctggatccacttcccagatgtggagcgggtggagtgggccaacaagatcatcagccagacctggccctacctgtccatgatcatggagagcaagttccgggagaagctggagcccaagatccgggagaagagcatccacctgcggaccttcaccttcaccaagctgtacttcggccagaagtgcccccgggtgaatggagtgaaggcccacaccaacacctgcaacagaagaagagtgacagtggacctgcagatctgctacatcggggactgtgagatctctgtggagctgcagaagatccaggccggcgtgaatggcatccagctgcagggcaccctgcgggtcatcctggagcccctgctggtggacaagccctttgtgggcgctgtgacagtgttcttcctgcagaagccccacctgcagatcaactggacaggcctgaccaacctgctggatgcccctggcatcaatgatgtgtctgacagcctgctggaggacctgattgccacccacctggtgctgcccaacagagtgacagtgcctgtgaagaagggcctggacctgaccaacctgcgcttccccctgccctgtggggtcatccgggtgcacctgctggaggccgagcagctggcccagaaggacaacttcctgggcctgcggggcaagagtgacccctatgccaaggtgtccatcggcctgcagcacttccgcagcaggaccatctacagaaacctgaaccccacctggaatgaggtgtttgagttcatggtgtatgaggtgcccggccaggacctggaggtggacctgtatgatgaggacacagacagagatgacttcctgggcagcctgcagatctgcctgggagatgtgatgaccaacagagtggtggatgagtggtttgtgctgaatgacaccaccagcggccgcctgcacctgcggctggagtggctgagcctgctgacagaccaggaggtgctgacagaggaccacggcggcctgagcacagccatcctggtggtgttcctggagagcgcctgcaacctgcccaggaacccctttgactacctgaatggagagtaccgggccaagaagctgagcagatttgccaggaacaaggtgtccaaggaccccagcagctatgtgaagctgtctgtgggcaagaagacccacaccagcaagacctgcccccacaacaaggaccctgtgtggagccaggtgttctccttctttgtgcacaacgtggccacagagcggctgcacctgaaggtgctggatgatgaccaggagtgtgccctgggcatgctggaggtgcccctgtgccagatcctgccctatgctgacctgaccctggagcagcgcttccagctggaccacagcggcctggacagcctcatctccatgaggctggtgctgcgcttcctgcaggtggaggagcgggagctgggcagcccctacacaggccctgaggccctgaagaagggccccctgctgatcaagaaggtggccaccaaccagggccccaaggcccagccccaggaggagggccccacagacctgccctgccccccagaccctgccagtgacaccaaggatgtgagccgcagcaccaccaccaccaccagcgccaccaccgtggccacagagcccaccagccaggagaccggccctgagcccaagggcaaggacagcgccaagcgcttctgtgagcccatcggggagaagaagagccctgccaccatcttcctgactgtgcccggcccccacagccctggccccatcaagagcccccggcccatgaagtgcccagccagcccctttgcctggccacccaagaggctggcccccagcatgagcagcctgaacagcctggccagcagctgctttgacctggccgacatcagcctgaacattgaaggaggagacctgcggcggcggcagctgggggagatccagctgactgtgcgctacgtgtgcctgcggcgctgcctgtctgtgctgatcaatggctgcaggaacctgaccccctgcaccagcagtggagctgacccctacgtgcgggtgtacctgctgcctgagaggaagtgggcctgcaggaagaagacctctgtgaagaggaagaccctggagcccctgtttgatgagacctttgagttctttgtgcccatggaggaggtgaagaagaggagcctggatgtggccgtgaagaacagccggcccctgggcagccacaggaggaaggagctgggcaaggtgctgattgacctgagcaaggaggacctgatcaagggcttcagccagtggtatgagctgaccccaaatggccagcccaggagctag

SEQ ID NO: 222232 - DNA, 2661 bp, Artificial Sequence
  derived and/or modified sequence
atgcgggccgaggagccctgcgcccccggcgcccccagcgccctgggagcccagcgcacgccagggcccgagctgcggttatcgtcccagcttctgccggaactgtgcaccttcgtcgtgagagtgcttttctacctgggccctgtctacctcgccggatatttaggattgtcaatcacctggttgcttctgggcgctctgctatggatgtggtggcggaggaaccgccgcggtaagcttggccgactggctgccgcattcgaattccttgataatgagcgagaattcatcagtagggaactgcgaggccagcatctgcccgcctggattcactttccggatgtggagagagtcgaatgggccaataaaattatttctcagacatggccctacctgtccatgataatggagtctaagttcagagaaaagttagagcccaagatccgtgagaaatcgattcaccttcggacattcacattcactaagctgtactttgggcagaagtgccccagggtgaatggggtgaaggcccacaccaatacttgcaaccgtagacgcgtaactgtggacctgcaaatctgttacattggggactgtgagatctccgttgaactgcaaaagattcaggcgggggtgaacggaatccagctgcagggcacccttcgcgtgattctcgaacccttactcgtagataagccgtttgtgggcgccgtaacagtgtttttcctacagaaaccgcacctgcagattaactggaccggactgacaaacttgctagacgcgcctgggattaatgatgtgagcgacagcttgctggaagaccttatagccactcatcttgtccttcctaaccgggtaacagtgcccgtgaagaagggactggatctgacaaatcttcgattccccctaccttgtggcgtcattagggtccacctcttggaagcggaacaacttgcccaaaaggataacttcctgggccttcgagggaagtctgacccttatgctaaagtgagcatagggctccaacactttcgctctagaactatataccgcaaccttaatccaacctggaacgaggtgttcgaattcatggtgtatgaagtccccggccaagatttggaggttgacctttacgatgaagacaccgatagagacgatttcttggggtcactccaaatttgcctgggcgacgtgatgacaaaccgcgtggtggatgaatggttcgtgctgaacgataccacctcaggccggttgcatctgcgcctagagtggctcagccttctgaccgaccaggaggtgctgacagaggaccatggcggactgtccactgctatcttagtcgtgttcctggagtctgcatgcaatctgccgcgcaacccctttgactacctgaacggagagtatcgagccaaaaaactttctaggtttgctcgtaataaggtgagcaaagaccctagttcatacgtcaaactcagtgtcggcaaaaagacacacacctctaagacatgtccccataataaggaccccgtttggtctcaggttttttcattctttgtccacaacgtagcaacggagcgactgcacctcaaggttcttgacgatgatcaggaatgcgccctggggatgcttgaggtccctctgtgccagatcctcccctacgcagatcttactctggaacagcgtttccagctggatcattctggcctggactcactgatttccatgcgcctcgtgttacggttcctacaagtcgaggaaagagagcttgggtccccttacacaggacccgaagctttaaagaaagggcctcttctcattaagaaggttgcaacaaatcaaggccctaaagcacagccacaggaggaaggaccaacagatctcccttgcccgcccgatccagcctctgatactaaagacgtgtcgagatcaactacgacaacgactagcgccacaacagtggcaacagagcctacgtcacaggaaacaggacctgaaccgaaaggtaaggattccgccaaacgcttctgtgaaccaattggggagaaaaaatcacctgcgactatcttcctgactgtacctgggcctcattccccgggtcctattaagagtccacggcctatgaagtgcccagcgagtccattcgcgtggccccccaagaggctggcaccttccatgtcctctcttaactccctcgcgagcagttgcttcgaccttgctgatatttcattgaatatagaaggcggtgatctcaggcgcagacaattgggcgagatccagctgactgtgcgatacgtatgcctaagaaggtgcttgagcgtcctcatcaatggttgcaggaacttgaccccttgtacaagtagcggcgctgatccttacgtgagggtgtacttgctgcctgagagaaagtgggcctgtaggaagaaaacaagcgttaagcgcaagaccctcgagccgctgtttgacgagacatttgagtttttcgttcccatggaggaggtcaaaaaacgttcactggatgtggctgttaagaatagccggcctcttggcagtcataggcgcaaggagttaggcaaggtcctgattgacctctctaaagaggacttgatcaaaggttttagccaatggtacgagctgaccccgaatggccagccccgcagctag

SEQ ID NO: 222233 - DNA, 2661 bp, Artificial Sequence
  derived and/or modified sequence
atgcgtgcggaagaaccctgcgcacctggggctccctccgccctcggcgcacagcgcaccccgggtcctgagttgaggttatccagccagttgctccctgagctctgcacatttgttgtacgggttctgttttaccttgggcctgtatacctggctggttatctgggcctgtcgatcacctggttgctgttgggcgctcttctatggatgtggtggcggaggaatagacggggaaagctagggcgtctggctgctgccttcgaattcttagataacgagagagagtttatatcgagagagttacgcggtcagcatctgcctgcttggatccatttcccagacgtggaaagagtggagtgggccaataagataatctctcagacgtggccttatctgtctatgattatggaatccaagtttcgtgagaagctggaaccaaagatccgtgagaaatccatccatctgaggaccttcaccttcacaaagttgtactttggccagaagtgtccaagggtgaacggagtgaaagcccacacaaacacatgcaatcgcaggcgggtgaccgttgatttacagatctgctacatcggtgactgtgagatatccgtggagttacagaagatccaggcaggggtgaatggaatccagttgcagggcaccctgagagtcattctggaacctcttctggtcgacaaaccattcgttggtgccgtgactgtcttctttctgcagaaaccccacctccagatcaattggaccgggctcactaacctgcttgacgctcccggaattaacgatgtctcagatagtctgctggaggacttaatcgccactcaccttgtgctgccgaatcgggtgacggtgccagtgaaaaagggactagacctcaccaacctgaggttccccttgccctgcggagtcattcgggttcacctacttgaggccgagcaactggcccagaaggacaatttcctgggcctacgcggtaagtccgacccatacgcaaaagtctctatagggctccaacacttccgctcacgcactatctaccgaaacctaaacccaacatggaacgaggtgttcgagtttatggtgtacgaagtccccggtcaggaccttgaagtcgacctatatgatgaggatactgatcgcgacgatttcctggggagcctccagatttgcctcggggatgtgatgactaatagggttgtagatgaatggttcgtcctgaacgacactaccagtggacgcctacatctacggctcgagtggcttagcctcctgacggaccaggaggtgctcacagaagatcacgggggattgagcacagccattttggttgtgtttctggagtctgcctgcaatctcccgcgaaacccatttgactacttaaacggtgaataccgtgcaaagaaactttccaggttcgcaagaaataaagtgtccaaagatccttcttcttacgtgaaactgtcagtcgggaaaaagacacacacaagcaaaacctgcccccacaataaagatccagtttggtctcaggttttctccttcttcgtacataacgtggcgaccgagaggttacacctgaaagttctggacgatgaccaggaatgtgcattgggtatgctagaggtccccctgtgccagatcctgccttacgcggacttaaccttggaacagagatttcagctggatcatagcggcttggattcacttatttcaatgcgcttggtgttgagattcctgcaagtagaagagcgagaattaggaagtccttacacggggcctgaggcccttaaaaaagggcctctgctaattaaaaaggtcgccacgaaccagggcccaaaagctcaaccccaggaggaaggacccaccgacctgccttgtccgccagatccagcttcggatacaaaagatgtctcgcgcagcaccactacaactacgtccgccacaacagtggccactgaaccaacaagccaggaaactggacctgagcccaaagggaaggattccgcgaagagattctgcgagccaattggcgagaagaagtcaccagctacgatattcctgaccgttcctggccctcacagtccaggcccaatcaaatcccctagaccaatgaagtgtccagcatccccctttgcctggccaccgaagcggctggcaccctccatgtctagcctcaactcactggcaagttcctgtttcgatcttgctgacattagtctcaatatagaaggcggagacctccgccgtcgccagctgggtgagatccagttaacagtgagatacgtgtgcctgcgcaggtgcctctcagtgctgataaacggttgtaggaatctgaccccttgcacttcaagtggcgctgacccctatgtccgtgtctacttgctgcccgaaaggaaatgggcatgtagaaaaaagacttcggtgaaacgtaagaccttggagccactcttcgacgagacctttgaatttttcgtgccaatggaagaagtgaaaaagagatctcttgatgtagctgtgaagaattcacggcctttaggatcacaccggagaaaggagttgggtaaagtactgatcgatttaagtaaggaggatcttatcaaggggttttcacaatggtatgaactgacgcctaacggtcagcccagatcatag

SEQ ID NO: 222234 - protein, 719 aa, Artificial Sequence
  derived and/or modified sequence
MGEKNGDAKTFWMELEDDGKVDFIFEQVQNVLQSLKQKIKDGSATNKEYIQAMILVNEATIINSSTSIKGASQKEVNAQSSDPMPVTQKEQENKSNAFPSTSCENSFPEDCTFLTTENKEILSLEDKVVDFREKDSSSNLSYQSHDCSGACLMKMPLNLKGENPLQLPIKCHFQRRHAKTNSHSSALHVSYKTPCGRSLRNVEEVFRYLLETECNFLFTDNFSFNTYVQLARNYPKQKEVVSDVDISNGVESVPISFCNEIDSRKLPQFKYRKTVWPRAYNLTNFSSMFTDSCDCSEGCIDITKCACLQLTARNAKTSPLSSDKITTGYKYKRLQRQIPTGIYECSLLCKCNRQLCQNRVVQHGPQVRLQVFKTEQKGWGVRCLDDIDRGTFVCIYSGRLLSRANTEKSYGIDENGRDENTMKNIFSKKRKLEVACSDCEVEVLPLGLETHPRTAKTEKCPPKFSNNPKELTVETKYDNISRIQYHSVIRDPESKTAIFQHNGKKMEFVSSESVTPEDNDGFKPPREHLNSKTKGAQKDSSSNHVDEFEDNLLIESDVIDITKYREETPPRSRCNQATTLDNQNIKKAIEVQIQKPQEGRSTACQRQQVFCDEELLSETKNTSSDSLTKFNKGNVFLLDATKEGNVGRFLNHSCCPNLLVQNVFVETHNRNFPLVAFFTNRYVKARTELTWDYGYEAGTVPEKEIFCQCGVNKCRKKIL

SEQ ID NO: 222235 - DNA, 61 bp, Artificial Sequence
  derived and/or modified sequence
aacatcaaacggaaaaaaacggaattatcgtatggaatcgaagagaatcatcgaatggacc

SEQ ID NO: 222236 - DNA, 2160 bp, Artificial Sequence
  derived and/or modified sequence
atgggggaaaagaatggtgatgcgaaaactttttggatggaacttgaggacgatggcaaagtcgattttatttttgaacaggtgcagaacgtgctgcagagcctcaagcaaaaaattaaggatggatccgcgacaaataaagagtatatccaggccatgatactggtcaatgaggcaactattattaactcaagcacctctatcaagggggcctcccaaaaggaggttaacgcccagagcagcgatcccatgcccgtaactcagaaggagcaggagaacaagtctaatgcatttccatctaccagttgcgagaatagcttcccagaggattgcacctttttaacaaccgagaataaggaaatcctctctctcgaagataaagtcgtcgatttcagagagaaggattcgtcgtcgaatctgagttaccaatcacatgactgttccggggcttgcctcatgaagatgcctctcaacttaaagggcgagaatccactgcagcttccaataaagtgccatttccaaagacggcacgccaagactaatagccacagctccgcactacacgtctcctacaagaccccttgcggacgaagcctgcgcaatgtggaagaggtgtttcgctatcttctggaaaccgagtgtaactttctgttcacagacaacttctcattcaacacttatgtccagcttgccaggaattatcccaagcagaaagaagtcgtgagcgatgtggacatttccaatggtgtggagagtgtgcccataagtttttgtaatgaaattgattcacgcaaattgccccagttcaagtacagaaagactgtgtggcctcgggcctacaacctgaccaatttttcctccatgttcactgactcttgtgattgcagcgaaggatgtattgacattacaaagtgtgcctgtctgcaactgacagctaggaatgcgaagacaagtcctctctcatccgacaagataacaactggttacaagtacaagaggcttcaacggcaaataccaaccggaatttatgagtgctcgctgctgtgtaagtgcaatcggcagctatgtcagaatcgggtggtccagcacggcccacaggttagactgcaggttttcaaaactgagcagaaggggtggggtgtgcgctgcctggacgacatcgaccgggggacgttcgtttgcatttattctggccgcttgctgtcccgggctaatactgagaaaagctatgggatagatgaaaacggccgggatgagaatactatgaaaaacatcttctcaaaaaaacgcaagctggaagtggcctgtagtgattgcgaggtggaggtactccctctgggcctggaaacacatcctcgcacagctaagacagaaaagtgcccgcccaagttttctaacaatccaaaggagttgacagtggagacaaaatacgataatatttctagaatacagtatcatagcgtcatcagagatccagaaagtaagacagccatttttcaacataacggcaaaaagatggaattcgtgtcaagtgagagcgtgacccccgaggacaatgacggattcaagccgccgcgcgaacacttgaactccaaaaccaagggcgcccaaaaggacagtagttcaaatcacgtcgatgagttcgaagataacttgctcatcgaatcagacgtaattgacatcacgaaataccgtgaggagacgcccccacgcagcaggtgtaatcaggctactactctggacaatcagaatatcaaaaaggcgatagaagtgcaaattcagaagcctcaggaaggtcgctccaccgcctgccagcgacagcaggttttttgtgacgaagagctgttatccgaaaccaagaacacttctagcgactcccttacaaagtttaataaggggaatgtcttcctgctggacgctaccaaagagggcaacgtgggtcgttttttgaatcacagttgctgtccgaacctgcttgttcagaacgtgttcgttgagacacacaaccgaaactttccgctggtagcgttcttcactaacaggtacgtgaaggctcgcacagagttgacttgggactatgggtacgaggctggaacagtccctgaaaaggaaattttttgtcaatgtggggtcaacaagtgcagaaagaaaatcttgtag

SEQ ID NO: 222237 - DNA, 2160 bp, Artificial Sequence
  derived and/or modified sequence
atgggagagaagaatggagatgccaagaccttctggatggagctggaggatgatggcaaggtggacttcatctttgagcaggtgcagaatgtgctgcagagcctgaagcagaagatcaaggatggcagcgccaccaacaaggagtacatccaggccatgatcctggtgaatgaggccaccatcatcaacagcagcaccagcatcaagggggccagccagaaggaggtgaatgcccagagcagtgaccccatgcctgtgacccagaaggagcaggagaacaagagcaatgccttccccagcaccagctgtgagaacagcttccctgaggactgcaccttcctgaccacagagaacaaggagatcctgagcctggaggacaaggtggtggacttccgggagaaggacagcagcagcaacctgagctaccagagccatgactgcagcggggcctgcctgatgaagatgcccctgaacctgaagggggagaaccccctgcagctgcccatcaagtgccacttccagaggagacatgccaagaccaacagccacagcagcgccctgcacgtgtcctacaagaccccctgtggccgcagcctgagaaatgtggaggaggtgttccgctacctgctggagacagagtgcaacttcctgttcacagacaacttctccttcaacacctacgtgcagctggccaggaactaccccaagcagaaggaggtggtgtctgatgtggacatcagcaatggagtggagagcgtgcccatctccttctgcaatgaaattgacagcaggaagctgccccagttcaagtacaggaagacagtgtggccccgggcctacaacctgaccaacttcagctccatgttcacagacagctgtgactgcagcgagggctgcatcgacatcaccaagtgtgcctgcctgcagctgacagccagaaatgccaagaccagccccctgagcagtgacaagatcaccaccggctacaagtacaagaggctgcagaggcagatccccaccggcatctatgagtgcagcctgctgtgcaagtgcaaccggcagctgtgccagaacagagtggtgcagcacggcccccaggtgcggctgcaggtgttcaagacagagcagaagggctggggcgtgcgctgcctggatgacatcgaccggggcacctttgtgtgcatctacagcggccgcctgctgagccgggccaacacagagaagagctatggaattgatgaaaatggaagagatgagaacaccatgaagaacatcttcagcaagaagaggaagctggaggtggcctgcagcgactgtgaggtggaggtgctgcccctgggcctggagacccaccccaggacagccaagacagagaagtgcccccccaagttcagcaacaaccccaaggagctgactgtggagaccaagtatgacaacatcagccgcatccagtaccacagcgtcatccgggaccctgagagcaagacagccatcttccagcacaacgggaagaagatggagtttgtgtcctctgagagcgtgaccccagaagataatgatggcttcaagccaccccgggagcacctgaacagcaagaccaagggggcccagaaggacagcagcagcaaccacgtggatgaatttgaggacaacctgctgattgaaagtgatgtgattgacatcaccaagtaccgggaggagaccccacccaggagccgctgcaaccaggccaccaccctggacaaccagaacatcaagaaggccatcgaggtgcagatccagaagccccaggagggccgcagcacagcctgccagaggcagcaggtgttctgtgatgaggagctgctgtctgagaccaagaacaccagcagtgacagcctgaccaagttcaacaagggaaatgtgttcctgctggatgccaccaaggagggcaatgtgggccgcttcctgaaccacagctgctgccccaacctgctggtgcagaatgtgtttgtggagacccacaacagaaacttccccctggtggccttcttcaccaaccgctacgtgaaggccaggacagagctgacctgggactatggctatgaagctggcaccgtgcctgagaaggagatcttctgccagtgtggggtgaacaagtgcaggaagaagatcctgtag

SEQ ID NO: 222238 - DNA, 2160 bp, Artificial Sequence
  derived and/or modified sequence
atgggcgagaagaacggcgacgccaagaccttctggatggagctggaagatgatggtaaggtcgacttcatttttgaacaggtgcagaacgtactacagtcattgaaacagaaaataaaggacgggtctgcgactaataaggaatacattcaggcgatgattctagtgaacgaagccaccatcatcaactcttctacctcgattaaaggcgcctcccagaaagaagtaaacgcacagagctccgaccccatgcctgttactcagaaagagcaggagaacaagagcaacgcctttcctagcacctcctgtgagaattcattcccagaagactgtacattcttaaccactgaaaacaaagagattctttcactggaggataaggtggttgattttagggagaaggactcctcctcaaatctgtcctaccagagtcatgattgttcaggagcatgcttgatgaaaatgccattgaatctgaagggcgagaatcccctgcagctcccaattaagtgccactttcagaggagacatgcaaagaccaacagccatagctccgctctgcatgtttcctataagaccccctgcggacgcagcctgcggaatgtggaagaagtgttcaggtatttattggagactgaatgcaacttcctgtttaccgacaatttttcttttaacacctatgtgcagctggctaggaactatcccaaacagaaagaggttgtgtccgatgtggacatatcaaacggggtggagagcgttcctatctccttttgcaatgagatcgacagccggaaattaccccagtttaagtataggaagacggtttggcctagggcatacaaccttactaatttcagttctatgtttaccgattcatgcgattgctccgaagggtgtatcgacatcacaaaatgcgcatgcttgcagctaacagccagaaacgccaaaacatcgccgctgtcatccgataagatcacaactgggtataagtacaaaaggcttcagcgccagattcccaccggcatctacgaatgtagtctgctgtgtaagtgtaaccgacaactctgccagaatagagtcgtacagcacggaccacaggtcaggcttcaggtgtttaaaacggagcaaaaggggtggggagttagatgtttagacgacattgatcggggtacgtttgtgtgtatttatagcggccgcttgctgtctcgcgcaaatactgagaagagctatggcatcgacgaaaatggccgcgacgagaatacgatgaaaaacatcttctctaagaagcggaagttagaggttgcctgttccgattgtgaagtcgaggtgctgccactcgggctcgagacgcaccctaggacagcgaaaaccgaaaagtgcccgcctaagttttcaaataatcccaaggagctgacggtggaaaccaagtatgacaatatttctcgcatccagtaccactcagtgatccgcgatcctgaatccaaaactgccatcttccagcacaacggaaagaaaatggagtttgtctcctctgagagtgttacccctgaggacaatgacggcttcaagcctcccagggagcacctgaacagtaaaaccaagggtgcacagaaagattccagttctaaccacgtcgatgaatttgaggacaatctcctcatcgaatcagatgtgatcgatattaccaagtaccgggaagaaaccccccctagaagtcgatgcaaccaagctacgacactcgataaccagaatataaaaaaggccatcgaggtccagattcagaagccacaggaaggccgaagcacggcctgtcaacgccagcaggtgttctgcgacgaagaattgctctcggaaacaaagaatactagttccgacagcttaacaaagtttaacaaagggaatgtgtttttactggatgccacaaaagagggcaacgttggtagatttcttaaccattcatgctgccctaatttattggtgcagaacgtgtttgtggaaacccataatcgcaactttccccttgtcgcattttttactaataggtatgtgaaggctcgaacagagctgacatgggactacgggtatgaagcaggcactgtgcctgaaaaagaaatattttgccaatgtggcgttaacaagtgtaggaagaagattctctag

SEQ ID NO: 222239 - DNA, 2160 bp, Artificial Sequence
  derived and/or modified sequence
atgggcgagaagaatggggacgccaaaaccttttggatggagctggaggacgacggaaaggtcgattttattttcgaacaggtacagaacgtattgcaatcactgaaacagaagatcaaagacggatctgctactaacaaggagtacatccaggccatgatactcgtgaacgaagccacgattatcaactcctcaacctccatcaagggcgcttcccagaaagaggtgaatgcccaaagctctgaccctatgccggtgactcaaaaagagcaggagaacaaaagcaacgcttttccaagcacctcgtgcgagaatagttttccggaagactgtactttcttgacaaccgagaacaaggagatcttgtctctggaagataaagtggtggattttcgggagaaggatagttcttccaacctttcctatcagtcacatgattgctccggagcctgcctgatgaagatgcccctgaacttaaagggagagaatcccctccagttgcccattaaatgtcactttcagcgaagacacgcaaagacaaacagccactctagtgccctgcacgtctcatacaagaccccttgcggtcggagtctgcgcaacgtggaagaggtgttccgctaccttctcgagaccgaatgcaattttttattcaccgataacttctctttcaacacttacgtgcaactggctagaaattacccaaagcagaaggaggttgtttcagacgtcgatatatctaatggggtcgagagcgtcccaattagtttttgtaacgagattgactcacgcaagctgccacagttcaagtaccgcaaaacagtttggccacgcgcttataacctcaccaacttttccagtatgtttaccgattcatgtgattgctccgaggggtgcatagatatcacgaaatgcgcctgtctgcagctgacagctaggaacgccaagacaagtccgctcagctccgacaagatcacaaccggctacaaatataagcgactgcagaggcagattcccactggcatttatgaatgcagtcttttatgcaagtgcaaccggcagctgtgccaaaatcgagtagtccagcacggcccacaagtacgcctccaggtttttaaaacagagcaaaaggggtggggtgtaagatgtctcgacgatatcgaccgcggtaccttcgtttgtatctactcaggtcgcctgctttctagagcaaatacagaaaaaagttacggaatcgacgagaacggacgcgacgaaaatactatgaaaaacattttctctaagaagcgtaagttggaggtcgcctgcagcgactgcgaggtagaggtgctgcctctgggactagaaacacacccgaggacagctaaaactgaaaaatgtcctcccaagttctctaacaatccgaaggaactcaccgttgaaaccaagtacgacaatatctcacggattcagtatcattcagtcatccgagatcctgagtccaagaccgcaattttccagcacaatggcaaaaaaatggagttcgttagttctgagagtgtaactcctgaggataacgacggatttaagccccctagggagcacttgaactctaagactaagggggcacaaaaagattcttcttcaaaccacgtagatgagttcgaggataacctgctgatcgaatccgacgttatcgacattacaaagtatagggaggagactcctcccaggtctcggtgtaaccaagccaccacgcttgacaaccagaacataaaaaaagcaattgaggtgcagatccaaaagcctcaggaaggacggtccaccgcgtgtcagaggcagcaggtattttgcgatgaggaactcctttccgagacgaaaaatacctccagtgacagtttgacgaagtttaacaaaggtaacgtattcctacttgacgccacaaaagaaggaaacgtgggacgcttcctaaaccatagctgctgccctaatctgctcgtgcagaacgttttcgtggagacacacaatcgcaactttccgctagtcgcattttttactaaccggtacgtgaaagctcgcaccgaactcacttgggattatggttatgaggcgggtacggtcccagaaaaagagatcttctgccagtgcggggtgaacaaatgtagaaagaagatactgtag

SEQ ID NO: 222240 - DNA, 3306 bp, Artificial Sequence
  derived and/or modified sequence
cctgcgctcgggaggtttgggcggcttggcgtcggaggagagccccacccgcggaggaacccagccttgccaacggagctggcggagctcactcctcaggtcaggcgggcggcgtagaaaacgcagcggagccaggtgaaaccaaggcaccgccgtggctggcccccgacagttcctctagccgggaggttggaggagctgaaaacgccgcggagccctcggccgcccgagcaggggctggaccccagcccttgcagcctcccttctcctggcacccaagtgcagtcctggctgcagaaggggccgcgggcgcactgagtttccaacctccatttcagcctgtctgtctcagggtgcagccttaatgagaggtgattcctaagctgctgggaacctgaggttgtcaaaggggcggcaggaaatggacagcagtataaaacccagaagcagaacttgaaggttaaaccactagcccatttcacagaatgtttcatccatttgtggaccaaaagatggagttggtttttatttttaaaaagataatgttaatgatctgataccactacaaatatttacgtgagaagattcatggacttgtcttttggttggactgtcactcatttctgaaagtttcttcagccacaatttctatttgaaaattcaagtatcaaaggataccaggtttagaatggtataatgatgtattttgtctgaggactgcaaattttatagagaccacagttggattccagtgatattctgcaatcaaagtgatttgataaacctaattttgaagcattttatatttataagcgacatcaaaagatgggagaaaaaaatggcgatgcaaaaactttctggatggagctagaagatgatggaaaagtggacttcatttttgaacaagtacaaaatgtgctgcagtcactgaaacaaaagatcaaagatgggtctgccaccaataaagaatacatccaagcaatgattctagtgaatgaagcaactataattaacagttcaacatcaataaagggagcatcacagaaagaagtgaatgcccaaagcagtgatcctatgcctgtgactcagaaggaacaggaaaacaaatccaatgcatttccctctacatcatgtgaaaactcctttccagaagactgtacatttctaacaacagaaaataaggaaattctctctcttgaagataaagttgtagactttagagaaaaagactcatcttcgaatttatcttaccaaagtcatgactgctctggtgcttgtctgatgaaaatgccactgaacttgaagggagaaaaccctctgcagctgccaatcaaatgtcacttccaaagacgacatgcaaagacaaactctcattcttcagcactccacgtgagttataaaaccccttgtggaaggagtctacgaaacgtggaggaagtttttcgttacctgcttgagacagagtgtaactttttatttacagataacttttctttcaatacctatgttcagttggctcggaattacccaaagcaaaaagaagttgtttctgatgtggatattagcaatggagtggaatcagtgcccatttctttctgtaatgaaattgacagtagaaagctcccacagtttaagtacagaaagactgtgtggcctcgagcatataatctaaccaacttttccagcatgtttactgattcctgtgactgctctgagggctgcatagacataacaaaatgtgcatgtcttcaactgacagcaaggaatgccaaaacttcccccttgtcaagtgacaaaataaccactggatataaatataaaagactacagagacagattcctactggcatttatgaatgcagccttttgtgcaaatgtaatcgacaattgtgtcaaaaccgagttgtccaacatggtcctcaagtgaggttacaggtgttcaaaactgagcagaagggatggggtgtacgctgtctagatgacattgacagagggacatttgtttgcatttattcaggaagattactaagcagagctaacactgaaaaatcttatggtattgatgaaaacgggagagatgagaatactatgaaaaatatattttcaaaaaagaggaaattagaagttgcatgttcagattgtgaagttgaagttctcccattaggattggaaacacatcctagaactgctaaaactgagaaatgtccaccaaagttcagtaataatcccaaggagcttactgtggaaacgaaatatgataatatttcaagaattcaatatcattcagttattagagatcctgaatccaagacagccatttttcaacacaatgggaaaaaaatggaatttgtttcctcggagtctgtcactccagaagataatgatggatttaaaccaccccgagagcatctgaactctaaaaccaagggagcacaaaaggactcaagttcaaaccatgttgatgagtttgaagataatctgctgattgaatcagatgtgatagatataactaaatatagagaagaaactccaccaaggagcagatgtaaccaggcgaccacattggataatcagaatattaaaaaggcaattgaggttcaaattcagaaaccccaagagggacgatctacagcatgtcaaagacagcaggtattttgtgatgaagagttgctaagtgaaaccaagaatacttcatctgattctctaacaaagttcaataaagggaatgtgtttttattggatgccacaaaagaaggaaatgtcggccgcttccttaatcatagttgttgcccaaatctcttggtacagaatgtttttgtagaaacacacaacaggaattttccattggtggcattcttcaccaacaggtatgtgaaagcaagaacagagctaacatgggattatggctatgaagctgggactgtgcctgagaaggaaatcttctgccaatgtggggttaataaatgtagaaaaaaaatattataaatatgtaactaacgcctgtttgtgaaattagcttatcaggctgaaattaaagccatgcaaaagaaggtctaggtccatcaaggaaattcccctccgttttcctttgtcatggggtttatgttttatttcagattttatttgtgtgacttagaaattccaggaacacaattaggatattttcatacacatagggtatcttgttcactgctgtgctactttacatgagtaggatggaagtgtatattttatatgaaataccactgtacaatttataatttatttacaaattatatattaagagaaacaaatgtcataacagaa

SEQ ID NO: 222241 - DNA, 2160 bp, Artificial Sequence
  derived and/or modified sequence
atgggcgagaagaacggcgacgccaagaccttctggatggagctggaggacgacggcaaggtggacttcatcttcgagcaggtgcagaacgtgctgcagagcctgaagcagaagatcaaggacggcagcgccaccaacaaggagtacatccaggccatgatcctggtgaacgaggccaccatcatcaacagcagcaccagcatcaagggcgccagccagaaggaggtgaacgcccagagcagcgaccccatgcccgtgacccagaaggagcaggagaacaagagcaacgccttccccagcaccagctgcgagaacagcttccccgaggactgcaccttcctgaccaccgagaacaaggagatcctgagcctggaggacaaggtggtggacttcagagagaaggacagcagcagcaacctgagctaccagagccacgactgcagcggcgcctgcctgatgaagatgcccctgaacctgaagggcgagaaccccctgcagctgcccatcaagtgccacttccagagaagacacgccaagaccaacagccacagcagcgccctgcacgtgagctacaagaccccctgcggcagaagcctgagaaacgtggaggaggtgttcagatacctgctggagaccgagtgcaacttcctgttcaccgacaacttcagcttcaacacctacgtgcagctggccagaaactaccccaagcagaaggaggtggtgagcgacgtggacatcagcaacggcgtggagagcgtgcccatcagcttctgcaacgagatcgacagcagaaagctgccccagttcaagtacagaaagaccgtgtggcccagagcctacaacctgaccaacttcagcagcatgttcaccgacagctgcgactgcagcgagggctgcatcgacatcaccaagtgcgcctgcctgcagctgaccgccagaaacgccaagaccagccccctgagcagcgacaagatcaccaccggctacaagtacaagagactgcagagacagatccccaccggcatctacgagtgcagcctgctgtgcaagtgcaacagacagctgtgccagaacagagtggtgcagcacggcccccaggtgagactgcaggtgttcaagaccgagcagaagggctggggcgtgagatgcctggacgacatcgacagaggcaccttcgtgtgcatctacagcggcagactgctgagcagagccaacaccgagaagagctacggcatcgacgagaacggcagagacgagaacaccatgaagaacatcttcagcaagaagagaaagctggaggtggcctgcagcgactgcgaggtggaggtgctgcccctgggcctggagacccaccccagaaccgccaagaccgagaagtgcccccccaagttcagcaacaaccccaaggagctgaccgtggagaccaagtacgacaacatcagcagaatccagtaccacagcgtgatcagagaccccgagagcaagaccgccatcttccagcacaacggcaagaagatggagttcgtgagcagcgagagcgtgacccccgaggacaacgacggcttcaagccccccagagagcacctgaacagcaagaccaagggcgcccagaaggacagcagcagcaaccacgtggacgagttcgaggacaacctgctgatcgagagcgacgtgatcgacatcaccaagtacagagaggagaccccccccagaagcagatgcaaccaggccaccaccctggacaaccagaacatcaagaaggccatcgaggtgcagatccagaagccccaggagggcagaagcaccgcctgccagagacagcaggtgttctgcgacgaggagctgctgagcgagaccaagaacaccagcagcgacagcctgaccaagttcaacaagggcaacgtgttcctgctggacgccaccaaggagggcaacgtgggcagattcctgaaccacagctgctgccccaacctgctggtgcagaacgtgttcgtggagacccacaacagaaacttccccctggtggccttcttcaccaacagatacgtgaaggccagaaccgagctgacctgggactacggctacgaggccggcaccgtgcccgagaaggagatcttctgccagtgcggcgtgaacaagtgcagaaagaagatcctgtag

SEQ ID NO: 222242 - protein, 230 aa, Artificial Sequence
  derived and/or modified sequence
MPLPDTMFCAQQIHIPPELPDILKQFTKAAIRTQPADVLRWSAGYFSALSRGDPLPVKDRMEMPTATQKTDTGLTQGLLKVLHKQCHHKRYVELTDLEQKWKNLCLPKEKFKALLQLDPCENKIKWINFLALGCSMLGGSLNTALKHLCEILTDDPEGGPARIPFKTFSYVYRYLARLDSDVSPLETESYLASLKENIDARKNGMIGLSDFFFPKRKLLESIENSEDVGH

SEQ ID NO: 222243 - DNA, 693 bp, Artificial Sequence
  derived and/or modified sequence
atgccgctcccagatactatgttctgcgcacagcaaattcatattcctccagagctcccagatatccttaagcagttcaccaaggcagcgatacgtacacagcccgcagatgtccttagatggagcgcaggatacttctctgccctgtcccgcggagatccattacctgtgaaagataggatggagatgccaaccgccacccaaaagacagatactggcctgacacaagggcttctgaaggtactccataagcagtgccatcacaaacgatatgtcgagctgaccgacctggagcagaagtggaagaatctgtgcctccctaaagagaaattcaaggccttgttacagctagatccttgcgagaataaaatcaaatggattaattttctggccttgggctgctctatgctgggaggcagcttgaacaccgccttgaagcacctttgcgaaattttaacggacgaccctgagggcggcccggcccggatcccttttaagacattttcatatgtctacagatatttagcaaggctggattctgatgtgagccctttggaaactgagagctaccttgcatccctgaaagagaatatcgatgcacggaagaatggaatgattggcctttcagatttttttttccctaagagaaagctgctggaatctattgagaatagtgaagatgttggacactag

SEQ ID NO: 222244 - DNA, 693 bp, Artificial Sequence
  derived and/or modified sequence
atgcccctacctgacacaatgttttgtgctcaacagatccatatacctccagaactgcccgatatcctcaaacaattcacgaaggctgctattcgcacgcagcctgcagatgttcttaggtggtctgctggatacttttctgctctatcccggggagatcccttgccagtgaaggacagaatggagatgccaactgcaactcagaaaaccgatactgggctgacacaaggcctccttaaggtgctgcacaagcagtgccaccataaaagatacgtagagctcaccgatctcgaacagaaatggaagaatctgtgcctgcccaaggaaaaattcaaggcccttctgcagctcgatccttgcgagaacaagatcaaatggatcaatttcctcgccttaggttgctccatgttgggaggttctctcaatacagcgctcaaacacctctgtgagatcttgacagatgatcccgagggtggacccgctcggatcccattcaagacctttagttatgtctaccgatatctagcaagactggattccgatgtgtctcctctcgagaccgagtcatacctcgccagcctgaaggaaaatattgatgccagaaagaacggtatgattggcttgagtgattttttctttcctaaaagaaaacttctggaaagcatcgaaaatagcgaggatgtggggcattag

SEQ ID NO: 222245 - DNA, 693 bp, Artificial Sequence
  derived and/or modified sequence
atgcccctgcctgacaccatgttctgtgcccagcagatccacatccccccagagctgcctgacatcctgaagcagttcaccaaggccgccatccgcacccagcctgcagatgtgctgcgctggagcgctggctacttcagcgccctgagcagaggagaccccctgcctgtgaaggacaggatggagatgcccacagccacccagaagacagacaccggcctgacccagggcctgctgaaggtgctgcacaagcagtgccaccacaagagatatgtggagctgacagacctggagcagaagtggaagaacctgtgcctgcccaaggagaagttcaaggccctgctgcagctggacccctgtgagaacaagatcaagtggatcaacttcctggccctgggctgcagcatgctgggcggcagcctgaacacagccctgaagcacctgtgtgagatcctgacagatgatcctgagggcggccctgcccgcatccccttcaagaccttctcctatgtgtaccgctacctggcccggctggacagtgatgtgagccccctggagacagagagctacctggccagcctgaaggagaacattgatgccaggaagaatggcatgattggcctgagtgacttcttcttccccaagaggaagctgctggagagcattgaaaattctgaagatgtgggccactag

SEQ ID NO: 222246 - DNA, 693 bp, Artificial Sequence
  derived and/or modified sequence
atgcccctgcccgacaccatgttctgcgcccagcagatccacatccctcccgagttacccgacattctgaaacagttcacaaaggcggccatcaggacacagccagcagacgtcttaagatggagtgctggctactttagcgccctgagccggggggatcccctgccggttaaagatcgcatggagatgcccaccgccactcagaagaccgacacggggttaacccagggcttgcttaaggtgctccacaagcaatgtcatcataagcgctacgtggaactgacagacctggagcaaaagtggaaaaatctttgtctacctaaggagaaatttaaagcactgctccaactggacccttgcgagaataaaattaaatggatcaactttttggcgctcggctgcagcatgctgggcggctcactcaatacggcgctgaaacacttgtgcgaaatccttacagacgacccagagggcggacctgcccgcataccattcaagacattctcatatgtgtaccggtacctagcaagactggatagcgacgtgtcacctctggaaactgagagctatctcgcaagtctgaaggagaacatcgacgcccgcaaaaacggtatgattggactgtccgacttttttttcccaaaacgaaagctcctagagtcaattgagaattctgaggacgtgggtcactag

SEQ ID NO: 222247 - DNA, 693 bp, Artificial Sequence
  derived and/or modified sequence
atgcccctgcccgacaccatgttctgcgcccagcagatccacatcccacccgagttgcctgatatcctgaagcagtttactaaggccgctattagaacgcaaccagcagatgttctgcggtggagtgcagggtatttttctgctctctcgcggggtgacccccttcccgttaaagacagaatggaaatgcccacagccacccaaaagaccgataccggcctcacacaggggcttctgaaggtgttgcataaacagtgtcatcataaacgttacgtggaattaaccgatcttgaacagaagtggaaaaacttgtgcctccccaaggaaaagtttaaggctctactgcagctggatccatgtgagaataaaatcaagtggattaacttcctggccctgggctgttccatgcttggaggcagtctgaacacggctctgaaacatttatgtgagattctaacagacgaccctgaggggggacccgcacgcatcccatttaaaactttcagctatgtctacagatacctggcccgtctcgatagcgatgtgagcccgcttgagactgagtcgtacctggcctctctgaaggagaacatcgatgctcggaagaacggcatgatcgggctgagcgattttttctttcctaagagaaagcttcttgaaagcatagagaactcagaggacgtgggccactag

SEQ ID NO: 222248 - DNA, 693 bp, Artificial Sequence
  derived and/or modified sequence
atgccactgcccgataccatgttctgcgcccagcagattcacataccccctgagctgcctgacatcctgaaacagttcactaaggctgcaatcaggacccagccggctgatgtgctccgctggtccgccggatattttagcgccctctcccgcggtgaccccctcccagtaaaagatcgaatggagatgccaacagctacccagaagactgatacagggcttacacagggtttgctgaaagttctgcataaacagtgtcatcataagcgctatgttgagctgacagatctggaacagaaatggaaaaatttgtgtctccccaaggagaaatttaaagctcttctgcagctggacccctgcgaaaacaagatcaagtggatcaatttcctggcacttggctgctcaatgctaggagggagcctcaacacagccctgaaacacttgtgcgagatccttacagatgatccagaaggaggacctgctcgcatccctttcaaaactttttcctatgtttatcgctatctagctagacttgattcggacgtgagcccattggagaccgaaagctacctagcgtccctgaaggagaatatcgatgccaggaaaaatggcatgataggtcttagcgacttttttttccctaagaggaagctgttggaatcaatcgaaaacagcgaagatgtgggtcattag

SEQ ID NO: 222249 - DNA, 693 bp, Artificial Sequence
  derived and/or modified sequence
atgccgttgcctgacacaatgttttgtgcccagcagattcatatcccacccgagctgcccgatatcctcaaacagttcactaaggcggctatccgaacgcagccagcggatgtgcttagatggagcgccggatacttttccgcactatctcggggagatccactcccagttaaggaccgcatggagatgcctacagccacccagaaaacagacacaggactgacacagggccttttgaaagtgcttcacaagcagtgccaccacaaaaggtatgtagaattgacggacctggagcagaagtggaaaaatctctgcctgcctaaagaaaaatttaaggctcttttgcaactggatccatgcgagaacaaaattaagtggattaactttttggcgcttggatgtagcatgctcgggggaagcctaaacactgccctgaagcacctgtgtgagatattgaccgacgacccggaaggcggacctgcaaggattccttttaaaacattttcctatgtatataggtacctggctcgactggacagcgatgtgtcacctcttgagacagagagttatctcgcaagtctcaaggaaaatattgacgccaggaaaaatggtatgattggcttaagcgatttctttttcccaaagaggaagctattggaaagcatcgagaacagtgaggacgtcggacactag

SEQ ID NO: 222250 - DNA, 1066 bp, Artificial Sequence
  derived and/or modified sequence
ctcgcgtcccgggtgcctggataccgagcgcgtccgtagtggcggctggcgctagggaactgcagggtctagggtgttgtcggagtggcagttggtccgaatttctcccgaagcccgcggaggagcgggtaagagccccgcgaatccggccccaacctcgggaacgggatgggaggcggccctggccgcaagccccgcgctgctagcgggtccaccgcgtcgtagccgacagccgcccttcttcctcgcagcgcgccgcgattcaccagcctggtcccttctgcggagagcgatgccgcttcccgacaccatgttctgcgctcagcagatccacattcccccggagctgccggacatcctgaagcaattcaccaaggctgccatccgcacccagccggccgacgtgctgcggtggtccgcgggctatttttcagctctgtcgagaggagatccacttcctgtaaaggacagaatggaaatgcccacggcaacccagaaaacagacacaggcctgactcaaggactcctgaaagttttgcacaagcagtgtcaccacaagcggtatgtggaattaacagatcttgagcagaagtggaagaacttgtgcctgccgaaggaaaaattcaaagcgctcttacaactggatccttgtgaaaacaaaatcaagtggataaactttttagcgcttggatgcagcatgcttggtgggtccttgaacactgcgctgaagcacctgtgcgagatcctcacggacgatccggagggcgggcccgctcgcatccccttcaagacgttttcctacgtttaccgctacttggccagattagactcagatgtgtctcccttggagacggaatcctaccttgcctctctaaaggaaaatatagacgccaggaagaacggcatgataggtctttcagatttcttctttccaaagaggaaacttttagaaagcattgaaaactctgaagatgtaggccattaatacagagaagaatacattttaatgtcaaaatagtgctctttaaaattctggcaccaaatacaacttaccctgaatcacaca

SEQ ID NO: 222251 - DNA, 1291 bp, Artificial Sequence
  derived and/or modified sequence
gcggccccaggcgcaggcgggtcccgcagcggggcccgtgccgcccaggcgatcagccccttcacttaacccgcttccctcctagcaggcccgagtcccctagcctcagcctcacgcagccagagcaaggggaagagggagtccttcgtgagttcgccgctcacattcggcggtgggaaaccgatccgaagatgcttttgtaggcgaaacgctcagctcgcgcggctctgaaccaccggggagcagcggctgctgctagtcggactacgccagcacctccttgtccagcccgggagcagccccgcctcgctcagggccgcgtgcgcgtgcgcggctccaggggcggggcctgctcgcgtcccgggtgcctggataccgagcgcgtccgtagtggcggctggcgctagggaactgcagggtctagggtgttgtcggagtggcagttggtccgaatttctcccgaagcccgcggaggagcggcgcgccgcgattcaccagcctggtcccttctgcggagagcgatgccgcttcccgacaccatgttctgcgctcagcagatccacattcccccggagctgccggacatcctgaagcaattcaccaaggctgccatccgcacccagccggccgacgtgctgcggtggtccgcgggctatttttcagctctgtcgagaggagatccacttcctgtaaaggacagaatggaaatgcccacggcaacccagaaaacagacacaggcctgactcaaggactcctgaaagttttgcacaagcagtgtcaccacaagcggtatgtggaattaacagatcttgagcagaagtggaagaacttgtgcctgccgaaggaaaaattcaaagcgctcttacaactggatccttgtgaaaacaaaatcaagtggataaactttttagcgcttggatgcagcatgcttggtgggtccttgaacactgcgctgaagcacctgtgcgagatcctcacggacgatccggagggcgggcccgctcgcatccccttcaagacgttttcctacgtttaccgctacttggccagattagactcagatgtgtctcccttggagacggaatcctaccttgcctctctaaaggaaaatatagacgccaggaagaacggcatgataggtctttcagatttcttctttccaaagaggaaacttttagaaagcattgaaaactctgaagatgtaggccattaatacagagaagaatacattttaatgtcaaaatagtgctctttaaaattctggcaccaaatacaacttaccctgaatca

SEQ ID NO: 222252 - DNA, 693 bp, Artificial Sequence
  derived and/or modified sequence
atgcccctgcccgacaccatgttctgcgcccagcagatccacatcccccccgagctgcccgacatcctgaagcagttcaccaaggccgccatcagaacccagcccgccgacgtgctgagatggagcgccggctacttcagcgccctgagcagaggcgaccccctgcccgtgaaggacagaatggagatgcccaccgccacccagaagaccgacaccggcctgacccagggcctgctgaaggtgctgcacaagcagtgccaccacaagagatacgtggagctgaccgacctggagcagaagtggaagaacctgtgcctgcccaaggagaagttcaaggccctgctgcagctggacccctgcgagaacaagatcaagtggatcaacttcctggccctgggctgcagcatgctgggcggcagcctgaacaccgccctgaagcacctgtgcgagatcctgaccgacgaccccgagggcggccccgccagaatccccttcaagaccttcagctacgtgtacagatacctggccagactggacagcgacgtgagccccctggagaccgagagctacctggccagcctgaaggagaacatcgacgccagaaagaacggcatgatcggcctgagcgacttcttcttccccaagagaaagctgctggagagcatcgagaacagcgaggacgtgggccactag

SEQ ID NO: 222253 - DNA, 1413 bp, Artificial Sequence
  derived and/or modified sequence
atggggaaaccctggctacgcgctttgcagcttttactgctgctgggggcgtcttgggcacgggccggggcccctagatgtacgtacactttcgttctgccgccccagaagttcacaggagcagtttgttggagtggacccgcatcaacccgcgcaacacccgaggccgcgaatgcctccgagctggctgctcttaggatgcgggtggggcgccatgaggagcttcttagagagctgcagcgacttgctgcagctgacggcgcagttgccggcgaagtaagggccttaaggaaggagtcccggggtctttcagccaggctgggacagctacgcgcccaattgcagcatgaggctggaccaggagccgggcctggagctgatcttggtgctgagcccgctgccgcactggccctgctgggagagcgagtcttaaacgcctctgcagaagcacaaagggctgccgccaggtttcatcagcttgatgtgaagtttcgcgaactcgcgcagctggtgacacagcagagtagtttgatagcgaggctggagaggttgtgcccgggaggtgctggaggacagcaacaggtactgcctccaccacctcttgtaccagtcgtccccgtccgactcgttggttctacatcagatacctcgcgaatgcttgacccagcgccagaaccacagcgtgatcagacacaacgacagcaggagcctatggcatcaccaatgcccgcaggtcatcccgccgttcctacgaagccggtgggcccctggcaggattgtgctgaggcccgccaggccggccacgaacagtccggcgtctatgagttaagagtaggcagacacgtagtgtctgtgtggtgcgaacagcagcttgaagggggaggatggacggtgattcagagaagacaggatggctcagtgaatttttttacaacatggcagcactacaaagcagggttcggtcgccccgatggagaatactggttaggcttggaacccgtgtaccaactgacgtcacgcggcgaccacgagctgttggttctccttgaagactggggcgggcgcggtgctcgtgcccattatgatggtttttcactcgaaccagaatcagatcactaccggttaagactcgggcagtatcacggagacgcaggcgactctctctcctggcacaacgacaaacctttcagtaccgtggacagagaccgcgattcttatagtggaaactgtgcgctctatcagcggggaggctggtggtaccatgcctgtgcccactccaatttaaacggagtgtggcaccacggtggccattaccgcagcaggtaccaggacggtgtctactgggctgagtttcgtggcggagcttacagccttcggaaggccgcgatgctgatccggccactgaagctatag

SEQ ID NO: 222254 - DNA, 1413 bp, Artificial Sequence
  derived and/or modified sequence
atgggcaagccctggctgcgggccctgcagctgctgctgctgctgggcgcctcctgggcccgggccggggccccccgctgcacctacacctttgtgctgcccccccagaagttcaccggggctgtgtgctggagcggccctgccagcacccgggccaccccagaggccgccaatgccagcgagctggccgccctgaggatgagggtgggcagacatgaggagctgctgcgggagctgcagaggctggccgctgctgatggagctgtggccggggaggtgcgggccctgaggaaggagagccggggcctgagcgcccggctgggccagctgcgggcccagctgcagcacgaggccggccctggggccggccctggagctgacctgggcgctgagcctgctgctgccctggccctgctgggggagcgggtgctgaatgccagcgctgaggcccagagagctgctgcccgcttccaccagctggatgtgaagttccgggagctggcccagctggtgacccagcagagcagcctcatcgcccggctggagcggctgtgccctgggggcgccggcggccagcagcaggtgctgcccccaccacccctggtgcctgtggtgcctgtgcggctggtgggcagcaccagtgacaccagcaggatgctggaccctgcccctgagccccagagggaccagacccagaggcagcaggagcccatggccagccccatgcctgctggccaccctgctgtgcccaccaagcctgtgggcccctggcaggactgtgccgaggcccggcaggccggccacgagcagagcggcgtgtatgagctgcgggtgggcagacatgtggtgtctgtgtggtgtgagcagcagctggagggcggcggctggacagtcatccagaggcggcaggacggctctgtgaacttcttcaccacctggcagcactacaaggccggcttcggccgcccagatggagagtactggctgggcctggagcctgtgtaccagctgaccagcagaggagaccacgagctgctggtgctgctggaggactggggcggccgcggggcccgggcccactatgatggcttcagcctggagcctgagagtgaccactaccgcctgcggctgggccagtaccatggagatgctggggacagcctgtcctggcacaatgacaagcccttcagcacagtggaccgggaccgggacagctacagcggcaactgtgccctgtaccagaggggcggctggtggtaccacgcctgtgcccacagcaacctgaatggagtgtggcaccacggcggccactaccgcagccgctaccaggatggagtgtactgggccgagttccggggcggggcctacagcctgaggaaggccgccatgctgatccggcccctgaagctgtag

SEQ ID NO: 222255 - DNA, 1413 bp, Artificial Sequence
  derived and/or modified sequence
atgggcaagccctggctgcgggccctgcagctgctgctgctgctgggagcctcctgggcacgagccggagcgccacggtgcacgtacacatttgtgctccctcctcagaaatttaccggtgccgtgtgttggtctggaccagcatccacccgcgccacgccggaggctgctaatgcttccgagctcgccgcactaagaatgagggtgggccgccacgaagagctcctacgtgagttgcagagactggcggccgccgacggcgcggtggccggcgaagtgagggcactccggaaggaaagtcggggtttgtctgcccgtttgggacagctgagggctcagctgcagcacgaagcaggacccggcgccggacccggcgcggacttgggagctgaacctgcagctgcattagcactcctaggcgaacgggtcctgaatgcctcagccgaggcccagcgtgcagcagcacgattccaccagctagacgttaaatttcgggagcttgcccaactcgtgacccagcagagttcgcttattgctagactagagagactctgcccagggggagcgggtggccaacagcaggtgctgcctccccccccactcgtgccagttgtgcccgttcggctggtggggtccacgagcgacacttctcgcatgttagaccctgcccccgaacctcagagagatcagactcagagacagcaggagcctatggccagtcctatgcccgcaggacacccagctgttcctactaaaccggtggggccatggcaggactgtgcggaagccaggcaggcaggacatgaacagagtggggtctatgaactcagggttgggcgacatgtagtgagtgtctggtgtgagcagcaactggaaggcggcgggtggacagtgatacagagacggcaagatggaagcgtgaactttttcacaacctggcagcactataaggccgggttcggacgacccgacggcgaatactggctgggcctggagcctgtttaccagcttacctccaggggcgaccacgagctgctcgtcctgctggaagactgggggggccgcggggcaagagcgcattacgacggattttcattagagccagaatctgatcactaccggctccgcctcggacagtatcacggcgatgctggagattcactttcatggcacaacgataaaccctttagcacggttgatcgtgaccgcgatagctactctggcaattgtgcgctgtaccagcgaggcggctggtggtatcacgcttgcgctcattcaaatctgaatggtgtttggcaccatgggggccactacaggtcccggtatcaggatggggtttattgggccgaatttcgggggggcgcttatagcctgagaaaagccgcgatgctcatccgaccattgaaactgtag

SEQ ID NO: 222256 - DNA, 1413 bp, Artificial Sequence
  derived and/or modified sequence
atgggtaagccctggctcagagcacttcagcttctccttctattaggggcttcctgggccagggctggggcaccaagatgtacatacacttttgtgctcccaccgcagaaatttacgggcgctgtgtgctggtccggtcccgctagcactagagcgactcctgaggctgctaatgcttcggagttggcagccctgcggatgcgtgtgggcaggcatgaggaactcttgcgagagctccaaaggctggctgcagctgacggcgcagtggctggagaggtccgcgctctccggaaggaatctagagggttgtcagcgcgattgggtcagctgagagctcaattgcagcacgaagccggtcccggagcaggacctggtgccgaccttggcgctgagccagcggcagcactggcccttctcggagaaagggtgctgaatgcttcagctgaggcccagagagctgctgcgcgtttccatcagctggacgttaagttccgtgagctggcacagctggtgacgcaacagagtagcctcattgctcgcctggagcggctctgcccaggcggtgctggcggacaacagcaggtcctgccgcctccccctctggtaccagtcgtgcctgtgaggttagtcggctcaacaagtgatacaagcaggatgcttgatcccgctcctgagccacaacgggaccaaacacagcgccagcaggaacccatggcatcacccatgccagccggacaccccgctgtaccaaccaagcccgtgggcccttggcaagactgcgcagaggctcgtcaggctggacacgaacaatccggagtgtatgagctgagagtcggtcgtcatgtcgtgtcagtgtggtgtgagcagcagctggagggaggtggctggactgtcatccagaggagacaggatggcagtgttaatttctttactacttggcagcactataaggccggtttcgggaggccagatggggagtactggttaggattggagccggtgtatcagctgacatcccgtggcgaccatgagctactcgtcttgctggaagattggggcggtaggggggcaagggctcactacgacgggttttctttggagcccgaatctgatcattacagattgcggcttggccaatatcacggagacgcgggagattcgctctcatggcataacgacaagcctttctcaaccgttgatcgtgaccgcgactcttatagcgggaattgtgcgctgtatcagagaggcggatggtggtaccatgcctgtgcccactccaatctcaatggggtctggcaccacgggggacactaccgctccagatatcaggatggcgtgtattgggcagaattccgaggcggtgcttattccctgcgaaaggctgctatgctcattagacccctcaaactgtag

SEQ ID NO: 222257 - DNA, 1413 bp, Artificial Sequence
  derived and/or modified sequence
atgggcaagccctggctgagagccctgcagctgctgctgctgctgggcgccagctgggccagagccggcgcccccagatgcacctacaccttcgtgctgcccccccagaagttcaccggcgccgtgtgctggagcggccccgccagcaccagagccacccccgaggccgccaacgccagcgagctggccgccctgagaatgagagtgggcagacacgaggagctgctgagagagctgcagagactggccgccgccgacggcgccgtggccggcgaggtgagagccctgagaaaggagagcagaggcctgagcgccagactgggccagctgagagcccagctgcagcacgaggccggccccggcgccggccccggcgccgacctgggcgccgagcccgccgccgccctggccctgctgggcgagagagtgctgaacgccagcgccgaggcccagagagccgccgccagattccaccagctggacgtgaagttcagagagctggcccagctggtgacccagcagagcagcctgatcgccagactggagagactgtgccccggcggcgccggcggccagcagcaggtgctgccccccccccccctggtgcccgtggtgcccgtgagactggtgggcagcaccagcgacaccagcagaatgctggaccccgcccccgagccccagagagaccagacccagagacagcaggagcccatggccagccccatgcccgccggccaccccgccgtgcccaccaagcccgtgggcccctggcaggactgcgccgaggccagacaggccggccacgagcagagcggcgtgtacgagctgagagtgggcagacacgtggtgagcgtgtggtgcgagcagcagctggagggcggcggctggaccgtgatccagagaagacaggacggcagcgtgaacttcttcaccacctggcagcactacaaggccggcttcggcagacccgacggcgagtactggctgggcctggagcccgtgtaccagctgaccagcagaggcgaccacgagctgctggtgctgctggaggactggggcggcagaggcgccagagcccactacgacggcttcagcctggagcccgagagcgaccactacagactgagactgggccagtaccacggcgacgccggcgacagcctgagctggcacaacgacaagcccttcagcaccgtggacagagacagagacagctacagcggcaactgcgccctgtaccagagaggcggctggtggtaccacgcctgcgcccacagcaacctgaacggcgtgtggcaccacggcggccactacagaagcagataccaggacggcgtgtactgggccgagttcagaggcggcgcctacagcctgagaaaggccgccatgctgatcagacccctgaagctgtag

SEQ ID NO: 222258 - protein, 252 aa, Artificial Sequence
  derived and/or modified sequence
MSAAVACVDYFAADVLMAISSGAVVHRGRPGPEGAGPAAGLDVRAARREAASPGTPGPPPPPPAASGPGPGAAAAPHLLAASILADLRGGPGAAPGGASPASSSSAASSPSSGRAPGAAPSAAAKSHRCPFPDCAKAYYKSSHLKSHLRTHTGERPFACDWQGCDKKFARSDELARHHRTHTGEKRFSCPLCSKRFTRSDHLAKHARRHPGFHPDLLRRPGARSTSPSDSLPCSLAGSPAPSPAPSPAPAGL

SEQ ID NO: 222259 - DNA, 2904 bp, Artificial Sequence
  derived and/or modified sequence
cgccggccggacggacgccgctcccgccgcctccgctccgcccgccgcgccgcgcgcccttgctcggcatgtcggcggccgtggcgtgcgtggattacttcgccgccgacgtgctcatggccatctcttcgggcgccgtggtgcaccgcgggcggcccggccccgagggcgcgggccccgccgccggcctggatgtgcgcgcggcgcgccgcgaggccgcctcacccgggaccccggggccacccccgccgccccccgccgcttctggcccgggccccggcgccgccgcggcgccccacctgctggccgccagcatcctggccgacctgcgcggcggacccggagccgccccggggggcgcctcgcccgcctcctcctcctcagccgcctcgtccccgtcctcgggccgcgcccccggcgccgcgccctccgccgccgccaagagccaccgctgtcccttcccggactgcgccaaagcctactacaagtcctcgcacctaaagtcgcacctgcggacgcacacaggggaacgcccttttgcttgtgactggcagggctgcgacaagaagttcgcccgctccgacgagctggcccgccaccaccggacgcacacgggcgagaagcgcttctcctgccctctgtgctccaagcgcttcacccgcagtgaccacctggccaagcacgcccgccgccaccccggcttccacccggacctgctccggcgccctggtgcccgcagtacctcccccagcgactcgctgccctgcagcctggccgggagccctgcgcccagccccgcgcccagcccagcccccgcaggcctgtagggccctcgtgcagcccaccctgaccgccaggatgcttctgccatccaggggtgtagtgaggacccacggggagcctgggccccttccagccgtgggcaaaccctgaagacacccctgcccccctccagagagtgaggagggggcctgagactggacctgggtctgcctgacctcagaggtggctctcaggatgggtgacgggggcttgtgtctgtaaatagccatgatactaactttcttcccatctgtgcaacggggcccccccagggcagctaggaggtcctcccctctcctctccaccaccccctgctgcccccctcccggggtggggtttgggggggtggagtggacttctgggagccggcccggggaaagcaccccctgccccatccctgcagattgggatgaagtgttcagacagccatagaggagtcgggggttgacacggcccctgcctctccccaccccacccccaccccaccgaaagccatgggagtagttcagggaaatgggggtgcagcccagccaccccccattcgggtactcaatctcaggtgtccacaagttctgcccacggtaggggctgcctggccccccagacctcgggggtagagccaggagtggggcagcgttaggatgcccggaggggctccaggtgttgcttctgagacctgggatggggagggaggggacctctgggttcttccaaagaacatttgactcagtggggtcgggagggaatcctggcttatttattttcctctgtcctcgggtgtgggggccctagctcgccctctctgggtgggtgggtgagagaggctgcaggggaggctggcaccgggcttgggcctccagtccctgccttgctgactttggccgttgcggtatcacgtgacaatcaactctcccttaacgacgactgcggctgttgggctgcgctgccctccctggcctgcaggtggggccgtggagcccatgcccgccggggttgcaggctcttccgggcctgggctgcagcctggcccggccctgcttccctggcctcccctccttctcctgggtgcttggaagaggtgggtcctggcccgtggttgaggtcttgcctcgtggactggaagcagagggctggctgtgcagcctcctggggtagctcgttttttttgcaccgggtagaatattttttcaggcacggattcctttttttctgggcccccatgggtggtccggcatcctcagggggtgtgagtgtgtgtggggggtctctgagctgaacttgggtggggtggggacttgttcctcgggggccacctttgtgtccttgtcagcggtcgtcctgctgtggcctgggttgcatttcctcttggggggggtattgaggacccccagcctggaatgagaagggtccccggttccatgtcagacccagaaaggtggatccccccactgttggctgcaggaggtttttggtacccccttttgttccagaaccgtcctgcctctcgcttggggacaggggggctttggatggcactggtgtgcacctggacccagccccggcctggcaggatccagggatgggtgcctgggatcctggggggagggaggcaggggacgcccttctggagctgggctcggagggtcctgccccatccagccctcggctctctgtgttctctgtccctagcctcaaaccctcttctggcagcgctagtgagatgccttagtctgtgggggtgggtgggggactggggccccgttttcctttgtgagtcttggttggccccagccctggcaggggcctgtctggagcaggggtaggtagggctgtgggttccagaactctataactgggcccctctccagtgtccaggggcttggagagacctgcgcccacccctccactctcccaggagtcgctgatcactgggacctggttccagccgtttgcaggggaggcggctccgagaggcgtgtgctttccgtgggtggcgcccctcccccgccctgcctggcctcatccttgtatttaattaattaaacaagcccctttttaaaccctaaaaaaaaaaaaaaaaaa

SEQ ID NO: 222260 - DNA, 2886 bp, Artificial Sequence
  derived and/or modified sequence
cgccggccggacggacgccgctcccgccgcctccgctccgcccgccgcgccgcgcgcccttgctcggcatgtcggcggccgtggcgtgcgtggattacttcgccgccgacgtgctcatggccatctcttcgggcgccgtggtgcaccgcgggcggcccggccccgagggcgcgggccccgccgccggcctggatgtgcgcgcggcgcgccgcgaggccgcctcacccgggaccccggggccacccccgccgccccccgccgcttctggcccgggccccggcgccgccgcggcgccccacctgctggccgccagcatcctggccgacctgcgcggcggacccggagccgccccggggggcgcctcgcccgcctcctcctcctcagccgcctcgtccccgtcctcgggccgcgcccccggcgccgcgccctccgccgccgccaagagccaccgctgtcccttcccggactgcgccaaagcctactacaagtcctcgcacctaaagtcgcacctgcggacgcacacaggggaacgcccttttgcttgtgactggcagggctgcgacaagaagttcgcccgctccgacgagctggcccgccaccaccggacgcacacgggcgagaagcgcttctcctgccctctgtgctccaagcgcttcacccgcagtgaccacctggccaagcacgcccgccgccaccccggcttccacccggacctgctccggcgccctggtgcccgcagtacctcccccagcgactcgctgccctgcagcctggccgggagccctgcgcccagccccgcgcccagcccagcccccgcaggcctgtagggccctcgtgcagcccaccctgaccgccaggatgcttctgccatccaggggtgtagtgaggacccacggggagcctgggccccttccagccgtgggcaaaccctgaagacacccctgcccccctccagagagtgaggagggggcctgagactggacctgggtctgcctgacctcagaggtggctctcaggatgggtgacgggggcttgtgtctgtaaatagccatgatactaactttcttcccatctgtgcaacggggcccccccagggcagctaggaggtcctcccctctcctctccaccaccccctgctgcccccctcccggggtggggtttgggggggtggagtggacttctgggagccggcccggggaaagcaccccctgccccatccctgcagattgggatgaagtgttcagacagccatagaggagtcgggggttgacacggcccctgcctctccccaccccacccccaccccaccgaaagccatgggagtagttcagggaaatgggggtgcagcccagccaccccccattcgggtactcaatctcaggtgtccacaagttctgcccacggtaggggctgcctggccccccagacctcgggggtagagccaggagtggggcagcgttaggatgcccggaggggctccaggtgttgcttctgagacctgggatggggagggaggggacctctgggttcttccaaagaacatttgactcagtggggtcgggagggaatcctggcttatttattttcctctgtcctcgggtgtgggggccctagctcgccctctctgggtgggtgggtgagagaggctgcaggggaggctggcaccgggcttgggcctccagtccctgccttgctgactttggccgttgcggtatcacgtgacaatcaactctcccttaacgacgactgcggctgttgggctgcgctgccctccctggcctgcaggtggggccgtggagcccatgcccgccggggttgcaggctcttccgggcctgggctgcagcctggcccggccctgcttccctggcctcccctccttctcctgggtgcttggaagaggtgggtcctggcccgtggttgaggtcttgcctcgtggactggaagcagagggctggctgtgcagcctcctggggtagctcgttttttttgcaccgggtagaatattttttcaggcacggattcctttttttctgggcccccatgggtggtccggcatcctcagggggtgtgagtgtgtgtggggggtctctgagctgaacttgggtggggtggggacttgttcctcgggggccacctttgtgtccttgtcagcggtcgtcctgctgtggcctgggttgcatttcctcttggggggggtattgaggacccccagcctggaatgagaagggtccccggttccatgtcagacccagaaaggtggatccccccactgttggctgcaggaggtttttggtacccccttttgttccagaaccgtcctgcctctcgcttggggacaggggggctttggatggcactggtgtgcacctggacccagccccggcctggcaggatccagggatgggtgcctgggatcctggggggagggaggcaggggacgcccttctggagctgggctcggagggtcctgccccatccagccctcggctctctgtgttctctgtccctagcctcaaaccctcttctggcagcgctagtgagatgccttagtctgtgggggtgggtgggggactggggccccgttttcctttgtgagtcttggttggccccagccctggcaggggcctgtctggagcaggggtaggtagggctgtgggttccagaactctataactgggcccctctccagtgtccaggggcttggagagacctgcgcccacccctccactctcccaggagtcgctgatcactgggacctggttccagccgtttgcaggggaggcggctccgagaggcgtgtgctttccgtgggtggcgcccctcccccgccctgcctggcctcatccttgtatttaattaattaaacaagcccctttttaaaccct

SEQ ID NO: 222261 - DNA, 1133 bp, Artificial Sequence
  derived and/or modified sequence
atgtcggcggccgtggcgtgcgtggattacttcgccgccgacgtgctcatggccatctcttcgggcgccgtggtgcaccgcgggcggcccggccccgagggcgcgggccccgccgccggcctggatgtgcgcgcggcgcgccgcgaggccgcctcacccgggaccccggggccacccccgccgccccccgccgcttctggcccgggccccggcgccgccgcggcgccccacctgctggccgccagcatcctggccgacctgcgcggcggacccggagccgccccggggggcgcctcgcccgcctcctcctcctcagccgcctcgtccccgtcctcgggccgcgcccccggcgccgcgccctccgccgccgccaagagccaccgctgtcccttcccggactgcgccaaagcctactacaagtcctcgcacctaaagtcgcacctgcggacgcacacaggggaacgcccttttgcttgtgactggcagggctgcgacaagaagttcgcccgctccgacgagctggcccgccaccaccggacgcacacgggcgagaagcgcttctcctgccctctgtgctccaagcgcttcacccgcagtgaccacctggccaagcacgcccgccgccaccccggcttccacccggacctgctccggcgccctggtgcccgcagtacctcccccagcgactcgctgccctgcagcctggccgggagccctgcgcccagccccgcgcccagcccagcccccgcaggcctgtagggccctcgtgcagcccaccctgaccgccaggatgcttctgccatccaggggtgtagtgaggacccacggggagcctgggccccttccagccgtgggcaaaccctgaagacacccctgcccccctccagagagtgaggagggggcctgagactggacctgggtctgcctgacctcagagtgtccaggggcttggagagacctgcgcccacccctccactctcccaggagtcgctgatcactgggacctggttccagccgtttgcaggggaggcggctccgagaggcgtgtgctttccgtgggtggcgcccctcccccgccctgcctggcctcatccttgtatttaattaattaaacaagcccctttttaaaccct

SEQ ID NO: 222262 - DNA, 759 bp, Artificial Sequence
  derived and/or modified sequence
atgtccgctgcggttgcttgcgtcgattacttcgccgccgacgtgctaatggccatatcatctggagccgtcgtccacagagggaggccaggccctgaaggcgctgggccagccgccggactcgacgtacgcgccgcccggagagaagctgcctcaccaggcacacctggaccaccccccccccctcctgcagcctccgggccgggtcccggtgccgccgccgctccgcacctgctcgccgcctccatactggctgaccttagaggaggcccaggtgccgcccctggcggagccagtcctgcgagctcttctagtgctgcaagctctccatccagcggacgtgcacccggcgccgcgcctagtgccgctgctaagtcccatcgctgcccgttccccgactgtgccaaagcatattataaatcgagtcacctgaaatcccacctccgtacacacactggagagagacctttcgcctgtgactggcagggttgtgataagaaatttgcaaggtcagatgagttggcgagacaccacaggacccacaccggggagaagcggttctcctgtccactatgttccaaacgtttcacacggtcggatcatcttgccaaacatgctaggaggcacccagggttccaccctgacctgctgcggcggcccggagcaagatcaacatctccttcggacagtctcccctgttcgttggcgggttcaccagccccctcgcctgctccttcccctgcacccgctggtctatag

SEQ ID NO: 222263 - DNA, 759 bp, Artificial Sequence
  derived and/or modified sequence
atgtccgccgctgtggcttgcgttgactatttcgcagctgatgttctgatggccatttcaagcggagccgttgttcatcgtggcagacccggcccagagggagctggccccgccgccgggcttgacgtgcgcgctgcaaggcgggaggccgcctccccgggcacccccggccccccgccccctcctcctgcggccagcgggccgggcccaggcgccgctgccgcgccgcacctgctggcggccagcatactggccgacctgcgtggcggtccaggtgcagctcctggaggagcatctccagcgtcctcaagttcagcagcctccagcccaagcagtggtagagcccctggtgcggcaccctccgccgcggccaagtcacacaggtgtccttttcccgactgcgcaaaggcatattataagagcagccatctgaaaagtcacctcaggactcacacaggggagcggcctttcgcctgtgactggcaagggtgcgacaagaagtttgctaggagcgatgaactggcacggcatcaccgcacgcatactggcgagaagagattctcatgtcctctgtgcagtaaacgtttcactaggtctgaccatttggctaagcatgctcggcggcatccaggattccacccagatctgctaaggcgcccaggcgcccgctctacgtcaccctcggactctttgccttgctcactggctgggagccccgccccatcgccggccccaagccctgcccctgccgggctgtag

SEQ ID NO: 222264 - DNA, 759 bp, Artificial Sequence
  derived and/or modified sequence
atgtctgctgctgtggcctgtgtggactactttgctgctgatgtgctgatggccatcagcagtggagctgtggtgcaccggggccggcccggccctgagggcgccggccctgctgctggcctggatgtgcgggccgcccggcgggaggccgccagccctggcaccccaggccccccacctcctcctcctgctgccagcggccctggccctggagctgctgctgccccccacctgctggccgccagcatcctggccgacctgcggggcggccctggagctgcccctggaggagccagccctgccagcagcagcagcgctgccagcagccccagcagcggccgggcccctggggccgcccccagcgctgctgccaagagccaccgctgccccttcccagactgtgccaaggcctactacaagagcagccacctgaagagccacctgcggacccacactggagagcggccctttgcctgtgactggcagggctgtgacaagaagtttgcccggagtgatgagctggcccggcaccacaggacccacactggagagaagcgcttcagctgccccctgtgcagcaagcgcttcaccaggagtgaccacctggccaagcacgcccggcggcaccctggcttccacccagacctgctgcggcggcctggggcccggagcaccagccccagcgacagcctgccctgcagcctggccggcagccctgcccccagccctgcccccagccctgccccagctggcctgtag

SEQ ID NO: 222265 - DNA, 759 bp, Artificial Sequence
  derived and/or modified sequence
atgagcgccgccgtggcctgcgtggactacttcgccgccgacgtgctgatggctatcagcagcggtgctgttgtgcacagaggtcgtcccggtcctgaaggggctggccccgctgctggcttggatgttcgcgccgcgaggcgcgaggccgcatcaccaggcacaccggggcccccacctccacctccagcagcctccggacccgggcctggggcagccgcagctcctcatctgctggcagcaagcattctagccgacctgcggggcggccctggggccgcccctggcggcgcgtcacccgcctccagctcatcggcagccagctcaccaagctctggcagggctccaggtgcggctccttccgccgctgcgaaaagccatcgttgtcccttcccagactgtgctaaagcctattacaagtccagccaccttaagagccaccttaggacccacaccggtgaaaggcctttcgcttgtgattggcagggctgcgataagaaattcgctagatctgacgaactggcaaggcaccataggacccatacaggagagaaacgcttctcttgtcccctctgctctaagcgctttacccgaagcgatcatctagctaagcatgcccggagacatccagggtttcaccctgatctgctgcgccgcccaggcgccaggtcaacaagtccatcagactctttaccatgcagcctggccgggtcgccggctcccagtcccgcaccctctcccgcacctgccggcctgtag

SEQ ID NO: 222266 - DNA, 759 bp, Artificial Sequence
  derived and/or modified sequence
atgagcgccgccgtggcctgcgtggactacttcgccgccgacgtgctcatggccatcagctcaggtgccgtggtgcacaggggccgtcctggccccgagggtgctggcccagcagccggacttgatgttcgtgcagcaaggagggaggccgcatcacctgggactccaggcccccctccacctccccctgcggcgagtggccctggcccaggtgcagcggccgcaccacacctgctcgccgccagtatcctcgcagatcttcgaggcgggccaggggctgcccctggcggggcatctcctgccagttcctcaagcgcggccagtagcccttcttccggtagggcaccgggcgccgcacctagcgctgccgctaaaagtcacagatgcccattccctgactgcgcgaaggcctattataagagctcgcacctgaaaagtcacctgcgaacacacacaggtgagcgacctttcgcctgcgactggcaggggtgtgataagaagtttgctaggagtgacgaacttgcacggcatcacaggacccacaccggtgagaagcgattctcctgtcctttatgcagtaagaggtttacccgatcagaccaccttgccaagcacgccaggcgtcaccctggctttcacccggatctgttaagaagacctggcgctcgatctacttccccatcagacagcttgccatgctctctggctggatcccccgcgccctcccccgcacccagtccagcccccgccggcctctag

SEQ ID NO: 222267 - DNA, 759 bp, Artificial Sequence
  derived and/or modified sequence
atgagcgctgccgttgcctgcgtggattactttgctgcagacgtgcttatggcaatctccagcggtgcagttgtgcatagaggcagacctgggccagaaggcgcaggtcccgctgctggcctggacgtgcgggcagctagacgggaggccgctagcccaggcactccgggacctcccccacctcccccagctgctagcggacctggaccaggtgcggctgccgcaccacatctgctggccgcatccattctggcggacctgagggggggacccggagcagcccctggaggtgcatcgcctgctagcagttctagtgctgcctcctccccatcatccggacgagcgcctggcgctgctccttcagcagctgctaaatcacatagatgcccgttcccagattgtgccaaggcctactataaaagctcccatctgaagtcccatctcagaacacataccggggaacgccctttcgcctgcgactggcagggctgtgacaagaagttcgctcgctctgatgaactggcgaggcatcaccggactcatacaggtgagaaaagattctcgtgccctttatgttcaaaacgtttcacacgcagcgaccacctggccaagcacgcacgtcgtcatccaggcttccatcccgatttgctgcggcgtcctggggctcgctcgacaagcccttccgattcgttaccttgtagcctggcaggctcccctgccccatcccccgcaccaagtcccgctccagccggactctag

SEQ ID NO: 222268 - DNA, 759 bp, Artificial Sequence
  derived and/or modified sequence
atgtccgccgctgtggcctgtgtggattacttcgctgcagacgtcctgatggccatcagttctggagccgttgtgcaccggggaaggcccggaccagagggagccggaccagctgccggtctcgatgtgagagctgctcggagagaagcagcatctcccggaacacccggaccgccacctccaccccctgccgcatcgggccctggacccggagccgctgcggctccccacctgttggccgcatcaattttagcagatctcagaggcggaccaggggctgccccaggcggagcaagtcctgcatcatcaagctctgcagctagtagcccttcttccggtcgcgcaccaggtgccgctccctctgctgccgcaaagtcacacaggtgccctttcccggattgtgccaaggcctattacaaatccagccacctgaaatcacacctgcggacccataccggcgagcgtccttttgcttgtgattggcagggatgcgataagaagttcgctagatcagacgaacttgctaggcatcacaggacgcacacaggcgagaaaaggttttcgtgtcccctgtgctccaagaggttcaccagatccgatcatctggcaaagcacgcaaggaggcacccaggttttcacccagacttgttgagacggccaggagctcggtccactagtcccagcgattctctgccctgctccctcgctggctcccccgctccctctcctgcgccatcaccggctcctgccggactgtag

SEQ ID NO: 222269 - DNA, 759 bp, Artificial Sequence
  derived and/or modified sequence
atgagcgccgccgtggcctgcgtggactacttcgccgccgacgtgctgatggccatcagcagcggcgccgtggtgcacagaggcagacccggccccgagggcgccggccccgccgccggcctggacgtgagagccgccagaagagaggccgccagccccggcacccccggcccccccccccccccccccgccgccagcggccccggccccggcgccgccgccgccccccacctgctggccgccagcatcctggccgacctgagaggcggccccggcgccgcccccggcggcgccagccccgccagcagcagcagcgccgccagcagccccagcagcggcagagcccccggcgccgcccccagcgccgccgccaagagccacagatgccccttccccgactgcgccaaggcctactacaagagcagccacctgaagagccacctgagaacccacaccggcgagagacccttcgcctgcgactggcagggctgcgacaagaagttcgccagaagcgacgagctggccagacaccacagaacccacaccggcgagaagagattcagctgccccctgtgcagcaagagattcaccagaagcgaccacctggccaagcacgccagaagacaccccggcttccaccccgacctgctgagaagacccggcgccagaagcaccagccccagcgacagcctgccctgcagcctggccggcagccccgcccccagccccgcccccagccccgcccccgccggcctgtag

SEQ ID NO: 222270 - DNA, 496 bp, Artificial Sequence
  derived and/or modified sequence
ggtcgctccaccccccggctcccgggactgtggactccacgaccctgtcctcggccctgtccgcgccgaagcagcccgggactgcgcagcgccccgcgtgccggtgagcgaccccggacgtgcagtccccaggtccccttccggagcgaggctgagcggctgcgccgcggcttgagccgggcctgacaaggaggggaggccgctggggtgctgggccagccgcagatcttttcctaattcagcagcgatttaaccaagagcctggaatattttaaggagtaataagagacatttacaaactattctctctgaagcctgctacctggaggcatcatctagataatcagaaccttggcttccacatcctcctcccttgtcttaactacaaacatttctttctgctgacttcaactcctcagacatgggaaagtctctttctcatttgcctttgcattcaagcaaagaagatgcttatgatggagtcacatctgaaaac

SEQ ID NO: 222271 - protein, 145 aa, Artificial Sequence
  derived and/or modified sequence
MDSQKEALQRIISTLANKNDEIQNFIDTLHHTLKGVQENSSNILSELDEEFDSLYSILDEVKESMINCIKQEQARKSQELQSQISQCNNALENSEELLEFATRSLDIKEPEEFSKVHKNCINTLNKGSCIFKKAFLFFFSFGFLY

SEQ ID NO: 222272 - DNA, 658 bp, Artificial Sequence
  derived and/or modified sequence
ctttcaccctggcaaccgcggcgtgactacggcgcgcgcggtctgggcgcggacgggtggggccgggcggtgccggtgcgggctggggcagtgcagtgagtagcggtcttggggtgtgcgatctcgctgagcctcctcacacggttcgtcgtctcgggttcgagcccagtgggcttagccactcgccatggactcccagaaagaagctctacagaggatcatttcaactctggcaaataaaaatgatgaaattcagaactttattgatacactacatcatacactaaaaggagttcaggaaaattcgtccaacatactctcagagttagatgaagaatttgatagtttatactctatactggatgaagtaaaagaaagtatgattaactgtatcaagcaggaacaagctcgtaaatcccaagagttacagagtcagattagtcaatgtaataatgccctggagaactctgaagaactattagaatttgcaacaaggtcattagatataaaggaacctgaagaattttcaaaggtacacaaaaactgcattaatacacttaacaagggaagttgtatttttaaaaaggcgtttttgtttttctttagttttggatttctttactgatttctaatactaataaagccttggggtttcttg

SEQ ID NO: 222273 - DNA, 438 bp, Artificial Sequence
  derived and/or modified sequence
atggactcccaaaaggaagctttacagagaattatctctaccctcgctaataaaaacgacgagatccagaacttcattgacacactgcaccacacactgaagggggtacaggaaaacagtagcaatatcctgtcggaactcgacgaggagtttgacagcctctattccatcctggatgaggtgaaggagagcatgataaattgcattaagcaggaacaggctagaaaatcacaggagctccagagtcagatatcccagtgcaataacgctctcgagaattcagaggagctgctggaattcgctacaagatctcttgacataaaggaacccgaggaattcagcaaggtgcacaagaattgcatcaacacgcttaataaggggagttgcatcttcaagaaggcgtttctcttttttttctcattcggctttctctattag

SEQ ID NO: 222274 - DNA, 438 bp, Artificial Sequence
  derived and/or modified sequence
atggacagccagaaggaggccctgcagaggatcatcagcaccctggccaacaagaatgatgagatccagaacttcatcgacaccctgcaccacaccctgaagggcgtgcaggagaacagcagcaacatcctgtctgagctggatgaggagtttgacagcctgtacagcatcctggatgaggtgaaggagagcatgatcaactgcatcaagcaggagcaggccaggaagagccaggagctgcagagccagatcagccagtgcaacaatgccctggagaacagcgaggagctgctggagtttgccaccaggagcctggacatcaaggagcctgaggagttcagcaaggtgcacaagaactgcatcaacaccctgaacaagggcagctgcatcttcaagaaggccttcctgttcttcttctcctttggcttcctgtactag

SEQ ID NO: 222275 - DNA, 438 bp, Artificial Sequence
  derived and/or modified sequence
atggacagccagaaggaggccctgcagcggatcatcagcaccctggcgaataaaaacgacgaaattcagaactttattgacactcttcatcacacgctgaagggcgtgcaggagaattcctctaatatcctcagtgagctggacgaagaatttgattctctctattctatcctggacgaagtgaaagagagtatgattaactgcatcaaacaggagcaggcacgcaagagccaggaactgcagagccagatctcacaatgcaataatgcgctggagaacagtgaagagttgctggagttcgccacacgtagcttagacatcaaggaacccgaggagttctctaaagttcacaaaaactgtatcaacactctaaacaaaggaagttgcatctttaaaaaggcctttctgttcttcttctcctttgggttcctttactag

SEQ ID NO: 222276 - DNA, 438 bp, Artificial Sequence
  derived and/or modified sequence
atggattcacagaaagaggcattacagcggatcatctccaccctcgccaacaagaatgacgagattcagaattttatcgatacacttcaccatactctgaagggcgtccaagaaaatagttccaacatcttgtcagagttagatgaagagtttgactccctctacagcatactggatgaggtcaaagagtctatgatcaattgtattaaacaggaacaggcccgtaagagccaagagctccagtcacagattagtcagtgcaacaacgccctggagaactccgaggagttgcttgagttcgccacccggtccctggatataaaggaaccagaggaattttctaaagtgcacaaaaattgcataaacacgctcaacaaaggcagctgtatctttaagaaagcatttctctttttttttagctttgggtttctttactag

SEQ ID NO: 222277 - DNA, 438 bp, Artificial Sequence
  derived and/or modified sequence
atggacagccagaaggaggccctgcagagaatcatcagcaccctggccaacaagaacgacgagatccagaacttcatcgacaccctgcaccacaccctgaagggcgtgcaggagaacagcagcaacatcctgagcgagctggacgaggagttcgacagcctgtacagcatcctggacgaggtgaaggagagcatgatcaactgcatcaagcaggagcaggccagaaagagccaggagctgcagagccagatcagccagtgcaacaacgccctggagaacagcgaggagctgctggagttcgccaccagaagcctggacatcaaggagcccgaggagttcagcaaggtgcacaagaactgcatcaacaccctgaacaagggcagctgcatcttcaagaaggccttcctgttcttcttcagcttcggcttcctgtactag

SEQ ID NO: 222278 - protein, 795 aa, Artificial Sequence
  derived and/or modified sequence
MEGLTLSDAEQKYYSDLFSYCDIESTKKVVVNGRVLELFRAAQLPNDVVLQIMELCGATRLGYFGRSQFYIALKLVAVAQSGFPLRVESINTVKDLPLPRFVASKNEQESRHAASYSSDSENQGSYSGVIPPPPGRGQVKKGSVSHDTVQPRTSADAQEPASPVVSPQQSPPTSPHTWRKHSRHPSGGNSERPLAGPGPFWSPFGEAQSGSSAGDAVWSGHSPPPPQENWVSFADTPPTSTLLTMHPASVQDQTTVRTVASATTAIEIRRQSSSYDDPWKITDEQRQYYVNQFKTIQPDLNGFIPGSAAKEFFTKSKLPILELSHIWELSDFDKDGALTLDEFCAAFHLVVARKNGYDLPEKLPESLMPKLIDLEDSADVGDQPGEVGYSGSPAEAPPSKSPSMPSLNQTWPELNQSSEQWETFSERSSSSQTLTQFDSNIAPADPDTAIVHPVPIRMTPSKIHMQEMELKRTGSDHTNPTSPLLVKPSDLLEENKINSSVKFASGNTVDGYSSSDSFTSDPEQIGSNVTRQRSHSGTSPDNTAPPPPPPRPQPSHSRSSSLDMNRTFTVTTGQQQAGVVAHPPAVPPRPQPSQAPGPAVHRPVDADGLITHTSTSPQQIPEQPNFADFSQFEVFAASNVNDEQDDEAEKHPEVLPAEKASDPASSLRVAKTDSKTEEKTAASAPANVSKGTTPLAPPPKPVRRRLKSEDELRPEVDEHTQKTGVLAAVLASQPSIPRSVGKDKKAIQASIRRNKETNTVLARLNSELQQQLKDVLEERISLEVQLEQLRPFSHL

SEQ ID NO: 222279 - DNA, 2388 bp, Artificial Sequence
  derived and/or modified sequence
atggagggcctgaccctgagcgacgccgagcagaagtactacagcgacctgttcagctactgcgacatcgagagcaccaagaaggtggtggtgaacggcagagtgctggagctgttcagagccgcccagctgcccaacgacgtggtgctgcagatcatggagctgtgcggcgccaccagactgggctacttcggcagaagccagttctacatcgccctgaagctggtggccgtggcccagagcggcttccccctgagagtggagagcatcaacaccgtgaaggacctgcccctgcccagattcgtggccagcaagaacgagcaggagagcagacacgccgccagctacagcagcgacagcgagaaccagggcagctacagcggcgtgatcccccccccccccggcagaggccaggtgaagaagggcagcgtgagccacgacaccgtgcagcccagaaccagcgccgacgcccaggagcccgccagccccgtggtgagcccccagcagagcccccccaccagcccccacacctggagaaagcacagcagacaccccagcggcggcaacagcgagagacccctggccggccccggccccttctggagccccttcggcgaggcccagagcggcagcagcgccggcgacgccgtgtggagcggccacagccccccccccccccaggagaactgggtgagcttcgccgacaccccccccaccagcaccctgctgaccatgcaccccgccagcgtgcaggaccagaccaccgtgagaaccgtggccagcgccaccaccgccatcgagatcagaagacagagcagcagctacgacgacccctggaagatcaccgacgagcagagacagtactacgtgaaccagttcaagaccatccagcccgacctgaacggcttcatccccggcagcgccgccaaggagttcttcaccaagagcaagctgcccatcctggagctgagccacatctgggagctgagcgacttcgacaaggacggcgccctgaccctggacgagttctgcgccgccttccacctggtggtggccagaaagaacggctacgacctgcccgagaagctgcccgagagcctgatgcccaagctgatcgacctggaggacagcgccgacgtgggcgaccagcccggcgaggtgggctacagcggcagccccgccgaggccccccccagcaagagccccagcatgcccagcctgaaccagacctggcccgagctgaaccagagcagcgagcagtgggagaccttcagcgagagaagcagcagcagccagaccctgacccagttcgacagcaacatcgcccccgccgaccccgacaccgccatcgtgcaccccgtgcccatcagaatgacccccagcaagatccacatgcaggagatggagctgaagagaaccggcagcgaccacaccaaccccaccagccccctgctggtgaagcccagcgacctgctggaggagaacaagatcaacagcagcgtgaagttcgccagcggcaacaccgtggacggctacagcagcagcgacagcttcaccagcgaccccgagcagatcggcagcaacgtgaccagacagagaagccacagcggcaccagccccgacaacaccgccccccccccccccccccccagaccccagcccagccacagcagaagcagcagcctggacatgaacagaaccttcaccgtgaccaccggccagcagcaggccggcgtggtggcccacccccccgccgtgccccccagaccccagcccagccaggcccccggccccgccgtgcacagacccgtggacgccgacggcctgatcacccacaccagcaccagcccccagcagatccccgagcagcccaacttcgccgacttcagccagttcgaggtgttcgccgccagcaacgtgaacgacgagcaggacgacgaggccgagaagcaccccgaggtgctgcccgccgagaaggccagcgaccccgccagcagcctgagagtggccaagaccgacagcaagaccgaggagaagaccgccgccagcgcccccgccaacgtgagcaagggcaccacccccctggcccccccccccaagcccgtgagaagaagactgaagagcgaggacgagctgagacccgaggtggacgagcacacccagaagaccggcgtgctggccgccgtgctggccagccagcccagcatccccagaagcgtgggcaaggacaagaaggccatccaggccagcatcagaagaaacaaggagaccaacaccgtgctggccagactgaacagcgagctgcagcagcagctgaaggacgtgctggaggagagaatcagcctggaggtgcagctggagcagctgagacccttcagccacctgtag

SEQ ID NO: 222280 - DNA, 2388 bp, Artificial Sequence
  derived and/or modified sequence
atggagggattgactcttagtgatgccgaacagaagtactactccgatctattctcttactgcgacatcgagagcacaaaaaaggtggtggttaatgggcgggtgttagaactgttcagggccgcacagctgcctaatgacgttgtgttgcagattatggaactgtgcggagccacccgtctgggctattttggcagatcacaattttatattgcactcaaacttgttgctgtggcccagtccggattccccttgcgggtcgaatcgatcaatactgtgaaggaccttccattacctagattcgttgcttcaaagaacgaacaggagagcaggcacgccgcctcttactcttcagactctgaaaatcaagggagttactcaggcgtgatccccccaccgccaggccggggccaagtgaaaaaaggctcggtgtcacatgacactgtgcagcctcggacttctgcagacgcccaggagcctgcgtcacccgtggtgagccctcaacagagcccccctacttccccccatacatggcggaaacacagccgacacccttccggcggcaacagcgagaggccgcttgctgggcccggtcccttttggagtccttttggcgaggctcagagcggatcgtctgcaggagacgctgtatggtcagggcattccccgcctccgcctcaagagaactgggtgagctttgccgacaccccacctacttccacattactaactatgcaccctgcctccgttcaggatcagacaactgtccgcacagtggcaagtgctactacggccatcgagatacgcagacagtcgtcctcatatgatgacccctggaaaattaccgatgagcaacgacaatattacgttaaccagtttaagacaatccagcctgatctcaatggatttattccagggagtgcggctaaagaattctttacgaaatctaagttgcctattctagaacttagtcatatctgggagttgagcgacttcgacaaggatggagcccttaccctcgacgagttttgtgcagcctttcatctggtcgttgctagaaaaaatggttatgatttacccgagaagctgcctgaaagtcttatgcctaagctgattgacctggaggactcagctgatgtgggagatcagcctggggaagtgggctacagtggctctcctgcagaagcgccaccttccaaatccccttccatgcccagcctaaatcagacctggcccgagctgaaccagtcgtcagagcagtgggagacatttagcgaacgctctagttcttcacaaactttgacgcagttcgacagcaacatcgctccagctgaccccgatacagccatcgtgcatccagtaccgattcggatgaccccctcaaaaattcatatgcaggagatggagttgaaacgcaccgggtcagaccatacaaatccaacctctccccttctggtgaagccatctgacctcttggaggaaaacaaaatcaactcctcagtcaagtttgcgagcggcaatactgtcgatggctactcctcctccgacagctttactagcgacccagagcagatcggcagcaatgtgaccagacagaggagccactccggaacctccccagataataccgcccctccccctccaccccccaggccccaaccttctcactctcggagtagctcacttgacatgaatcgtacatttacagttaccaccggccagcagcaagccggcgttgttgctcatccccctgccgttccccctcggcctcaaccatcccaggctcccggcccagcagtgcataggcccgtggacgccgatggactcataacacacacttcaactagcccccagcaaatccctgagcaacctaattttgccgatttctctcaatttgaagtctttgccgctagtaacgttaacgatgagcaagatgacgaagccgagaaacatcctgaggtgttgcctgccgagaaagcaagtgatcccgccagttctttgagggtggccaaaaccgactccaaaaccgaggagaagaccgcagctagtgcacccgcaaacgtttcgaaaggcaccacacctttggcgccccctcccaagccagtgaggcgaaggcttaagtccgaagacgagcttcgcccagaagttgatgaacacactcagaaaacaggggttctcgccgcagttctcgcttcacagccttccatcccccggagcgtgggaaaggacaagaaggccattcaggcgtcaattcgccgaaataaggaaaccaatactgtcttggcccgtctgaatagcgaactgcagcaacagctcaaggacgtactggaggaacgcatcagcctggaagttcagctcgagcagttgagaccattcagccacctgtag

SEQ ID NO: 222281 - DNA, 2388 bp, Artificial Sequence
  derived and/or modified sequence
atggagggcctgaccctgagtgatgctgagcagaagtactacagcgacctcttctcctactgtgacatcgagagcaccaagaaggtggtggtgaatggccgggtgctggagctgttccgggccgcccagctgcccaatgatgtggtgctgcagatcatggagctgtgtggggccacccggctgggctacttcggccgcagccagttctacatcgccctgaagctggtggccgtggcccagagcggcttccccctgcgggtggagagcatcaacacagtgaaggacctgcccctgcccaggtttgtggccagcaagaatgagcaggagagcagacatgctgccagctacagcagtgacagcgagaaccagggcagctacagcggggtcatccccccacctcctggccggggccaggtgaagaagggctctgtgtcccatgacacagtgcagcccaggaccagcgcagatgcccaggagcccgccagccctgtggtgagcccccagcagagcccccccaccagcccccacacctggaggaagcacagccgccaccccagcggcggcaacagcgagcggcccctggccggccctggccccttctggagcccctttggagaggcccagagcggcagcagcgctggagatgctgtgtggagcggccacagccccccaccaccccaggagaactgggtgtcctttgctgacaccccacccaccagcaccctgctgaccatgcacccagcctctgtgcaggaccagaccaccgtgaggacagtggccagcgccaccacagccatcgagatccggcggcagagcagcagctatgatgacccctggaagatcacagatgagcagaggcagtactacgtgaaccagttcaagaccatccagcctgacctgaatggcttcatccctggcagcgctgccaaggagttcttcaccaagagcaagctgcccatcctggagctgagccacatctgggagctgagtgactttgacaaggatggagccctgaccctggatgagttctgtgccgccttccacctggtggtggccaggaagaatggctatgacctgcctgagaagctgcctgagagcctgatgcccaagctgattgacctggaggacagcgcagatgtgggggaccagcccggggaggtgggctacagcggcagccctgctgaggccccacccagcaagagccccagcatgcccagcctgaaccagacctggccagagctgaaccagagcagcgagcagtgggagaccttcagcgagaggagcagcagcagccagaccctgacccagtttgacagcaacatcgccccagctgaccctgacacagccatcgtgcaccctgtgcccatccgcatgacccccagcaagatccacatgcaggagatggagctgaagaggactggaagtgaccacaccaaccccaccagccccctgctggtgaagcccagcgacctgctggaggagaacaagatcaacagctctgtgaagtttgccagcggcaacacagtggatggctacagcagcagtgacagcttcaccagtgaccctgagcagatcggcagcaatgtgacccggcagaggagccacagcggcaccagcccagacaacacagcccctcctcctcctccaccccggccccagcccagccacagccgcagcagcagcctggacatgaacagaaccttcaccgtgaccaccggccagcagcaggccggcgtggtggcccaccccccagctgtgcccccccggccccagcccagccaggcccctggccctgctgtgcacaggcctgtggatgctgatggcctcatcacccacaccagcaccagcccccagcagatccctgagcagcccaactttgctgacttcagccagtttgaggtgtttgctgccagcaatgtgaatgatgagcaggatgatgaggccgagaagcaccctgaggtgctgcctgctgagaaggccagtgaccctgccagcagcctgcgggtggccaagacagacagcaagacagaggagaagacagctgccagcgccccagccaacgtgtccaagggcaccacccccctggcccccccacccaagcctgtgagaagaaggctgaagtcagaagatgagctgcggcctgaggtggatgagcacacccagaagacaggagtgctggccgctgtgctggccagccagcccagcatccccaggtctgtgggcaaggacaagaaggccatccaggccagcatcagaagaaacaaggagaccaacacagtgctggcccggctgaacagcgagctgcagcagcagctgaaggatgtgctggaggagcgcatcagcctggaggtgcagctggagcagctgcggcccttcagccacctgtag

SEQ ID NO: 222282 - DNA, 2388 bp, Artificial Sequence
  derived and/or modified sequence
atggagggcctgaccctgagcgacgccgagcagaagtactacagcgacctgttctcctactgtgacattgaaagcaccaaaaaagttgtggtgaatggcagagtccttgaactttttagagctgctcaactgcctaatgatgtcgttctacagatcatggaactctgcggggccacaagattgggctatttcggccgatcacagttctatattgcactgaaactagttgctgttgcccagagcggctttcccctccgagtcgagtccataaacactgttaaagacctgcctttgccacgattcgtggccagcaagaatgagcaggagagccgccacgcagcctcttatagtagtgatagcgagaaccaaggcagctattctggagtgattccgcctccacccggccgtggccaggtgaaaaaaggtagtgtgtcccacgacaccgtgcaacctcgcacctcagcggacgctcaagagcccgcttcaccagtggtgtcacctcagcagtcacctcccacaagtccccacacctggcgtaaacatagtagacaccctagcggggggaacagtgagcgcccactggctgggccagggcccttttggtcacccttcggggaggcacagagcggcagctctgctggtgacgccgtgtggtcagggcactccccgcccccacctcaagagaattgggttagctttgccgatactcctccaacctcaacccttctgacaatgcacccggcgtcagtccaagatcaaacgacagtgcggacagtggcaagcgctactactgctatcgaaatcagaaggcagtcctcaagctacgatgacccatggaagatcacggacgagcagcggcaatattatgtgaaccagttcaagacaatccagcccgatctcaatgggtttataccagggtctgccgctaaggaattctttaccaaatccaaactgcccatcctggagctgagccatatttgggaattgagcgactttgataaggatggtgctctaaccctggacgaattctgcgctgcctttcaccttgtggtcgcgcgaaaaaacggatacgacctccctgagaagcttcccgaatcactgatgcccaaactcatagacctcgaagacagtgccgatgtgggcgaccagccaggcgaggtcggatacagcgggtccccagcagaggcccctccatctaaaagcccgtcaatgccctccctaaaccagacgtggcctgagcttaatcagtcctccgagcaatgggaaacgttctcggagcgaagctctagctcccaaacgctgactcagtttgacagcaatattgctcctgctgatccggatactgcgattgttcaccctgtaccaattcgaatgactccaagtaaaatacacatgcaagaaatggaactgaaacgaacaggtagcgaccacaccaatccaacctccccgctgttagtcaagccttcagacctgctggaagaaaacaagatcaattcatccgtaaaatttgcaagtggaaacacggtcgacggctattccagttccgattccttcacctctgatcctgagcaaatcggcagtaacgtgacaagacagaggagtcatagtggaacatctcctgacaatacagcacctccgccacctcctccaaggccgcagccaagccactcccggtcttcttcgctggatatgaacaggaccttcaccgtcaccaccggacaacagcaggccggcgtcgtggcccatccacccgctgtgcccccacgcccgcaaccttcacaggcacctggacctgcagtgcatcggccagtggatgctgacggcttaataacccatacatccacctccccccagcagatccctgagcagcctaacttcgccgacttcagccaattcgaggtgttcgccgcatctaacgttaatgacgagcaggacgatgaggcggagaaacaccccgaggtactgcccgccgaaaaagcctcagatccagcctcctctcttagggtggcaaagaccgattcaaaaactgaggagaagaccgccgcctctgcccctgcaaacgtgtccaaagggacaacccccctagcccctccccctaaaccagtcaggcggcgtctcaaatcagaagatgagttgaggcccgaggtggacgagcacacccagaaaacaggggtattagccgcggttctcgctagtcagcctagcattccgaggtctgtcggcaaggacaagaaggccattcaggctagcatcagaaggaacaaggagacaaacactgtccttgccaggctgaattccgaattacagcagcaactcaaggatgtgctcgaggagcggatatcattggaggtgcagctggaacaactgaggccgttcagtcacctgtag

SEQ ID NO: 222283 - DNA, 2388 bp, Artificial Sequence
  derived and/or modified sequence
atggaggggctcacccttagtgatgccgagcaaaagtactacagtgatctgttctcatattgcgacatagagtcaacgaagaaagtggtggtgaatggacgggtgctggagctctttagggctgctcagctacccaatgacgtggtgctccagataatggaactttgcggggcaactagactgggctattttggccgtagtcagttctatatcgccctcaaactcgttgcggtggcacaatccggcttccccctgcgggttgaatctattaatacagtgaaggacctcccactcccaaggttcgtggcatcaaaaaacgaacaagagagtcggcatgccgcaagctactcaagtgacagcgagaatcaaggcagctatagcggggtcataccgcctccacctggacgaggtcaggtaaaaaagggttccgttagccacgatacagtgcagcccagaacctccgccgacgcccaagaacctgcatcacctgtggtcagcccacagcagagccctcctaccagtcctcacacttggcggaagcactccaggcacccttctggtggcaacagcgagagaccccttgcgggacctggccctttctggtccccatttggggaagctcagagtggctcatccgccggagacgcagtatggtctggtcactcgccccctccaccgcaagaaaattgggtcagcttcgctgacacaccaccgacatccacccttttgaccatgcaccccgcatcagtgcaggatcaaacgactgtgcggaccgtggcctctgccaccactgctatcgagatcagacgtcagtcgtcatcttacgatgatccgtggaagatcactgatgaacagagacaatattatgtgaatcagtttaagacaatccagcccgatctaaacggcttcatccctggatctgccgctaaggaattcttcaccaaatccaagctgcctatcctggagctgagccacatttgggagctgagtgacttcgacaaggacggcgcactgactctagacgaattttgcgccgcattccacttggtcgttgccagaaaaaatgggtatgatcttccggaaaagctccccgagagtctgatgcccaagttgatcgatctggaggacagcgccgatgtcggggaccagcccggagaagtcgggtactcgggatcacctgccgaagcaccccctagtaaatccccgtccatgccctcacttaaccagacatggcccgaactgaaccagagctcagaacagtgggagacattctccgaaagatcttcttccagccaaacacttacacagttcgactctaacatcgcccctgccgaccctgataccgccatcgtccatcccgtgcctattaggatgacacctagcaagatacacatgcaggagatggagctgaagcgaaccggatctgaccatacaaaccccacctcccccctcctggtgaagccatccgacctcctcgaggagaataaaataaactcctccgtgaaattcgctagtggaaatactgtggatggatacagcagcagtgactcattcacctcggacccagagcagattggaagcaatgtgacccgccagcggagtcactctgggacatcccccgacaacaccgctccaccacctcctcctccgaggccacagcctagtcattctaggtcaagctcccttgatatgaatagaacatttactgtgacaaccggtcagcaacaggccggtgtggtggcacaccccccagccgtgccacccagacctcagcccagccaggctccaggtcccgcagtgcacagacccgtcgacgcagatggcctgatcacgcacactagcacatcgccacagcaaatccctgaacagccaaatttcgcagactttagtcaatttgaagtatttgccgcttcgaatgtgaatgacgagcaggacgacgaggccgaaaagcaccctgaggtgttacctgccgaaaaagctagcgaccccgcttcctctctaagagttgctaaaactgactccaaaactgaagagaaaacagctgcctctgcaccggcaaatgtctcaaaagggactacgccccttgcccctcctcccaagcccgtccgcaggcgtctgaaatcggaagacgaactgcgccctgaggtggatgaacatacacagaaaaccggtgtgctggcggcagtcttggcctcccagccttccatcccacgcagcgtgggcaaggataaaaaagcaatccaagcctcaatccgcagaaacaaggagactaataccgtgcttgctagattgaattccgagctccagcagcagcttaaggacgtcctagaagagcggattagtctggaagtccagctggagcagctcaggccattctcacatctgtag

SEQ ID NO: 222284 - DNA, 3161 bp, Artificial Sequence
  derived and/or modified sequence
ccgccgctgtcactgttggtgcgggcgcgtcggggccgggccggggcactgtaaatggcggcggagggaggcggagcggcggccacgctcagcccagatcccccgaaactttaggttcgaagccccacaactttccgggaagcgctgccgctccggaggcgtggacggaaggggaagccgaggcgggaagtctgggggaatcggcagggagccggggagactcgaacccgcggcgggggcggagtccgccagtgcctcgcgcctccgcggcccccgcctctttctctgcaccctccccgcggccggagccggagccggagccggagccgtagtcgcagccgcagccgcagccgcgcgccgggcctcgcaggcagcggcgcggcgagcgcagccgggccccctcctcgcgacctccgggccctgttgctcgggcgcacctggcgcgtgtgaggccggggccggcgttttcgggaagctagcaggaggccgggccacgcgcagcccctgccggcccaggttcctggggccgggccccgagtagtgcatgcggggcggggcggccgtgagccggaggcgaagatggaaggcttaacgctgagcgatgcggagcagaaatactattcagatctcttctcctactgcgacattgagagcaccaagaaggtggtggtcaacgggcgggtgctggagctgttccgggccgcgcagctgccgaacgacgtggtcctacagatcatggagctttgtggtgcaacaagacttggttattttggaagaagtcagttctacattgctttgaaacttgtagctgttgcccagtctggtttccctttaagagtggaaagtataaatacagtaaaggaccttcctctgccaagatttgttgcttcaaagaatgaacaggaatctcgccatgcagcctcatattcttcagattctgaaaatcaagggtcgtattctggtgtaattcccccaccacctggcagggggcaagtgaaaaagggatccgtaagccatgatacggttcagcctcgtacatctgcagatgcacaggaacctgcatccccagtagtttcaccacagcaatccccaccaacttctccacacacatggaggaagcacagccgtcatcccagcggtgggaatagtgagaggcctctcgcgggacctgggccattttggtctccctttggtgaagcacaatcaggttcttctgctggtgatgcagtgtggtcagggcattccccacctccacctcaagaaaactgggtcagttttgcagatactccaccaaccagtactcttttaaccatgcatcctgcttctgtccaggaccagacaacagtacgaactgtagcatcagctacaactgccattgaaattcgtaggcaatccagtagttatgatgatccctggaaaataacagatgaacaaagacagtattatgtaaatcagtttaaaaccattcagcctgatctaaacggatttattccaggatctgcagctaaagagttttttacaaaatcaaaacttcctattcttgaactttctcatatttgggaactctcagactttgataaagatggtgcattgacactggatgagttttgtgctgcttttcatctggtggttgctaggaagaatggctatgatttaccagaaaaacttcctgaaagcttaatgcccaaactgattgatttggaagattcagcagatgttggggatcagccaggtgaggtaggttattcaggctctcctgctgaagctcctccaagcaagtcaccatcgatgccatcactaaaccagacatggcctgagctgaatcagagcagtgagcagtgggagacatttagtgaacgctcttcaagctcacaaactctgacccaatttgattctaacattgcaccagctgatcctgatactgctattgttcatccagttcccattcgtatgactccaagcaaaatccacatgcaggaaatggaacttaaaagaactggcagcgatcatacaaatcccactagcccattacttgtgaaaccatctgaccttttagaagaaaataagataaattcatcggtgaaattcgcttctggtaatactgtagatggttacagtagttcagactcttttacttctgacccagaacagatcgggagcaatgtaactcgtcaaaggtctcattcaggaacgtcgcctgataacactgcaccaccacctccccctccaaggccacagccctctcattctagatcatcatctttagatatgaatcggacctttacagtcaccacaggacaacaacaggctggagttgttgcccatcctcctgcagtgcctccaagaccacagccctcacaggctcctggtcctgctgtgcatcgcccagtggatgccgatggcctcataactcacactagtacctcacctcagcagataccagagcaaccaaattttgcagatttcagtcagtttgaagtatttgctgcatcaaatgtaaacgacgaacaagatgatgaagccgagaaacatccagaagtcctgccggctgaaaaagcttctgatcctgcaagttctcttcgagttgccaaaacagatagtaaaactgaagaaaagacagctgctagtgctcctgccaatgtgagcaaaggcacaacaccacttgctccaccacctaaacctgttcgaagaagattaaaatcagaagatgaattaaggccagaagttgatgaacatacacaaaagacgggtgtcttagctgctgttcttgcatcacaaccttctattcccagatctgttgggaaagataagaaagctattcaggcatcaattagacgtaataaggaaaccaacaccgttttggccagattgaatagcgaattgcagcaacaattaaaggatgttcttgaggagagaatttccctggaagttcaactggaacaacttcgaccattctctcacctataagccaattgccgttaactgtgaacatacttgtttttaagtggttttgggttcaaagccaatttggagacctagacattcagctcactgcttaactcaacattaaattttatgattctgttttgccctatatgttcaccgttgtatttaagtatcttttattttttaatttcgacaataaaaaggtcaggatggcg

SEQ ID NO: 222285 - protein, 929 aa, Artificial Sequence
  derived and/or modified sequence
MCESYSRSLLRVSVAQICQALGWDSVQLSACHLLTDVLQRYLQQLGRGCHRYSELYGRTDPILDDVGEAFQLMGVSLHELEDYIHNIEPVTFPHQIPSFPVSKNNVLQFPQPGSKDAEERKEYIPDYLPPIVSSQEEEEEEQVPTDGGTSAEAMQVPLEEDDELEEEEIINDENFLGKRPLDSPEAEELPAMKRPRLLSTKGDTLDVVLLEAREPLSSINTQKIPPMLSPVHVQDSTDLAPPSPEPPMLAPVAKSQMPTAKPLETKSFTPKTKTKTSSPGQKTKSPKTAQSPAMVGSPIRSPKTVSKEKKSPGRSKSPKSPKSPKVTTHIPQTPVRPETPNRTPSATLSEKISKETIQVKQIQTPPDAGKLNSENQPKKAVVADKTIEASIDAVIARACAEREPDPFEFSSGSESEGDIFTSPKRISGPECTTPKASTSANNFTKSGSTPLPLSGGTSSSDNSWTMDASIDEVVRKAKLGTPSNMPPNFPYISSPSVSPPTPEPLHKVYEEKTKLPSSVEVKKKLKKELKTKMKKKEKQRDREREKDKNKDKSKEKDKVKEKEKDKETGRETKYPWKEFLKEEEADPYKFKIKEFEDVDPKVKLKDGLVRKEKEKHKDKKKDREKGKKDKDKREKEKVKDKGREDKMKAPAPPLVLPPKELALPLFSPATASRVPAMLPSLLPVLPEKLFEEKEKVKEKEKKKDKKEKKKKKEKEKEKKEKEREKEKREREKREKEKEKHKHEKIKVEPVALAPSPVIPRLTLRVGAGQDKIVISKVVPAPEAKPAPSQNRPKTPPPAPAPAPGPMLVSPAPVPLPLLAQAAAGPALLPSPGPAASGASAKAPVRSVVTETVSTYVIRDEWGNQIWICPGCNKPDDGSPMIGCDDCDDWYHWPCVGIMTAPPEEMQWFCPKCANKKKDKKHKKRKHRAH

SEQ ID NO: 222286 - protein, 283 aa, Artificial Sequence
  derived and/or modified sequence
MCESYSRSLLRVSVAQICQALGWDSVQLSACHLLTDVLQRYLQQLGRGCHRYSELYGRTDPILDDVGEAFQLMGVSLHELEDYIHNIEPVTFPHQIPSFPVSKNNVLQFPQPGSKDAEERKEYIPDYLPPIVSSQEEEEEEQVPTDGGTSAEAMQVPLEEDDELEEEEIINDENFLGKRPLDSPEAEELPAMKRPRLLSTKGDTLDVVLLEAREPLSSINTQKIPPMLSPVHVQDSTDLAPPSPEPPMLAPVAKSQMPTAKPLETKSFTPKTKTKKKKKKKKS

SEQ ID NO: 222287 - DNA, 2182 bp, Artificial Sequence
  derived and/or modified sequence
atgtgcgagagttactccaggtcgttgttgagggtctcggtggcgcagatctgccaggcgctgggctgggactcggtgcagctcagcgcctgccacctcctcacggacgtgctgcagcgctatctgcagcagctgggccggggctgccatcggtactctgagctctatggccgaacagacccaattttggatgatgttggtgaagctttccagctgatgggggttagtctacatgaactagaagactatattcacaacattgagcctgtcaccttcccacaccaaattccgtcatttcctgttagcaagaacaatgtacttcagtttcctcaacctggaagtaaagatgcagaggaaagaaaagaatacattcctgattacctgccacccattgtgtcttctcaagaagaagaagaagaagagcaggtgcccactgatggaggcacatcagcagaagccatgcaggttcccttggaagaagatgatgaattggaggaggaagaaattattaatgatgagaatttcctgggcaagagaccactggatagtcctgaagctgaagaactgccagccatgaagcggcctcggctattaagcactaaaggggacacgctagatgttgtgttattggaagctcgagagccactcagctcaataaatactcaaaagatcccaccaatgctttctccagtccatgtacaggacagtacagacttggcacctccctcacccgagccgccaatgttggctccagttgcaaaatcacaaatgccaactgcaaaaccattagaaacaaagtcatttacacctaaaacaaagactaaaactagctctccaggacagaagactaaatcacctaaaaccgcccagtcaccagcaatggtcggaagtcctattcgatcaccaaaaactgtatccaaagaaaagaaatcacctggacgttccaagagccccaagagtcccaagagccccaaggtcacgactcacattccccaaacacctgtgagacctgaaacgcccaacaggactccttcagctacactcagtgaaaaaatcagtaaagagactatccaggtaaaacaaatacagacaccccctgatgctgggaaactgaacagtgagaatcagccgaaaaaggctgtggtagcagataaaacgattgaggcctctatcgatgctgtgattgcacgagcctgtgctgagcgagagccagatcctttcgaattttcttctggatcggaatctgaaggagacatttttactagccctaagagaatttcaggcccggagtgtactactcccaaagcttccacttccgcgaacaatttcacaaagtcaggatccactcctctgcctctttccggtggaacctcaagttccgataactcatggacaatggatgcctccattgatgaggttgtacgtaaagcaaaactgggaacaccttcaaatatgccccccaactttccttatatctcttctccgtcagtgtctcctcccactcccgaacctctccacaaggtgtatgaggagaaaaccaagctgccttcctccgtggaggtaaagaagaagttgaaaaaggaactaaagactaaaatgaaaaagaaagaaaagcagagagatagggagagggaaaaagacaagaacaaggacaaaagtaaggagaaggataaagtgaaagagaaagagaaagacaaggaaactggcagggaaacaaagtatccctggaaggaatttcttaaagaggaagaggcagatccctacaagtttaaaatcaaagaatttgaagatgttgatcccaaagtgaaattgaaagatggacttgtgaggaaggagaaagagaagcataaagataagaagaaagatagagagaaaggcaagaaagataaagataagagagagaaagaaaaagtgaaagataaaggcagagaagataagatgaaagccccagcacccccactggtgttgcccccaaaagagttggccctgcccttgttcagccctgccacagcctccagggtcccagccatgctgccatctttgttgccagtgcttccggaaaaactgtttgaggagaaagagaaggtgaaggagaaagaaaagaaaaaggacaaaaaggagaagaagaaaaagaaggaaaaagagaaggagaagaaggagaaggaaagagagaaagagaagg

SEQ ID NO: 222288 - DNA, 2790 bp, Artificial Sequence
  derived and/or modified sequence
atgtgcgagagctacagcagaagcctgctgagagtgagcgtggcccagatctgccaggccctgggctgggacagcgtgcagctgagcgcctgccacctgctgaccgacgtgctgcagagatacctgcagcagctgggcagaggctgccacagatacagcgagctgtacggcagaaccgaccccatcctggacgacgtgggcgaggccttccagctgatgggcgtgagcctgcacgagctggaggactacatccacaacatcgagcccgtgaccttcccccaccagatccccagcttccccgtgagcaagaacaacgtgctgcagttcccccagcccggcagcaaggacgccgaggagagaaaggagtacatccccgactacctgccccccatcgtgagcagccaggaggaggaggaggaggagcaggtgcccaccgacggcggcaccagcgccgaggccatgcaggtgcccctggaggaggacgacgagctggaggaggaggagatcatcaacgacgagaacttcctgggcaagagacccctggacagccccgaggccgaggagctgcccgccatgaagagacccagactgctgagcaccaagggcgacaccctggacgtggtgctgctggaggccagagagcccctgagcagcatcaacacccagaagatcccccccatgctgagccccgtgcacgtgcaggacagcaccgacctggccccccccagccccgagccccccatgctggcccccgtggccaagagccagatgcccaccgccaagcccctggagaccaagagcttcacccccaagaccaagaccaagaccagcagccccggccagaagaccaagagccccaagaccgcccagagccccgccatggtgggcagccccatcagaagccccaagaccgtgagcaaggagaagaagagccccggcagaagcaagagccccaagagccccaagagccccaaggtgaccacccacatcccccagacccccgtgagacccgagacccccaacagaacccccagcgccaccctgagcgagaagatcagcaaggagaccatccaggtgaagcagatccagaccccccccgacgccggcaagctgaacagcgagaaccagcccaagaaggccgtggtggccgacaagaccatcgaggccagcatcgacgccgtgatcgccagagcctgcgccgagagagagcccgaccccttcgagttcagcagcggcagcgagagcgagggcgacatcttcaccagccccaagagaatcagcggccccgagtgcaccacccccaaggccagcaccagcgccaacaacttcaccaagagcggcagcacccccctgcccctgagcggcggcaccagcagcagcgacaacagctggaccatggacgccagcatcgacgaggtggtgagaaaggccaagctgggcacccccagcaacatgccccccaacttcccctacatcagcagccccagcgtgagcccccccacccccgagcccctgcacaaggtgtacgaggagaagaccaagctgcccagcagcgtggaggtgaagaagaagctgaagaaggagctgaagaccaagatgaagaagaaggagaagcagagagacagagagagagagaaggacaagaacaaggacaagagcaaggagaaggacaaggtgaaggagaaggagaaggacaaggagaccggcagagagaccaagtacccctggaaggagttcctgaaggaggaggaggccgacccctacaagttcaagatcaaggagttcgaggacgtggaccccaaggtgaagctgaaggacggcctggtgagaaaggagaaggagaagcacaaggacaagaagaaggacagagagaagggcaagaaggacaaggacaagagagagaaggagaaggtgaaggacaagggcagagaggacaagatgaaggcccccgccccccccctggtgctgccccccaaggagctggccctgcccctgttcagccccgccaccgccagcagagtgcccgccatgctgcccagcctgctgcccgtgctgcccgagaagctgttcgaggagaaggagaaggtgaaggagaaggagaagaagaaggacaagaaggagaagaagaagaagaaggagaaggagaaggagaagaaggagaaggagagagagaaggagaagagagagagagagaagagagagaaggagaaggagaagcacaagcacgagaagatcaaggtggagcccgtggccctggcccccagccccgtgatccccagactgaccctgagagtgggcgccggccaggacaagatcgtgatcagcaaggtggtgcccgcccccgaggccaagcccgcccccagccagaacagacccaagacccccccccccgcccccgcccccgcccccggccccatgctggtgagccccgcccccgtgcccctgcccctgctggcccaggccgccgccggccccgccctgctgcccagccccggccccgccgccagcggcgccagcgccaaggcccccgtgagaagcgtggtgaccgagaccgtgagcacctacgtgatcagagacgagtggggcaaccagatctggatctgccccggctgcaacaagcccgacgacggcagccccatgatcggctgcgacgactgcgacgactggtaccactggccctgcgtgggcatcatgaccgccccccccgaggagatgcagtggttctgccccaagtgcgccaacaagaagaaggacaagaagcacaagaagagaaagcacagagcccactag

SEQ ID NO: 222289 - DNA, 852 bp, Artificial Sequence
  derived and/or modified sequence
atgtgcgagagctacagcagaagcctgctgagagtgagcgtggcccagatctgccaggccctgggctgggacagcgtgcagctgagcgcctgccacctgctgaccgacgtgctgcagagatacctgcagcagctgggcagaggctgccacagatacagcgagctgtacggcagaaccgaccccatcctggacgacgtgggcgaggccttccagctgatgggcgtgagcctgcacgagctggaggactacatccacaacatcgagcccgtgaccttcccccaccagatccccagcttccccgtgagcaagaacaacgtgctgcagttcccccagcccggcagcaaggacgccgaggagagaaaggagtacatccccgactacctgccccccatcgtgagcagccaggaggaggaggaggaggagcaggtgcccaccgacggcggcaccagcgccgaggccatgcaggtgcccctggaggaggacgacgagctggaggaggaggagatcatcaacgacgagaacttcctgggcaagagacccctggacagccccgaggccgaggagctgcccgccatgaagagacccagactgctgagcaccaagggcgacaccctggacgtggtgctgctggaggccagagagcccctgagcagcatcaacacccagaagatcccccccatgctgagccccgtgcacgtgcaggacagcaccgacctggccccccccagccccgagccccccatgctggcccccgtggccaagagccagatgcccaccgccaagcccctggagaccaagagcttcacccccaagaccaagaccaagaagaagaagaagaagaagaagagctag

SEQ ID NO: 222290 - DNA, 2790 bp, Artificial Sequence
  derived and/or modified sequence
atgtgcgagtcatattcgcgttccctgctccgcgtgagtgtagctcagatctgccaggccctgggctgggactctgttcagcttagcgcatgtcaccttcttaccgatgtgctccagcgctatctgcagcagcttgggcgggggtgtcaccggtactccgaactgtatgggaggactgatcctatcctcgacgatgtgggggaagctttccagctgatgggcgtgagcttgcacgagctggaggattacattcacaacattgaaccagttacattcccacaccaaatccccagtttcccggtgagcaagaacaacgtattgcagtttccccagcccgggagtaaggacgctgaagaaagaaaggagtacatccctgattacctgccacccatagttagcagccaggaagaagaggaggaagaacaagtccccacagacggcgggactagtgctgaggctatgcaggtaccacttgaagaagacgatgaactggaagaagaggagattatcaacgacgaaaactttcttggcaagagaccccttgatagccctgaggccgaagaactgcccgcaatgaagcggccccggctcctctcaacaaagggcgatacactggacgtggtcttgctggaagcccgggaacctctgtcctctattaacacccagaaaataccacctatgttgagtcccgtacatgttcaagacagtactgaccttgcccctccttcaccagaacctccaatgctggccccagtcgccaagtcccaaatgcctaccgccaaacctctagagaccaagagcttcactcccaagactaagacgaagacaagttcccccggtcaaaagactaagtcaccaaagacagcccagtctccagctatggtaggatctcctattaggagcccgaagaccgtgagcaaggagaagaagagtccaggtcgatccaaaagtccaaagtcccctaagtcccccaaagtaacgacacacatcccacagactcccgtcaggccagagaccccaaatagaactccctcggctacacttagcgagaagatctcaaaagagactatccaggtgaagcagatccagacgccgcctgatgccggaaagctgaatagtgaaaatcagcccaagaaagcggtagttgcagataaaaccatcgaggctagcatcgatgctgtgattgcacgcgcctgcgccgagcgtgagccggacccgtttgagttcagtagtggatctgagtctgaaggcgacatttttacttcaccgaaaagaatttccggcccggaatgcaccacaccaaaagcctcaacgtcagcgaacaactttaccaagagcggttctaccccgctaccactgagcgggggtacctcatcctctgataactcatggaccatggatgcatcaattgacgaagttgtaagaaaggccaaactcggaaccccctcaaatatgcctcctaacttcccatatatctcttctccatctgtatcacctcctacaccagagcccttgcataaggtatacgaggaaaaaactaagcttcccagcagcgttgaggtcaagaaaaagctgaagaaggagctcaaaactaagatgaagaagaaagagaagcagagagaccgagaacgggagaaggataagaacaaagataaaagcaaggaaaaagacaaagtgaaagagaaggagaaagataaggagaccggccgcgaaacaaaatacccctggaaagaatttctaaaagaggaagaagccgacccttacaagttcaaaattaaggagttcgaggatgtggaccccaaggttaaattaaaggatggcctggttcgcaaggagaaagagaaacacaaggataagaagaaggaccgtgaaaagggcaagaaggacaaagataagcgtgagaaggagaaggtcaaggacaagggacgggaagacaagatgaaagcccctgcacctccgctggtgttacctcccaaggagctcgcgctgcctctcttcagtccggcaactgcatcgagggtgccagctatgctgccgagcttgctacccgtcctgcctgaaaagttgttcgaggagaaagaaaaagtcaaggagaaagagaagaagaaggataaaaaagagaaaaaaaaaaagaaggagaaagaaaaggaaaagaaggagaaggaaagagagaaagaaaagcgcgaacgcgagaagcgtgaaaaagagaaggagaagcacaagcatgaaaagattaaggtggagccagttgcactggctccttccccagtaatcccgaggctgaccttgagggtgggcgccggccaagataagatagtaattagcaaagtggtaccagctcccgaagcaaagccagcaccttcacagaacagacctaaaacacccccaccagcccccgctccagcccccggccccatgttggtttcgcctgcgcccgtgcccctgccactcttagcccaagcagctgcaggccccgccctgctgccttcacctggccccgcagccagtggggcaagcgcaaaagcgcctgtgagatctgttgtcaccgagacagtgtcgacctacgttatccgcgatgaatggggcaatcagatctggatctgtcctggttgcaacaagcccgatgatgggtcacccatgattggatgtgacgactgcgacgactggtaccactggccctgtgtggggatcatgacagctcctccagaggaaatgcaatggttttgcccaaaatgtgctaacaaaaaaaaggataagaagcacaagaaaaggaaacaccgggctcattag

SEQ ID NO: 222291 - DNA, 852 bp, Artificial Sequence
  derived and/or modified sequence
atgtgcgagtcttattcccggagtctcctcagagtctcagtggctcagatatgtcaggccttgggttgggattctgtccagctgagcgcttgccatctacttaccgacgtgttgcagaggtatctgcagcaacttgggaggggctgtcaccgatactccgagttatatggaagaactgatcccatcctggacgacgtgggggaggcatttcagctcatgggcgtgagccttcacgaactcgaagactatattcacaacatcgagcccgtcaccttccctcaccagatcccatcgtttccagtgagcaagaacaatgtgttacagttcccacagcccggcagtaaggacgcagaagaaagaaaagaatacattcccgactatttgcctcccatcgttagctcccaggaggaggaggaggaagagcaggtgcccactgatggcggtacctctgctgaggctatgcaggtcccgctggaggaagatgacgagctggaggaagaagagataattaatgacgagaactttctgggaaagaggccattggacagccctgaagctgaggaacttccggccatgaagcggcctagactgctgagtacaaagggagacaccctagacgtagtgcttctggaagcccgagagcctctgtcctcaatcaacacccagaaaatacccccaatgctctcccccgtgcacgttcaagattcaacagacctggcacccccttcccctgaaccgcctatgctggcccccgtagcaaagtcccagatgcccacagcaaagccactggaaaccaagagctttacacccaagactaagacgaagaagaagaaaaagaagaagaagagttag

SEQ ID NO: 222292 - DNA, 2790 bp, Artificial Sequence
  derived and/or modified sequence
atgtgtgagagctacagccgcagcctgctgcgggtgtctgtggcccagatctgccaggccctgggctgggacagcgtgcagctgagcgcctgccacctgctgacagatgtgctgcagcgctacctgcagcagctgggccggggctgccaccgctacagcgagctgtatggccgcacagaccccatcctggatgatgtgggggaggccttccagctgatgggcgtgtccctgcacgagctggaggactacatccacaacatcgagcctgtgaccttcccccaccagatccccagcttccctgtgtccaagaacaacgtgctgcagttcccccagcccggcagcaaggatgctgaggagaggaaggagtacatcccagactacctgccccccatcgtgagcagccaggaggaggaggaggaggagcaggtgcccacagatggcggcaccagcgctgaggccatgcaggtgcccctggaggaggatgatgagctggaggaggaggagatcatcaatgatgagaacttcctgggcaagaggcccctggacagccctgaggccgaggagctgcctgccatgaagaggccccggctgctgagcaccaagggggacaccctggatgtggtgctgctggaggcccgggagcccctgagcagcatcaacacccagaagatcccccccatgctgagccctgtgcacgtgcaggacagcacagacctggccccacccagccctgagccccccatgctggcccctgtggccaagagccagatgcccacagccaagcccctggagaccaagagcttcacccccaagaccaagaccaagaccagcagccctggccagaagaccaagagccccaagacagcccagagccctgccatggtgggcagccccatccgcagccccaagacagtgtccaaggagaagaagagccctggccgcagcaagagccccaagagccccaagagccccaaggtgaccacccacatcccccagacccctgtgcggcctgagacccccaacagaacaccttctgccaccctgtctgagaagatcagcaaggagaccatccaggtgaagcagatccagaccccaccagatgctgggaagctgaacagcgagaaccagcccaagaaggctgtggtggccgacaagaccatcgaggccagcattgatgctgtgattgcccgggcctgtgccgagcgggagccagacccctttgagttcagcagcggcagcgagagcgagggggacatcttcaccagccccaagaggatcagcggccctgagtgcaccacccccaaggccagcaccagcgccaacaacttcaccaagagcggcagcacccccctgcccctgagcggcggcaccagcagcagtgacaacagctggaccatggatgccagcattgatgaggtggtgaggaaggccaagctgggcacccccagcaacatgccacccaacttcccctacatcagcagccccagcgtgtccccacccaccccagagcccctgcacaaggtgtatgaggagaagaccaagctgcccagctctgtggaggtgaagaagaagctgaagaaggagctgaagaccaagatgaagaagaaggagaagcagagggaccgggagcgggagaaggacaagaacaaggacaagagcaaggagaaggacaaggtgaaggagaaggagaaggacaaggagaccggccgggagaccaagtacccctggaaggagttcctgaaggaggaggaggccgacccctacaagttcaagatcaaggagtttgaagatgtggaccccaaggtgaagctgaaggatggcctggtgaggaaggagaaggagaagcacaaggacaagaagaaggaccgggagaagggcaagaaggacaaggacaagcgggagaaggagaaggtgaaggacaagggccgggaggacaagatgaaggccccagccccacccctggtgctgccccccaaggagctggccctgcccctcttcagccctgccacagccagccgggtgcctgccatgctgcccagcctgctgcctgtgctgcctgagaagctgtttgaggagaaggagaaggtgaaggagaaggagaagaagaaggacaagaaggagaagaagaagaagaaggagaaggagaaggagaagaaggagaaggagcgggagaaggagaagcgggagcgggagaagcgggagaaggagaaggagaagcacaagcatgagaagatcaaggtggagcctgtggccctggcccccagccctgtgatcccccggctgaccctgcgggtgggcgccggccaggacaagatcgtcatcagcaaggtggtgcctgcccctgaggccaagccagcccccagccagaaccggcccaagaccccacctccagccccagccccagcccctggccccatgctggtgtccccagcccctgtgcccctgcccctgctggcccaggccgctgctggccctgccctgctgcccagccctggccctgctgccagcggggccagcgccaaggcccctgtgcgctctgtggtgacagaaacagtgtccacctacgtgatcagagatgagtggggcaaccagatctggatctgccccggctgcaacaagccagatgatggcagccccatgattggctgtgatgactgtgatgactggtaccactggccctgtgtgggcatcatgacagcccctcctgaggagatgcagtggttctgccccaagtgtgccaacaagaagaaggacaagaagcacaagaagaggaagcaccgggcccactag

SEQ ID NO: 222293 - DNA, 852 bp, Artificial Sequence
  derived and/or modified sequence
atgtgtgagagctacagccgcagcctgctgcgggtgtctgtggcccagatctgccaggccctgggctgggacagcgtgcagctgagcgcctgccacctgctgacagatgtgctgcagcgctacctgcagcagctgggccggggctgccaccgctacagcgagctgtatggccgcacagaccccatcctggatgatgtgggggaggccttccagctgatgggcgtgtccctgcacgagctggaggactacatccacaacatcgagcctgtgaccttcccccaccagatccccagcttccctgtgtccaagaacaacgtgctgcagttcccccagcccggcagcaaggatgctgaggagaggaaggagtacatcccagactacctgccccccatcgtgagcagccaggaggaggaggaggaggagcaggtgcccacagatggcggcaccagcgctgaggccatgcaggtgcccctggaggaggatgatgagctggaggaggaggagatcatcaatgatgagaacttcctgggcaagaggcccctggacagccctgaggccgaggagctgcctgccatgaagaggccccggctgctgagcaccaagggggacaccctggatgtggtgctgctggaggcccgggagcccctgagcagcatcaacacccagaagatcccccccatgctgagccctgtgcacgtgcaggacagcacagacctggccccacccagccctgagccccccatgctggcccctgtggccaagagccagatgcccacagccaagcccctggagaccaagagcttcacccccaagaccaagaccaagaagaagaagaagaagaagaagagctag

SEQ ID NO: 222294 - DNA, 2790 bp, Artificial Sequence
  derived and/or modified sequence
atgtgcgagagctacagccggagcctgctgcgggtgagcgtggcccagatctgccaggcgctggggtgggactccgtgcagctctcagcttgccacctactcaccgatgtcctgcagcgatacctccagcagctaggcagggggtgccatcgatactccgaactgtacggtaggaccgaccctattctggacgatgtgggtgaggcgtttcagctaatgggtgtctccctccacgagctggaggattacatccacaacattgaacccgtgacattcccacatcaaattccatccttccccgtgtctaaaaacaacgtcctacagtttccccaaccaggaagcaaggacgccgaggagagaaaggaatatatccccgattatctgccaccgattgtttcgtcccaagaggaggaagaggaggagcaggtgccgacagatggtggcaccagcgcagaggctatgcaagtacccctcgaggaagacgacgagctggaggaggaggagatcatcaacgacgagaactttttgggaaaaagacccctggatagtccggaggcagaggagcttcctgcgatgaagaggcccagactgctgtctacgaaaggggacaccttggacgtggtgctcctggaggcgcgcgagcccttgagtagtataaacacgcagaaaattccccctatgctgtcccccgtgcacgtacaggacagcaccgacctggcaccgccctctccagaaccccccatgctggccccagtagccaagtctcagatgcccactgcaaagcctcttgaaacaaagtcctttacacctaaaaccaagaccaaaacctcttcgccaggacagaaaacaaagagcccgaaaacagcccagtctccagccatggtcggttcacccattcggtctccgaaaactgtatctaaggagaagaagtctcctggccgctcgaagagccccaaaagcccaaagtccccaaaagttaccacacatatcccacaaaccccggtgcgaccagaaacacccaacaggaccccttccgcgaccctttctgaaaagatttccaaggaaactattcaggtgaaacaaatccagactccaccagacgccgggaaattaaatagcgagaaccagcctaaaaaagccgtggtcgctgacaaaactatagaagctagcatagacgcggtcattgctcgcgcgtgcgctgaacgtgagccggacccttttgagttcagttctgggagcgagtcagaaggcgacatttttacaagcccaaagcgtatatccgggcctgaatgcaccacacccaaagcatctacatcagctaacaacttcacgaaaagcggctcaacacccctaccccttagcggcggaacaagttcgagcgataacagctggaccatggacgcctctattgatgaggtggtgcgaaaggcaaagctcggcacaccaagcaatatgccgcccaattttccatacatctcatctccatccgtcagcccacctactcccgaaccccttcataaggtatacgaggagaagaccaaactccccagctcagtggaagtgaagaaaaagttaaaaaaggaactcaagaccaaaatgaagaagaaggaaaagcagcgagacagggagcgtgagaaggacaagaataaggacaagagcaaagaaaaagacaaagtgaaagagaaagagaaggacaaggagacaggtcgagagacaaagtatccctggaaggagttcctgaaggaggaggaggccgatccttataagttcaagatcaaggagttcgaggatgtggaccctaaggtcaagctgaaagatggtttggtgaggaaagaaaaagagaaacacaaggataaaaagaaggaccgggaaaagggaaaaaaggataaggacaagagggagaaggaaaaagtgaaggataagggtcgagaagacaaaatgaaggccccagcgccccccctagtgctgccacctaaggaattggccttgcccctgttttcacccgccactgcatcgcgagtgcccgccatgctgcctagcctgctccctgtccttcccgaaaaactgttcgaggagaaggagaaggtcaaggagaaggagaagaaaaaagataagaaggaaaagaaaaagaaaaaagaaaaggagaaggaaaaaaaggagaaggaaagggagaaagagaaacgggagcgtgagaagagagagaaggaaaaggagaaacacaaacatgaaaaaattaaagttgagcctgtggctctcgcgccgtcccccgtgatccctcgattaacgctgcgggtcggcgccggtcaggacaagatcgtgatcagcaaggtagtacccgcccctgaggccaagcccgccccatcccagaatcgtccaaaaactcccccacccgcacccgctccagcccctggcccaatgcttgtatcccctgcgcccgttcccctgcctttacttgctcaggctgcagcgggccccgcactcctccccagccccggtcctgccgcatccggcgcttccgcaaaagctcctgtgcgcagcgtggtcaccgagacagtgtctacctacgtcataagggacgaatggggaaatcagatctggatctgtcccggttgtaataagccagacgatggctctcctatgataggatgcgacgactgtgacgattggtaccactggccttgtgtgggtattatgactgcccctcctgaggaaatgcagtggttctgtcccaagtgtgccaacaagaagaaggataaaaaacacaagaagcgcaaacaccgtgcccactag

SEQ ID NO: 222295 - DNA, 852 bp, Artificial Sequence
  derived and/or modified sequence
atgtgcgagagctacagccggagcctgctgcgggtgagcgtggcccagatttgccaggcgttgggttgggatagcgtgcagctaagcgcctgccacctcctcacagacgtcctgcaacgctacctccaacagcttgggcggggatgtcatcgatattccgaactgtacggtagaacagaccctatcctcgatgatgttggtgaggcgtttcagttgatgggggtttcattgcacgaactggaagattacattcataacatcgagccggttactttcccacatcagatcccctcctttccggtcagcaaaaacaacgtgctgcagtttccccagccaggctccaaggatgccgaggaacgcaaagaatatatccccgactatctgccccccattgtctcttctcaagaagaagaagaagaagagcaggttcccaccgacggcgggacaagcgcagaggccatgcaggtcccactggaagaggacgacgaactggaggaagaagagattatcaacgatgagaacttcctcggaaagcgccctctcgatagccccgaagccgaagaactcccagcgatgaagaggcctcgactgttgagcacaaagggagacactctggacgtggtcctgctcgaggccagagagcctttatcttccattaacactcagaagattccgcccatgctctcccccgtgcatgtgcaggattctaccgatcttgccccgccctcacccgaacctccaatgttggctcccgttgctaagtcccaaatgcccacagctaagcctctggagaccaagtcttttacacctaagaccaaaactaaaaaaaagaaaaaaaagaagaagtcttag

SEQ ID NO: 222296 - DNA, 2790 bp, Artificial Sequence
  derived and/or modified sequence
atgtgcgaaagctacagccgtagcctcctgagggtgagcgttgcacaaatttgccaggccctcgggtgggattcagtccaactctccgcctgccacctgttaacagacgtactgcaacgctacttacagcaattgggccgtggatgtcaccgctatagcgagctctacggtagaaccgatcctatcctggacgacgtgggcgaggcattccaattgatgggcgtatccctgcacgaattggaagattatattcacaacatcgaacctgtgacctttccgcaccagatcccaagttttcccgtctccaaaaacaatgttcttcagtttccacaacctggcagcaaggatgctgaggaaagaaaagagtacatcccggactacctgcccccaatcgtctccagccaggaagaggaagaggaggagcaggtccctaccgatggaggaactagcgcggaagccatgcaggtcccacttgaggaagacgacgagctggaggaggaagaaatcattaacgatgaaaattttctagggaagcgtccgcttgactcccccgaggcagaggagctcccagccatgaagcgccctagactcctgagcactaagggcgatactctggatgttgtgctgttagaggcaagggaacctttatcttccatcaacacacagaaaattcctcccatgctgtcacctgtgcacgtgcaggatagcactgatctggctccgccaagccccgagccccctatgttggctccggtggctaaatcacagatgccaacggccaaacctctagagaccaaaagcttcacccctaagaccaaaacgaagactagtagtcctggccaaaaaacaaaaagcccaaagacagcccagagccccgctatggtcggctccccgattaggtccccaaagaccgtttcaaaagaaaagaagtccccagggaggtcaaaatctccgaagtccccgaagtctccaaaggtgaccacacacattcctcagaccccagtgcggcctgagacgcctaatagaacgcctagcgcaacgctctctgagaaaatatcgaaggaaaccattcaggtgaagcagattcagaccccgccagacgccggtaaactgaactccgagaaccagccgaagaaggcagtggttgctgacaagaccattgaagcgtccatagacgctgtgatagctagagcttgcgctgagagagagcctgacccttttgagttcagctccgggtcagagtctgaaggggatatcttcacatccccaaagcggatatcaggtcctgaatgtactactcctaaggccagtacatctgccaacaacttcacaaagagcggaagtaccccactccctctttcaggaggaacctcgtctagcgataattcttggaccatggatgcctctatcgatgaagtcgtgcgcaaagcgaagctcggcacgcctagtaatatgcctcctaatttcccctacattagctcacctagcgtgagcccaccaactccggaacccctgcacaaggtgtatgaagaaaaaacaaaacttccctcttccgttgaggttaaaaagaagctcaagaaggaactgaagacaaagatgaagaaaaaggagaaacagagagatcgggaacgcgaaaaagacaagaataaagacaaatccaaggaaaaggataaggtgaaagagaaggaaaaggataaagagactggacgggagacaaaatatccttggaaggaattcctgaaagaggaggaggccgacccctacaaattcaagatcaaggagtttgaagacgtggacccaaaagtgaaactcaaggacggtctggtccggaaagagaaggagaagcacaaggataaaaaaaaggatcgcgagaaaggcaagaaggacaaagacaagagagagaaagagaaggtgaaagataagggcagagaagacaaaatgaaagcaccagcacctcctcttgttcttccaccgaaagagcttgccttaccgcttttcagccctgcaaccgccagcagggtcccagctatgctgccatccttgttacctgtgctgcctgagaagctgttcgaggagaaagaaaaggtcaaggaaaaggaaaaaaagaaggacaagaaggagaaaaagaaaaaaaaggagaaggagaaggaaaagaaggaaaaggagcgtgaaaaagaaaagcgggaaagggaaaagagagagaaggagaaggagaaacacaagcatgagaaaattaaagtcgagccggtggccctcgcaccaagccctgtgattcctcgcctcacgctgagggttggggctgggcaggacaagatcgtcatctcaaaagttgtgcccgctcccgaggccaaacctgctcctagccaaaaccggcctaagacccctccccctgcacctgcccctgcccctggacctatgttggtcagtcctgcacccgtacctctgcctctgctggcccaagccgcagcgggaccagcactgttgccgtctccgggtccagcagctagcggggctagcgctaaggcaccagttaggtcggtggtgaccgaaacggtgagcacctacgtgatccgggacgaatggggaaatcagatatggatctgtcctgggtgcaacaaacccgatgacggttcccccatgatcggttgcgatgattgcgacgactggtaccattggccttgtgtgggaatcatgaccgccccacccgaggaaatgcagtggttttgcccgaaatgcgcaaacaagaaaaaggacaaaaagcataagaaaaggaagcaccgggcacattag

SEQ ID NO: 222297 - DNA, 852 bp, Artificial Sequence
  derived and/or modified sequence
atgtgcgaatcctatagccgaagcctgcttcgcgtatcagtggcccagatctgtcaggcactgggctgggactctgtacagttatccgcatgccatctgctgactgacgtgcttcaacggtacctacagcagcttggcagagggtgtcataggtactcagaactttatggaagaaccgaccccatattggacgatgttggagaagctttccaactcatgggtgtctctctgcacgagctggaagattatatacacaatattgagccagtcaccttcccccaccagataccaagctttccggtctccaaaaataatgtgttacagttcccccagcctggatccaaagatgccgaagagcggaaagaatacattccggactacttgcccccaatcgttagcagtcaagaggaggaggaggaagaacaggtgcccacagatggaggaacatcagccgaggcaatgcaggtgccactggaggaagacgacgagttggaagaagaagagattatcaatgacgaaaacttcctgggtaaaaggccacttgattcgcccgaggccgaagaactcccagccatgaagagacctcggcttctctctaccaagggtgatacacttgacgtggtgctgctcgaagcgagagaacccttatcctctattaacacccagaaaatccccccaatgctatccccagtgcatgttcaggactccaccgatctagcgccaccatcaccagagcctcccatgctcgcgccagtggctaaatcacaaatgccaaccgctaaaccactcgagacgaaaagttttaccccgaaaactaagaccaaaaaaaaaaaaaaaaagaagaagtcctag

SEQ ID NO: 222298 - protein, 259 aa, Artificial Sequence
  derived and/or modified sequence
MNILAPVRRDRVLAELPQCLRKEAALHGHKDFHPRVTCACQEHRTGTVGFKISKVIVVGDLSVGKTCLINRFCKDTFDKNYKATIGVDFEMERFEVLGIPFSLQLWDTAGQERFKCIASTYYRGAQAIIIVFNLNDVASLEHTKQWLADALKENDPSSVLLFLVGSKKDLSTPAQYALMEKDALQVAQEMKAEYWAVSSLTGENVREFFFRVAALTFEANVLAELEKSGARRIGDVVRINSDDSNLYLTASKKKPTCCP

SEQ ID NO: 222299 - protein, 211 aa, Artificial Sequence
  derived and/or modified sequence
MNILAPVRRDRVLAELPQCLRKEAALHGHKDFHPRVTCACQEHRTGTVGFKISKVIVVGDLSVGKTCLINRFCKDTFDKNYKATIGVDFEMERFEVLGIPFSLQLWDTAGQERFKCIASTYYRGAQAIIIVFNLNDVASLEHTKQWLADALKENDPSSVLLFLVGSKKDLSTPAQYALMEKDALQVAQEMKAEYWAVSSLTGENVREFFFR

SEQ ID NO: 222300 - DNA, 780 bp, Artificial Sequence
  derived and/or modified sequence
atgaacattttagcgcctgttagacgggaccgtgtactggccgagctacctcagtgtctaagaaaagaggccgcactgcatggacataaagatttccaccctcgggtgacttgcgcctgtcaggagcaccggacgggcactgtgggctttaaaatttctaaggtcatcgttgtcggcgatctgtcggtcggaaagacttgcctcatcaatcgattctgcaaggatacttttgacaagaactataaggccactatcggtgtcgattttgagatggagcgtttcgaagtgctcggcatccctttctccctgcagttgtgggacaccgcaggccaggaaaggtttaaatgtattgctagcacatattaccggggcgcccaggccatcattattgtgttcaatctgaacgatgtcgcatcactggagcacaccaaacagtggctggccgacgctctaaaggaaaatgacccctcatcggttctcctgtttttggtaggctctaagaaagatctgagcaccccggcccagtacgctttgatggaaaaagatgcccttcaggtagcacaggaaatgaaggccgagtactgggccgtgagctccttgactggcgaaaacgttagggagttcttcttccgcgtggctgccttgaccttcgaagcgaatgtgctagccgaactcgagaaatcaggcgccagaagaattggggatgtcgtacgcatcaactcagatgattctaacttgtacctgactgccagcaagaaaaaacctacctgttgcccatag

SEQ ID NO: 222301 - DNA, 636 bp, Artificial Sequence
  derived and/or modified sequence
atgaacatactcgcaccagtgaggcgagacagggttctggccgagctcccacagtgtctgcgtaaggaggctgcactccacggacataaggacttccaccccagggtcacttgcgcctgtcaggagcaccgtacaggcactgtcggctttaagatcagcaaggtgatagttgttggagacctttcagtcgggaaaacttgcctaatcaaccggttctgcaaggatacattcgacaaaaactacaaggccacgataggcgtcgattttgaaatggagcgctttgaggtgttgggaattccgttctcactccaactgtgggatacggccggtcaggagcgctttaagtgcatcgcgtctacttattatcgaggggctcaagcaatcataatcgtgtttaacttaaacgacgtggccagtctcgagcacacaaagcagtggctggccgatgctctgaaggagaatgatccatcatcggtcttactgttcctggtgggctccaagaaggatcttagtactcccgcccaatacgctctgatggagaaagatgctctccaagtggcacaggagatgaaagccgagtactgggcagtcagttctcttacaggagagaacgtccgcgaattctttttccgctag

SEQ ID NO: 222302 - DNA, 780 bp, Artificial Sequence
  derived and/or modified sequence
atgaatatcctggctcccgttcgccgcgatagggtgctagccgagctgccccagtgcctgaggaaggaagcggcgctccacggacacaaagattttcaccctcgcgtgacatgcgcctgccaggaacaccgcacgggaaccgttggcttcaagatcagcaaggtgatcgtcgtgggggacttgtctgttggaaagacttgcttgatcaacaggttctgcaaggatactttcgataagaactacaaagctacaataggagtagacttcgagatggagcgtttcgaggttctcggcatccctttttcgctgcagctgtgggatactgcggggcaggagagatttaagtgtatcgcttcaacttattaccggggagcccaagccattattatcgtctttaacctgaatgacgtcgcctccctcgagcataccaagcaatggctggcggacgctttgaaagagaacgacccgtcctctgttttgcttttccttgttggctccaagaaagacttatcgaccccagcccagtatgcgctcatggaaaaagacgcgttacaggtggctcaagaaatgaaggctgaatactgggctgtctcgagcctcaccggcgagaacgtgagagagttctttttcagggtggcagccttgacatttgaggccaacgtgctcgctgaactggagaagtctggcgcccggcggattggtgatgtcgtaagaatcaattctgacgatagcaacctctacctgaccgccagcaagaagaaacctacatgctgcccgtag

SEQ ID NO: 222303 - DNA, 636 bp, Artificial Sequence
  derived and/or modified sequence
atgaatattctggctccagtccgtagagatcgggtgctcgctgaattaccccagtgtcttaggaaagaggccgccttgcacggccacaaggacttccatccacgcgtgacctgcgcttgccaggaacatcggacgggcaccgtaggatttaaaatatcaaaggtgatcgtcgttggcgacctgtccgtgggaaagacttgtctcattaaccggttctgtaaggatacgttcgataagaactacaaagccaccataggcgtcgatttcgaaatggagcggttcgaagttctcggtattccattctccctgcagctttgggataccgccggccaggaacgctttaaatgcatcgcttcaacctattaccgtggggcccaagctatcattattgtctttaaccttaacgacgtcgccagtttagagcacacaaaacagtggctggccgacgctttaaaggaaaatgatccctcttctgtgctgctcttccttgtgggcagcaaaaaagatctcagtaccccagcccagtatgcattaatggaaaaagatgccctgcaggtagcgcaggagatgaaagcagagtattgggcagtgtcgagcttgacaggtgagaatgtaagagagttcttcttcagatag

SEQ ID NO: 222304 - DNA, 780 bp, Artificial Sequence
  derived and/or modified sequence
atgaacatcctggcccctgtgcggcgggacagagtgctggccgagctgccccagtgcctgaggaaggaggccgccctgcacggccacaaggacttccacccccgggtgacctgtgcctgccaggagcacaggactggaacagtgggcttcaagatcagcaaggtgattgtggtgggggacctgtctgtgggcaagacctgcctgatcaaccgcttctgcaaggacacctttgacaagaactacaaggccaccatcggcgtggactttgagatggagagatttgaggtgctgggcatccccttcagcctgcagctgtgggacacagctggccaggagcgcttcaagtgcatcgccagcacctactacagaggagcccaggccatcatcatcgtgttcaacctgaatgatgtggccagcctggagcacaccaagcagtggctggctgatgccctgaaggaaaatgaccccagctctgtgctgctcttcctggtgggcagcaagaaggacctgagcaccccagcccagtatgccctgatggagaaggatgccctgcaggtggcccaggagatgaaggccgagtactgggccgtgagcagcctgactggagaaaatgtgcgggagttcttcttccgggtggccgccctgacctttgaggccaacgtgctggccgagctggagaagagcggggccaggagaattggagatgtggtgcgcatcaacagtgatgacagcaacctgtacctgacagccagcaagaagaagcccacctgctgcccctag

SEQ ID NO: 222305 - DNA, 636 bp, Artificial Sequence
  derived and/or modified sequence
atgaacatcctggcccctgtgcggcgggacagagtgctggccgagctgccccagtgcctgaggaaggaggccgccctgcacggccacaaggacttccacccccgggtgacctgtgcctgccaggagcacaggactggaacagtgggcttcaagatcagcaaggtgattgtggtgggggacctgtctgtgggcaagacctgcctgatcaaccgcttctgcaaggacacctttgacaagaactacaaggccaccatcggcgtggactttgagatggagagatttgaggtgctgggcatccccttcagcctgcagctgtgggacacagctggccaggagcgcttcaagtgcatcgccagcacctactacagaggagcccaggccatcatcatcgtgttcaacctgaatgatgtggccagcctggagcacaccaagcagtggctggctgatgccctgaaggaaaatgaccccagctctgtgctgctcttcctggtgggcagcaagaaggacctgagcaccccagcccagtatgccctgatggagaaggatgccctgcaggtggcccaggagatgaaggccgagtactgggccgtgagcagcctgactggagaaaatgtgcgggagttcttcttcagatag

SEQ ID NO: 222306 - DNA, 780 bp, Artificial Sequence
  derived and/or modified sequence
atgaacatcctggcccccgtgcggcgggaccgggtgctggccgagttgccccaatgcttgcgtaaagaagcagcgcttcacggacataaggacttccacccaagggtgacttgcgcctgccaggagcacaggactggcaccgttggattcaagatcagtaaggtgatagtggttggcgacttatcagtaggcaagacttgcctcatcaaccgcttctgcaaagacacattcgataagaactacaaagcgacaatcggcgtcgactttgagatggaacgcttcgaggtactcgggatccccttttctcttcagctgtgggataccgcaggacaggagagattcaagtgcatcgcctctacatattaccggggagcacaggcaatcatcatcgtcttcaacctaaacgatgttgcatccctagaacacactaaacagtggctggctgatgctctcaaagagaatgacccctcctcagtcctgctcttcctcgtgggaagcaaaaaggacctgagtactcccgcccagtatgccctcatggagaaggatgctttgcaggttgcacaggagatgaaagcagaatactgggctgtctcttccctgaccggggaaaacgtgagggaattttttttcagagtagcagctctgacgtttgaggcgaatgtgctagccgagcttgagaaatctggcgctcgtcgaatcggagacgttgtccggatcaactcagacgactctaacctttatctgactgcgtctaagaaaaagccaacgtgctgtccttag

SEQ ID NO: 222307 - DNA, 636 bp, Artificial Sequence
  derived and/or modified sequence
atgaacatcctggcccccgtgcggcgggaccgggtgctggccgagctgccacagtgtctgcgtaaagaagccgcactccatggccacaaggactttcatccccgcgtcacttgtgcctgccaggaacatcggactggaactgtgggttttaagatttcgaaagtgattgtggtcggggacctctctgtaggtaagacttgcctgattaataggttttgcaaagacacgtttgataagaactataaggctaccattggcgttgacttcgagatggagcgctttgaagttctcgggataccatttagccttcagttatgggacacagctggacaagaacgctttaagtgtatagcctcaacttattatcgtggtgcccaggccattatcatcgtcttcaatcttaacgatgtcgcaagcctagagcataccaaacagtggctggccgacgccttgaaagaaaatgacccctcgagcgtgctcttgttcttggttggcagtaaaaaagatctgagcacccctgcccaatacgccttgatggaaaaagatgccctgcaagtagcccaggaaatgaaagctgagtactgggccgtcagtagccttactggggagaatgtgcgcgagttttttttccgttag

SEQ ID NO: 222308 - DNA, 780 bp, Artificial Sequence
  derived and/or modified sequence
atgaacatcctggcccccgtgcggcgggaccgggtgctggccgagcttcctcagtgtttacgcaaggaagcggccctgcacggccataaagactttcaccctagagtgacatgcgcatgtcaggagcaccgcaccggcaccgtcggtttcaaaatcagcaaggtgatcgttgtgggagatctgtcagttggtaagacctgtcttattaatagattctgcaaggacacctttgacaagaattataaggcgactatcggcgtggatttcgaaatggagagattcgaagttctcggaatccccttttctctccagctgtgggatacggctggacaggagaggtttaagtgcatcgcgtccacatactaccggggcgcacaagccatcatcattgtgttcaatctgaatgacgtagcctcactggaacataccaaacagtggctcgccgacgcgttaaaagagaacgacccttcttctgtgttattattccttgtaggctccaaaaaagacttgtccaccccggcccagtatgccctgatggagaaggatgctctccaggtagcccaggagatgaaagctgagtattgggccgtgagtagtctgaccggcgaaaatgttagggaattcttcttcagagtagcggcactgaccttcgaggcaaatgtgctggccgaacttgagaagtccggagcacggcggatcggggatgtggtacgaattaattcagatgactctaacctgtacctaacagcatctaaaaagaaacctacctgctgcccgtag

SEQ ID NO: 222309 - DNA, 636 bp, Artificial Sequence
  derived and/or modified sequence
atgaacatcctggcccccgtgcggcgggaccgggtgctggccgagctgccacagtgccttcgcaaggaggctgctctccacggtcataaagacttccaccctagagtaacctgcgcatgtcaggagcaccgaaccgggacagtggggtttaagatttcaaaagtgatcgtggtaggggacttgagcgtgggaaagacttgtttgattaatcgcttctgcaaggatacatttgataagaattacaaggcaaccataggtgtggattttgaaatggagaggtttgaggttctgggcatcccttttagcctgcagctgtgggataccgctggccaggagcgctttaaatgtatcgcatctacttattacaggggggcccaggccattatcatcgtgtttaacctgaacgacgtggcaagtctcgagcacacaaagcagtggctagccgacgctctgaaggagaatgacccaagtagcgtgctgttatttcttgtaggatcaaagaaagatctgagtaccccggcacagtatgcgctgatggaaaaggacgccctccaggtcgctcaggaaatgaaggcagaatattgggccgtgagcagtctgacaggagaaaacgtgagggagtttttctttagatag

SEQ ID NO: 222310 - DNA, 780 bp, Artificial Sequence
  derived and/or modified sequence
atgaatatactcgcacccgtacgaagggacagggtgttagctgaactgcctcagtgcctgaggaaggaagccgcactgcacggtcacaaagacttccacccacgagtgacctgcgcctgtcaagagcacagaaccggaacagtcggctttaagatatcaaaagtcattgtagtgggagatttgtccgtgggaaagacctgtctgataaatcggttctgtaaggacacatttgacaagaattacaaagccacaatcggggttgactttgaaatggaaagattcgaagtgctgggtatccctttttccttgcaattgtgggacactgcaggacaggagcgattcaaatgtatcgcctccacctactatcggggtgctcaagctattatcatagtgttcaatttaaacgatgttgcgtctctggaacatacaaagcagtggttggccgacgcattgaaggaaaatgacccatcaagcgttctgctgtttttagtcggcagtaagaaggatctgtcgacacccgcacagtacgccttgatggaaaaagatgccttacaagtggcccaggaaatgaaggccgagtactgggctgtgagctccctcactggcgagaatgtgagggagtttttttttcgggttgctgccttgacttttgaagccaatgttctcgctgaactggagaagagcggcgctcgcaggattggcgacgtggtcaggatcaactcagacgatagtaatctgtatcttacagcctcaaagaagaagcccacctgctgcccgtag

SEQ ID NO: 222311 - DNA, 636 bp, Artificial Sequence
  derived and/or modified sequence
atgaacatactggccccagtcagaagagaccgtgtgttagcagaactgcctcagtgcctgcgcaaggaggctgcactccacggccacaaagattttcacccccgagtgacatgcgcctgccaggagcatagaactggaacagtgggctttaaaatttctaaagtgatcgtggtgggcgatctttcagttggtaagacatgtttgattaaccgcttttgtaaagatacatttgacaagaactataaggccactattggagttgacttcgaaatggaaagattcgaggttttaggcattccattcagcctccagctctgggatactgctgggcaggagagattcaaatgtatagcatccacttattacaggggagcacaagctatcatcatagttttcaatctcaacgacgtagcctccctggagcatacgaagcagtggttggccgacgctcttaaggagaacgatcctagcagtgtgctcctcttcttggtgggctccaagaaggacctgagtactcctgctcagtatgccctcatggagaaagatgccctccaggtggcacaagagatgaaagccgagtattgggctgtgtctagcttaactggagagaatgtgcgggagttcttctttagatag

SEQ ID NO: 222312 - DNA, 780 bp, Artificial Sequence
  derived and/or modified sequence
atgaacatactcgcacctgtgcgcagagatagagttctcgctgaactccctcagtgtttaaggaaggaggccgctcttcatggtcacaaggactttcaccctcgagttacttgcgcctgtcaggagcatcgcactgggaccgtggggttcaaaatcagcaaggtcatagtggttggcgacctgagcgtcgggaaaacttgcctgattaatcgcttttgtaaagatacattcgacaaaaattataaggctacaatcggcgttgactttgagatggaacggttcgaagtgctgggcatacctttcagcctgcagctgtgggatacagcaggacaagaacgattcaagtgtattgcaagtacctattacagaggcgctcaagcaattataattgtgtttaaccttaatgacgtagcatctctggagcacacaaaacagtggctggcagatgctttaaaagagaatgacccaagtagcgtcctgctctttcttgtaggtagcaaaaaggacttaagtacacctgctcagtatgcgttgatggagaaggatgctttacaagtggctcaggaaatgaaggctgagtactgggccgtgagttcgcttacaggcgaaaatgtgcgcgagttcttcttccgcgtagctgcactgaccttcgaggctaatgttctggcagaactggagaaaagcggtgccaggcgtattggggacgtggtccggattaactctgatgactcgaatctgtacctgacggcaagcaaaaaaaaacctacctgctgcccatag

SEQ ID NO: 222313 - DNA, 636 bp, Artificial Sequence
  derived and/or modified sequence
atgaatatactggcccctgtgcgcagagaccgcgttctggccgaactgcctcagtgcctgaggaaggaagccgctctgcacggccacaaagatttccaccctcgggtcacctgtgcctgtcaggaacatcggaccggcaccgtggggtttaagatttccaaggttatcgtggtgggcgacctgtctgtgggcaagacgtgcctgattaatcggttctgcaaggatacattcgacaaaaattataaggcgacaatcggagtagacttcgaaatggaaaggttcgaagttcttgggatcccatttagcttacagctgtgggacacggccggacaggagagatttaagtgtatcgctagcacatactatagaggtgcacaagcgatcattatcgtcttcaacctgaatgacgtggcttctctcgagcataccaagcaatggctggccgatgccctgaaagagaacgacccttcttctgtgctcctctttctggttggctcaaaaaaggacctatctactcctgctcagtacgcattgatggagaaggacgctcttcaagtggctcaggagatgaaggcggagtattgggctgtgtccagtcttactggggaaaatgttagagaatttttcttccggtag

SEQ ID NO: 222314 - DNA, 780 bp, Artificial Sequence
  derived and/or modified sequence
atgaacatcctggcccccgtgagaagagacagagtgctggccgagctgccccagtgcctgagaaaggaggccgccctgcacggccacaaggacttccaccccagagtgacctgcgcctgccaggagcacagaaccggcaccgtgggcttcaagatcagcaaggtgatcgtggtgggcgacctgagcgtgggcaagacctgcctgatcaacagattctgcaaggacaccttcgacaagaactacaaggccaccatcggcgtggacttcgagatggagagattcgaggtgctgggcatccccttcagcctgcagctgtgggacaccgccggccaggagagattcaagtgcatcgccagcacctactacagaggcgcccaggccatcatcatcgtgttcaacctgaacgacgtggccagcctggagcacaccaagcagtggctggccgacgccctgaaggagaacgaccccagcagcgtgctgctgttcctggtgggcagcaagaaggacctgagcacccccgcccagtacgccctgatggagaaggacgccctgcaggtggcccaggagatgaaggccgagtactgggccgtgagcagcctgaccggcgagaacgtgagagagttcttcttcagagtggccgccctgaccttcgaggccaacgtgctggccgagctggagaagagcggcgccagaagaatcggcgacgtggtgagaatcaacagcgacgacagcaacctgtacctgaccgccagcaagaagaagcccacctgctgcccctag

SEQ ID NO: 222315 - DNA, 636 bp, Artificial Sequence
  derived and/or modified sequence
atgaacatcctggcccccgtgagaagagacagagtgctggccgagctgccccagtgcctgagaaaggaggccgccctgcacggccacaaggacttccaccccagagtgacctgcgcctgccaggagcacagaaccggcaccgtgggcttcaagatcagcaaggtgatcgtggtgggcgacctgagcgtgggcaagacctgcctgatcaacagattctgcaaggacaccttcgacaagaactacaaggccaccatcggcgtggacttcgagatggagagattcgaggtgctgggcatccccttcagcctgcagctgtgggacaccgccggccaggagagattcaagtgcatcgccagcacctactacagaggcgcccaggccatcatcatcgtgttcaacctgaacgacgtggccagcctggagcacaccaagcagtggctggccgacgccctgaaggagaacgaccccagcagcgtgctgctgttcctggtgggcagcaagaaggacctgagcacccccgcccagtacgccctgatggagaaggacgccctgcaggtggcccaggagatgaaggccgagtactgggccgtgagcagcctgaccggcgagaacgtgagagagttcttcttcagatag

SEQ ID NO: 222316 - protein, 5635 aa, Artificial Sequence
  derived and/or modified sequence
MISWEVVHTVFLFALLYSSLAQDASPQSEIRAEEIPEGASTLAFVFDVTGSMYDDLVQVIEGASKILETSLKRPKRPLFNFALVPFHDPEIGPVTITTDPKKFQYELRELYVQGGGDCPEMSIGAIKIALEISLPGSFIYVFTDARSKDYRLTHEVLQLIQQKQSQVVFVLTGDCDDRTHIGYKVYEEIASTSSGQVFHLDKKQVNEVLKWVEEAVQASKVHLLSTDHLEQAVNTWRIPFDPSLKEVTVSLSGPSPMIEIRNPLGKLIKKGFGLHELLNIHNSAKVVNVKEPEAGMWTVKTSSSGRHSVRITGLSTIDFRAGFSRKPTLDFKKTVSRPVQGIPTYVLLNTSGISTPARIDLLELLSISGSSLKTIPVKYYPHRKPYGIWNISDFVPPNEAFFLKVTGYDKDDYLFQRVSSVSFSSIVPDAPKVTMPEKTPGYYLQPGQIPCSVDSLLPFTLSFVRNGVTLGVDQYLKESASVNLDIAKVTLSDEGFYECIAVSSAGTGRAQTFFDVSEPPPVIQVPNNVTVTPGERAVLTCLIISAVDYNLTWQRNDRDVRLAEPARIRTLANLSLELKSVKFNDAGEYHCMVSSEGGSSAASVFLTVQEPPKVTVMPKNQSFTGGSEVSIMCSATGYPKPKIAWTVNDMFIVGSHRYRMTSDGTLFIKNAAPKDAGIYGCLASNSAGTDKQNSTLRYIEAPKLMVVQSELLVALGDITVMECKTSGIPPPQVKWFKGDLELRPSTFLIIDPLLGLLKIQETQDLDAGDYTCVAINEAGRATGKITLDVGSPPVFIQEPADVSMEIGSNVTLPCYVQGYPEPTIKWRRLDNMPIFSRPFSVSSISQLRTGALFILNLWASDKGTYICEAENQFGKIQSETTVTVTGLVAPLIGISPSVANVIEGQQLTLPCTLLAGNPIPERRWIKNSAMLLQNPYITVRSDGSLHIERVQLQDGGEYTCVASNVAGTNNKTTSVVVHVLPTIQHGQQILSTIEGIPVTLPCKASGNPKPSVIWSKKGELISTSSAKFSAGADGSLYVVSPGGEESGEYVCTATNTAGYAKRKVQLTVYVRPRVFGDQRGLSQDKPVEISVLAGEEVTLPCEVKSLPPPIITWAKETQLISPFSPRHTFLPSGSMKITETRTSDSGMYLCVATNIAGNVTQAVKLNVHVPPKIQRGPKHLKVQVGQRVDIPCNAQGTPLPVITWSKGGSTMLVDGEHHVSNPDGTLSIDQATPSDAGIYTCVATNIAGTDETEITLHVQEPPTVEDLEPPYNTTFQERVANQRIEFPCPAKGTPKPTIKWLHNGRELTGREPGISILEDGTLLVIASVTPYDNGEYICVAVNEAGTTERKYNLKVHVPPVIKDKEQVTNVSVLLNQLTNLFCEVEGTPSPIIMWYKDNVQVTESSTIQTVNNGKILKLFRATPEDAGRYSCKAINIAGTSQKYFNIDVLVPPTIIGTNFPNEVSVVLNRDVALECQVKGTPFPDIHWFKDGKPLFLGDPNVELLDRGQVLHLKNARRNDKGRYQCTVSNAAGKQAKDIKLTIYIPPSIKGGNVTTDISVLINSLIKLECETRGLPMPAITWYKDGQPIMSSSQALYIDKGQYLHIPRAQVSDSATYTCHVANVAGTAEKSFHVDVYVPPMIEGNLATPLNKQVVIAHSLTLECKAAGNPSPILTWLKDGVPVKANDNIRIEAGGKKLEIMSAQEIDRGQYICVATSVAGEKEIKYEVDVLVPPAIEGGDETSYFIVMVNNLLELDCHVTGSPPPTIMWLKDGQLIDERDGFKILLNGRKLVIAQAQVSNTGLYRCMAANTAGDHKKEFEVTVHVPPTIKSSGLSERVVVKYKPVALQCIANGIPNPSITWLKDDQPVNTAQGNLKIQSSGRVLQIAKTLLEDAGRYTCVATNAAGETQQHIQLHVHEPPSLEDAGKMLNETVLVSNPVQLECKAAGNPVPVITWYKDNRLLSGSTSMTFLNRGQIIDIESAQISDAGIYKCVAINSAGATELFYSLQVHVAPSISGSNNMVAVVVNNPVRLECEARGIPAPSLTWLKDGSPVSSFSNGLQVLSGGRILALTSAQISDTGRYTCVAVNAAGEKQRDIDLRVYVPPNIMGEEQNVSVLISQAVELLCQSDAIPPPTLTWLKDGHPLLKKPGLSISENRSVLKIEDAQVQDTGRYTCEATNVAGKTEKNYNVNIWVPPNIGGSDELTQLTVIEGNLISLLCESSGIPPPNLIWKKKGSPVLTDSMGRVRILSGGRQLQISIAEKSDAALYSCVASNVAGTAKKEYNLQVYIRPTITNSGSHPTEIIVTRGKSISLECEVQGIPPPTVTWMKDGHPLIKAKGVEILDEGHILQLKNIHVSDTGRYVCVAVNVAGMTDKKYDLSVHAPPSIIGNHRSPENISVVEKNSVSLTCEASGIPLPSITWFKDGWPVSLSNSVRILSGGRMLRLMQTTMEDAGQYTCVVRNAAGEERKIFGLSVLVPPHIVGENTLEDVKVKEKQSVTLTCEVTGNPVPEITWHKDGQPLQEDEAHHIISGGRFLQITNVQVPHTGRYTCLASSPAGHKSRSFSLNVFVSPTIAGVGSDGNPEDVTVILNSPTSLVCEAYSYPPATITWFKDGTPLESNRNIRILPGGRTLQILNAQEDNAGRYSCVATNEAGEMIKHYEVKVYIPPIINKGDLWGPGLSPKEVKIKVNNTLTLECEAYAIPSASLSWYKDGQPLKSDDHVNIAANGHTLQIKEAQISDTGRYTCVASNIAGEDELDFDVNIQVPPSFQKLWEIGNMLDTGRNGEAKDVIINNPISLYCETNAAPPPTLTWYKDGHPLTSSDKVLILPGGRVLQIPRAKVEDAGRYTCVAVNEAGEDSLQYDVRVLVPPIIKGANSDLPEEVTVLVNKSALIECLSSGSPAPRNSWQKDGQPLLEDDHHKFLSNGRILQILNTQITDIGRYVCVAENTAGSAKKYFNLNVHVPPSVIGPKSENLTVVVNNFISLTCEVSGFPPPDLSWLKNEQPIKLNTNTLIVPGGRTLQIIRAKVSDGGEYTCIAINQAGESKKKFSLTVYVPPSIKDHDSESLSVVNVREGTSVSLECESNAVPPPVITWYKNGRMITESTHVEILADGQMLHIKKAEVSDTGQYVCRAINVAGRDDKNFHLNVYVPPSIEGPEREVIVETISNPVTLTCDATGIPPPTIAWLKNHKRIENSDSLEVRILSGGSKLQIARSQHSDSGNYTCIASNMEGKAQKYYFLSIQVPPSVAGAEIPSDVSVLLGENVELVCNANGIPTPLIQWLKDGKPIASGETERIRVSANGSTLNIYGALTSDTGKYTCVATNPAGEEDRIFNLNVYVTPTIRGNKDEAEKLMTLVDTSINIECRATGTPPPQINWLKNGLPLPLSSHIRLLAAGQVIRIVRAQVSDVAVYTCVASNRAGVDNKHYNLQVFAPPNMDNSMGTEEITVLKGSSTSMACITDGTPAPSMAWLRDGQPLGLDAHLTVSTHGMVLQLLKAETEDSGKYTCIASNEAGEVSKHFILKVLEPPHINGSEEHEEISVIVNNPLELTCIASGIPAPKMTWMKDGRPLPQTDQVQTLGGGEVLRISTAQVEDTGRYTCLASSPAGDDDKEYLVRVHVPPNIAGTDEPRDITVLRNRQVTLECKSDAVPPPVITWLRNGERLQATPRVRILSGGRYLQINNADLGDTANYTCVASNIAGKTTREFILTVNVPPNIKGGPQSLVILLNKSTVLECIAEGVPTPRITWRKDGAVLAGNHARYSILENGFLHIQSAHVTDTGRYLCMATNAAGTDRRRIDLQVHVPPSIAPGPTNMTVIVNVQTTLACEATGIPKPSINWRKNGHLLNVDQNQNSYRLLSSGSLVIISPSVDDTATYECTVTNGAGDDKRTVDLTVQVPPSIADEPTDFLVTKHAPAVITCTASGVPFPSIHWTKNGIRLLPRGDGYRILSSGAIEILATQLNHAGRYTCVARNAAGSAHRHVTLHVHEPPVIQPQPSELHVILNNPILLPCEATGTPSPFITWQKEGINVNTSGRNHAVLPSGGLQISRAVREDAGTYMCVAQNPAGTALGKIKLNVQVPPVISPHLKEYVIAVDKPITLSCEADGLPPPDITWHKDGRAIVESIRQRVLSSGSLQIAFVQPGDAGHYTCMAANVAGSSSTSTKLTVHVPPRIRSTEGHYTVNENSQAILPCVADGIPTPAINWKKDNVLLANLLGKYTAEPYGELILENVVLEDSGFYTCVANNAAGEDTHTVSLTVHVLPTFTELPGDVSLNKGEQLRLSCKATGIPLPKLTWTFNNNIIPAHFDSVNGHSELVIERVSKEDSGTYVCTAENSVGFVKAIGFVYVKEPPVFKGDYPSNWIEPLGGNAILNCEVKGDPTPTIQWNRKGVDIEISHRIRQLGNGSLAIYGTVNEDAGDYTCVATNEAGVVERSMSLTLQSPPIITLEPVETVINAGGKIILNCQATGEPQPTITWSRQGHSISWDDRVNVLSNNSLYIADAQKEDTSEFECVARNLMGSVLVRVPVIVQVHGGFSQWSAWRACSVTCGKGIQKRSRLCNQPLPANGGKPCQGSDLEMRNCQNKPCPVDGSWSEWSLWEECTRSCGRGNQTRTRTCNNPSVQHGGRPCEGNAVEIIMCNIRPCPVHGAWSAWQPWGTCSESCGKGTQTRARLCNNPPPAFGGSYCDGAETQMQVCNERNCPIHGKWATWASWSACSVSCGGGARQRTRGCSDPVPQYGGRKCEGSDVQSDFCNSDPCPTHGNWSPWSGWGTCSRTCNGGQMRRYRTCDNPPPSNGGRACGGPDSQIQRCNTDMCPVDGSWGSWHSWSQCSASCGGGEKTRKRLCDHPVPVKGGRPCPGDTTQVTRCNVQACPGGPQRARGSVIGNINDVEFGIAFLNATITDSPNSDTRIIRAKITNVPRSLGSAMRKIVSILNPIYWTTAKEIGEAVNGFTLTNAVFKRETQVEFATGEILQMSHIARGLDSDGSLLLDIVVSGYVLQLQSPAEVTVKDYTEDYIQTGPGQLYAYSTRLFTIDGISIPYTWNHTVFYDQAQGRMPFLVETLHASSVESDYNQIEETLGFKIHASISKGDRSNQCPSGFTLDSVGPFCADEDECAAGNPCSHSCHNAMGTYYCSCPKGLTIAADGRTCQDIDECALGRHTCHAGQDCDNTIGSYRCVVRCGSGFRRTSDGLSCQDINECQESSPCHQRCFNAIGSFHCGCEPGYQLKGRKCMDVNECRQNVCRPDQHCKNTRGGYKCIDLCPNGMTKAENGTCIDIDECKDGTHQCRYNQICENTRGSYRCVCPRGYRSQGVGRPCMDINECEQVPKPCAHQCSNTPGSFKCICPPGQHLLGDGKSCAGLERLPNYGTQYSSYNLARFSPVRNNYQPQQHYRQYSHLYSSYSEYRNSRTSLSRTRRTIRKTCPEGSEASHDTCVDIDECENTDACQHECKNTFGSYQCICPPGYQLTHNGKTCQDIDECLEQNVHCGPNRMCFNMRGSYQCIDTPCPPNYQRDPVSGFCLKNCPPNDLECALSPYALEYKLVSLPFGIATNQDLIRLVAYTQDGVMHPRTTFLMVDEEQTVPFALRDENLKGVVYTTRPLREAETYRMRVRASSYSANGTIEYQTTFIVYIAVSAYPY

SEQ ID NO: 222317 - DNA, 16908 bp, Artificial Sequence
  derived and/or modified sequence
atgatctcttgggaggtggtgcataccgtgtttctgttcgctctcctgtattccagtctagcccaggatgcctctccacagagtgaaatacgcgccgaagagattcctgaaggcgcttccacactggccttcgtcttcgacgtgactggttccatgtacgacgacctagtgcaagtgatcgaaggagctagcaaaattctcgaaacttccttgaagagaccaaagagaccattattcaatttcgctctggtgccatttcatgatcctgaaattggccctgtgacaattaccaccgatcctaagaagttccagtatgagcttagagagctctatgtacaagggggcggagactgcccagagatgtctattggagctatcaagatcgcactggaaatatctctgccagggtcattcatttatgtctttacagatgcgcggagcaaggactacagacttacccacgaggtgctgcagcttattcaacaaaagcaaagtcaagttgtctttgtgctgactggcgactgtgatgatcggacccacataggatataaggtctatgaagaaatcgctagcaccagttcaggacaggtgtttcacttagataagaaacaggtcaatgaagtccttaaatgggtggaagaggccgtccaggcttcgaaggtacacctgttgtctactgatcacctggagcaggctgtaaacacatggcgcatccccttcgacccatccctgaaggaggtcacagtttctctcagcggccctagtcctatgatcgaaatccggaaccctcttggcaaactgattaaaaagggcttcggcttacacgagctcctgaacattcacaacagcgctaaggtcgtgaatgtcaaagagcccgaggccggcatgtggacagtgaaaacctcgtcatcaggacggcacagcgtgcggattacaggcctgtccactatcgacttccgtgccggtttcagtagaaagcccactctggacttcaagaagacggtgtcaagaccggttcaagggatcccaacctacgtattattaaatacttcggggatctcgacccctgcacggattgatctgctcgagctgctatcaatttccggctccagtctgaagaccattcccgtcaaatattaccctcacagaaaaccttatggcatttggaacatcagcgatttcgtcccgcccaatgaagctttttttcttaaagtcaccggatatgacaaggacgattacctctttcagagagtgtcttccgtgtctttctcatctattgtcccagacgccccgaaggtaactatgcctgaaaagaccccgggatactacctccagcctgggcaaattccttgtagtgtggatagtctccttcctttcactctgtcctttgtccgcaatggcgtaacactgggcgttgaccagtatctgaaagaatccgcctctgtcaatttagatattgccaaggtgactttgagtgatgagggcttctatgagtgcattgcagtctccagcgccggcaccggtagagcacaaactttcttcgacgtatccgaaccaccccctgtcatacaggtgcctaacaatgttacagtgaccccgggcgaaagggctgtgcttacctgcctcattattagcgctgtggattacaacctaacatggcagagaaacgatagggacgtgcggcttgctgagccagcccgcattcggaccctggctaatttatccctggagttgaagtcggtaaagtttaatgatgccggggagtaccactgcatggttagttctgaaggtggatctagcgctgcctctgtcttccttactgttcaggaaccacctaaggtgaccgtgatgccgaaaaaccagtccttcacgggtggtagcgaggtgtcaattatgtgttccgctacaggatatccaaagcccaaaattgcgtggaccgtgaatgatatgttcatcgtcggttcacatagataccgaatgacttccgacggcactctattcatcaagaatgctgcccctaaagatgcggggatctacgggtgcctcgcttccaattctgcaggaacagacaaacagaacagcacacttcgctatattgaggcacctaagctcatggtggttcagtccgagctgctcgtcgctctaggagacataaccgtaatggaatgtaaaacctctggtataccccctcctcaggtgaagtggtttaagggcgacttagaacttaggccaagcaccttcctgattatcgacccgctccttggacttctaaagatccaggagacccaggatctggatgctggtgactatacatgcgtggccataaatgaagccggacgggctacgggtaaaatcactttagacgtgggatccccccccgtgtttatccaagagcctgctgacgtcagcatggagatcgggagtaatgtgaccctcccatgttacgtccagggatatcctgagcctactattaagtggcggcgactggataacatgcctatcttcagcagacctttttctgttagctctatttcacagctccgcacaggcgctctgtttattctaaacctctgggcatccgataagggtacttatatctgcgaggccgaaaaccagtttggtaagatccaaagcgaaactacagtgacggtaacagggctggtggcccccctgatcggaatatcaccttcagttgcgaacgtcatagaaggccagcagttgaccctgccttgtaccctactggctgggaaccccatccctgagcgccggtggattaagaacagcgctatgctgctccagaatccatatataaccgttcgcagcgacggaagtctacatattgaaagagtgcagctgcaggatggcggcgaatatacttgtgtcgcctctaacgtcgccgggaccaacaataagaccacgtccgtggtcgtgcatgtgttgcccaccatccaacatggacagcagatcctgtctaccatcgagggaatcccagtgactctgccctgtaaggctagcggaaaccctaagccatctgtaatatggtcaaagaaaggtgagctcatatcaacctcctcagccaagttctccgccggagcagatgggtccttatatgtggtgtcaccgggaggagaagaaagcggggaatatgtgtgtaccgctactaacactgccggttatgccaagagaaaagtgcagctgactgtctatgtgagaccccgcgtctttggcgatcaaagggggctgtcgcaggataagccagtagagatttcagtacttgctggggaggaggttacactgccttgtgaggtgaagtccctgcctcctcccatcattacttgggccaaagagacccagttgatttctcctttttcaccacgacatacctttctgccaagcggttccatgaagatcactgaaacaagaactagcgactccggtatgtatctgtgtgtcgcaactaacattgccgggaacgtgacacaggccgtcaagttaaatgtgcatgttccccctaagatccagagggggccgaagcacctgaaggtccaggtcggccagcgtgttgatattccctgtaacgcccagggaactccccttccagtaattacctggtccaaaggaggttctactatgctggtcgatggagaacatcatgtgtccaaccctgacggtactctcagcatagaccaggcaacccctagcgatgctggcatctatacatgtgttgccaccaacattgccggcacggacgaaacagagataaccttgcacgtgcaagaaccgcctacagtcgaagaccttgaaccaccctacaatacaacctttcaagaaagggtggccaaccagaggatcgaattcccttgccctgcgaaagggacaccaaagcccaccattaaatggctgcacaatggtagagaactgaccggtagggaaccgggcattagtatccttgaggatgggacactcctcgtgattgccagcgtgactccatacgacaatggcgaatatatttgcgtggccgtcaacgaggctgggaccaccgaacggaagtataatttgaaggttcatgtgcccccagttatcaaggataaagaacaagtgacgaatgttagcgtgctcctgaatcaactgacaaaccttttctgtgaagttgaggggactccaagtcccatcatcatgtggtataaggacaacgtgcaggtgaccgaatccagcaccatccagaccgtaaataacggaaagatactgaagctgtttagggccacccccgaggatgcaggaagatactcttgcaaggcaattaatatcgcaggaacctctcaaaagtatttcaacattgacgtcctcgtgcctcccactatcatcgggactaacttcccaaatgaagtgtcagtagtcctcaatagggatgtcgctctggaatgccaggtcaagggtactccgttcccagatatccattggtttaaggatggtaaacctctattccttggcgaccctaacgtagagctgctagacaggggacaggttttgcacctcaagaacgcaagacgaaacgataagggccggtatcagtgtacagtcagtaatgcagctggtaagcaggccaaggatatcaagctcaccatctacattccgccttctatcaaaggtggtaacgtaaccactgacatcagcgtccttattaactctctgatcaaactggagtgtgagacacgcggactccccatgccagctatcacctggtacaaggacgggcagcccatcatgagttcctctcaggccttgtacattgataaagggcagtatctgcatatcccccgcgcacaggtgtctgattcggccacatacacttgtcatgtggcaaatgtagccggcacggctgagaagtcattccatgtggacgtgtatgttcctcccatgatcgagggaaatcttgccacgcccttgaataaacaagtagttatagctcattccttgacgcttgagtgcaaggcggctgggaacccttctcctattctcacatggttgaaggatggagttcccgttaaggcgaacgacaatataagaattgaagctggaggaaagaagctggagatcatgtctgcccaagagatagatcgggggcaatacatctgtgttgccacctctgtagccggcgaaaaggaaattaaatatgaagtcgatgttctcgtcccccccgctatcgaggggggggacgaaactagctactttatcgtaatggtcaacaacctgctcgaactggattgtcatgtaactggctccccacccccgaccatcatgtggctgaaagacggtcagctgatcgacgaacgggacgggttcaagatcttgttgaatggacggaagctcgttattgcgcaagctcaagtgagcaatacaggcctgtaccgatgtatggctgctaacactgccggagatcataaaaaggaattcgaggttacagtgcacgtgcctcctactattaagtcttccggtttgtccgagagggtggttgtaaagtacaaacctgtggcactgcagtgcatcgctaatggaatccctaacccttctatcacttggctgaaagacgatcaacccgtgaacaccgcacagggaaacctgaagatccagtctagcgggcgtgtcctgcaaatcgcgaaaacattgttagaggacgccgggcggtacacttgcgtagccacaaatgctgctggggagacacaacagcacattcaactgcacgtccatgagccaccctctttggaagacgccggcaagatgctgaacgaaacagtcctcgtctccaaccctgtgcagctagaatgcaaggctgctggcaaccctgtgccggtcatcacttggtacaaggacaataggctcttgagcggatccacttctatgacctttctgaatagagggcagattatcgatattgaatccgcacaaatttctgatgccggcatttataagtgtgtcgctataaacagcgctggcgctactgaactgttctactctcttcaggtacacgtcgcacctagcatttccggctctaataacatggtagctgtggttgtcaacaacccggtgaggcttgagtgcgaagccagaggcatccctgccccgtctcttacttggttgaaggacggttcccccgtgtctagtttctctaacggtctccaagtgctttccggcggcagaatcttggcactgacatccgcacagatcagcgacaccgggagatacacatgtgtggcagtgaatgccgccggtgagaaacagcgggatatcgacttgagagtgtacgtcccaccaaatattatgggcgaagaacagaatgtatccgtgctgatcagtcaggcggttgagctcctgtgtcagagtgacgctatcccaccccccaccctgacttggctgaaggacggtcacccactactcaagaagccgggactcagcatatccgagaacagatctgtgctgaaaatagaggatgctcaggtgcaagatactggcaggtatacctgtgaggctacgaatgttgcgggaaagaccgagaagaattacaacgtcaatatctgggttccgcccaacattggaggctccgacgagctgacgcaactgacagtaattgagggcaacttaatttccctgctgtgtgaatcctccgggatcccgccccccaacctgatctggaagaagaaagggtctcctgtgctcaccgactctatgggtagggttagaatcctatccgggggcagacaactgcaaatctccatcgcggagaagagcgacgccgccctgtactcctgcgttgccagcaacgtagcaggcaccgccaagaaagagtataacttacaagtctatattcgaccgaccatcacaaatagcggaagccacccaacagaaattattgtgacgagaggcaaatccatttcactggagtgtgaagtgcagggtatcccaccaccaactgtgacgtggatgaaggatggccatccattgatcaaagctaagggggtcgagattttggacgagggccacattctgcagctgaaaaacattcacgtctccgacactggccgatatgtttgcgtggcagtgaacgtggcggggatgactgacaagaagtatgatctcagcgtccatgccccacctagcataatcggcaatcacaggtctccagaaaacatctccgtcgtagagaaaaattctgtttctttaacttgtgaggccagcggcattccgttacctagtattacgtggtttaaggatgggtggcctgtctcactttcgaattccgtacgtatcctcagtgggggaagaatgttgcgtctgatgcagaccactatggaggatgccggacaatatacatgcgtggtcagaaatgccgccggggaggagcgcaagatttttggactgtccgtcctagtccctcctcatatcgtgggcgaaaacactcttgaagatgtgaaagtgaaagaaaagcagagcgtgacgcttacgtgtgaggttactggcaatccagtccctgaaatcacatggcataaagacgggcaacctctccaggaggatgaagcccatcacattattagcggtggacggtttctgcaaataaccaacgtacaagtcccccatactggacggtatacctgcctggcctcatcccccgcggggcacaagtcaagaagcttctcgctgaacgtcttcgtgtctcccactattgcaggggtgggctcagacggcaatccagaagacgtgaccgtgatcctgaactctccaacatcgctggtctgcgaggcctattcttacccacctgccactattacctggttcaaagacggtacccccctcgaatctaaccgcaacatccgtatactcccagggggaagaacactgcagatcttgaacgcgcaggaggataatgcgggtcgatactcttgcgttgccactaatgaagccggcgaaatgattaagcactatgaggtgaaggtttatatacctcccattattaacaagggagacctatggggtcctgggttaagtccaaaagaagtcaaaataaaggtcaacaataccctcactctggaatgcgaagcttatgccattccatccgccagcctgagctggtacaaggacggccagccacttaagagcgacgaccacgtgaatattgctgccaatggtcataccctccagatcaaggaggcacagatatctgacactggcagatacacttgcgtcgcaagtaatatcgctggggaggacgagcttgatttcgatgtcaatatacaggtcccaccatcctttcagaaactgtgggagattggaaacatgttggatacgggcagaaatggggaggcaaaagacgttattatcaacaatccaatatctttatattgcgaaactaacgccgcaccgccacctaccctgacctggtataaggacgggcacccactaacatccagtgacaaagttctgatattacctggaggcagggtcctccagattcctcgtgccaaggtggaggacgccgggagatatacctgcgtggctgtgaacgaagccggagaagattctctccagtatgacgtacgtgtcttagtccccccaattataaaaggcgctaattctgatctgccagaagaggtgactgtactggtgaacaagtctgctctcatagagtgcttgagcagcggctccccggctcccaggaacagctggcaaaaggacgggcagcccctcctggaggatgaccaccacaaatttctgagtaatggacgaatcctgcaaatcctgaatacccaaattacagacatcggccgctatgtctgcgtagccgagaacactgctgggtctgctaaaaaatactttaatctaaacgtgcatgtgcctccctctgtaattgggccaaagtccgagaacctcaccgtggtggtgaacaattttatttcactgacttgcgaggtctctggtttcccacctcccgatctgtcgtggcttaagaatgagcaacctataaaacttaatacaaacacactgatagtcccagggggccggactctccagattatcagagcaaaggtgtcagacgggggcgaatacacctgcattgctatcaatcaggccggcgagtctaaaaagaaattctcattaacagtttatgtgcccccttcgatcaaagatcacgacagcgaatccctgagcgtggtaaacgtgcgagaaggcaccagtgtgtccctggagtgtgaatccaacgctgtgcctcctccagttatcacatggtacaaaaacggaaggatgatcaccgaaagcactcatgttgaaatcttggcggatggtcaaatgttgcacatcaagaaggccgaggtatcagacactggccagtacgtttgccgagccattaacgttgcaggccgagacgataaaaattttcatcttaacgtgtacgtgcccccatctatcgaaggccccgagcgcgaggtgattgtggaaaccatctctaatccagttactctgacctgcgatgctaccggaatcccacccccaacaatcgcttggctaaaaaaccataagaggattgaaaatagtgattcactggaggtcagaattctttctggaggttcaaagctccagatcgcaaggtctcagcactcggattccgggaactacacctgcatcgcatctaacatggagggaaaagcccaaaagtactactttctctcaatccaggtgcctcccagcgtggcaggggcagaaatcccctctgatgtaagcgtgctgctaggcgaaaacgtggagttagtgtgcaacgcaaacggcatccctaccccgttaatccagtggctgaaggatggaaaaccgatcgcctcaggcgagaccgaacggattagggtgagcgctaacgggtcaacccttaacatttacggtgcccttacatctgacacagggaagtacacttgtgtcgctacaaatcctgccggagaagaggatcggatctttaaccttaatgtgtacgtcacccctaccatcaggggcaacaaggacgaagcagagaaattgatgaccctggttgatacgtccattaatattgagtgcagggccactggaactccacccccgcagatcaattggctgaagaatgggcttccactgcccttgtcttcccatatcagactcctggctgctggccaggttatccgaattgtacgggcccaggtttccgatgtcgctgtgtatacctgcgtggctagtaatcgcgccggcgtggacaacaagcattacaatttacaggtgttcgccccacccaatatggacaactctatgggtactgaggagatcaccgttttgaaaggctccagcacaagtatggcttgtatcaccgatggaactccagcaccatccatggcatggttgagagatggccagccgctaggcttagacgcccatctcacggtgagcacccacggtatggtcttacaactgctgaaggccgaaacagaggactcgggtaaatacacatgcatcgcaagcaacgaggccggtgaagtgagtaagcatttcatcctaaaagtgcttgaaccaccccacattaatggcagcgaagaacatgaggaaatatctgtgatagtgaataacccactggagctcacctgcattgcctctggtataccagctccaaagatgacctggatgaaagacgggaggcctctgccccaaaccgatcaggttcagactctgggaggaggcgaagtactgagaatatctaccgctcaggttgaagacaccgggagatacacttgccttgccagcagcccggctggagacgatgataaagagtacctcgtgagggtgcatgtgccgcccaatatcgccggcaccgatgaacccagggacatcaccgtattacggaacaggcaggtgacgctcgagtgcaaatctgacgccgtaccaccccccgtaattacttggctccgtaacggcgagcggcttcaggccactcctagagttcgcattctaagcggagggagatatctccagataaacaacgcggacctcggtgacactgctaattacacttgtgtcgcttcaaacattgcgggtaagaccacacgcgaattcatcctgaccgtgaatgtccccccaaacatcaagggtgggcctcaaagcctggtgattctcctaaataagtctacagtcctggaatgtatagcagagggcgtcccaacaccccggattacatggcggaaagatggcgctgtgctggcaggcaatcacgcacggtattctattcttgagaacggatttctccatattcagagcgcccacgttacagacactggtcgctatctctgtatggccaccaacgcagctggcactgatcggcggcggatcgatctacaggtgcatgtgccaccgagtatagccccagggccaaccaatatgactgtaattgtgaacgtccagactaccctggcctgcgaggccaccgggattcccaagcctagcattaactggcgaaagaatgggcacctgctcaacgtcgaccagaaccaaaactcgtaccgactgctttcctctggttctttagtcattatttctccatctgtcgacgatactgcaacttatgaatgtactgtcacaaacggcgccggggacgataaacggactgtggatctgacagtgcaggtccctccgtccattgccgacgaaccaaccgactttctagtaacaaagcacgcaccagccgtgatcacatgtacagcttcaggggtaccctttccgtccatccattggaccaaaaacggaatcagactcctgccacgtggagacggttaccgtatcctctcctcaggtgccatcgaaatcctggccacccagctgaaccacgcaggtagatatacctgtgtcgctcggaatgctgctggtagtgcacaccggcacgtgactttacatgtgcatgagccacccgtgatccagcctcagccctcggaactgcacgttatcctgaacaacccaattctgctgccctgtgaggctacagggaccccatcaccatttattacatggcagaaggagggaatcaatgtaaacacttctggacgaaaccacgcggtgctgccgtcaggcgggctccagatatcccgagccgttcgcgaagacgccggcacgtatatgtgcgtggctcagaatccagccggtacagccctgggtaaaattaaattgaatgttcaggtcccccccgtcatttccccacacttgaaagagtatgtgatagcggtggataagccgatcactctctcttgtgaggcagatggactgcctcccccagacataacttggcacaaagacggcagagccattgtcgaatcaattcgccagcgcgtgctctccagcgggtcattgcaaatcgccttcgttcaacccggtgatgcgggtcactatacctgtatggctgccaacgtggcaggctcctcatctacctccaccaagctcactgtgcacgtgccgccccggataaggtctaccgaggggcattataccgtgaacgaaaacagccaggccattctgccatgcgtggccgacgggatccctactccagccattaactggaagaaagataacgtgctactggctaatttgctaggtaaatacacagccgagccatatggggagctgatcctcgagaatgtggttctggaagactcaggcttttatacctgtgtagccaacaatgccgcaggagaggacacgcatacagtttcactgactgtgcatgtgctgcccacattcacagagctgcctggcgatgtgtccttgaataagggagagcagctaaggttaagctgtaaggccacaggtatcccattgcccaagctgacttggacattcaacaataatattatccctgcccactttgatagcgttaacgggcacagtgaactggttattgaacgtgtgtcaaaggaggactccggtacctacgtgtgcaccgccgagaacagtgtcgggtttgtcaaagccatagggtttgtgtatgtcaaggagccgcccgtgtttaagggagactatccttccaactggatcgaacctctggggggcaatgctatactgaactgcgaagttaaaggcgaccccacccccacaatccagtggaaccggaaaggagtcgatatcgaaatcagccatcgcattaggcagttgggtaatggatctcttgctatatatggtacagtgaatgaagatgctggtgattatacctgcgtggcgactaacgaggcaggcgtggtcgaaaggagcatgtccctaactctacaaagtccccccattatcactcttgagccagtggaaacggtcatcaatgccggcggaaagatcatattgaactgccaggcaaccggcgagccccaacctaccattacctggtctcgtcagggacacagcatcagttgggatgatagagtaaacgtgctgtcaaacaactcactgtatattgccgacgctcagaaggaagataccagtgaattcgagtgcgtcgctagaaatttaatggggagtgttctcgtccgtgtcccagtaatagtgcaggtgcatggcggcttttcccagtggtcagcttggcgcgcttgtagtgtaacatgcgggaagggtattcagaagaggagcaggctgtgcaatcagccactgccggcaaacggggggaagccctgccaaggatccgacctggagatgcgcaactgccagaacaagccgtgccctgtggatggatcatggtccgagtggagtctgtgggaggagtgcactagaagctgtggtaggggaaatcagacgagaacaagaacctgcaacaacccctctgtccagcacggcggccgcccttgtgaagggaatgcagtggagattatcatgtgtaacattaggccatgccctgtccatggcgcttggtctgcatggcagccttggggaacttgcagtgagtcttgtggcaagggcacacagaccagggctaggctatgtaacaacccgcctcctgccttcggaggttcttattgtgatggcgccgagacacagatgcaggtgtgtaatgagcggaactgtccaattcatgggaagtgggccacatgggctagctggagtgcctgcagtgtgtcatgcggcggcggcgcccgtcagagaacccgaggctgcagcgacccggttccgcaatatggaggccgcaaatgtgagggtagtgatgtccagtccgacttctgcaatagtgatccctgtcctacgcacgggaattggtctccctggtccggatgggggacctgttcacggacctgcaacggaggtcagatgcggaggtacagaacgtgcgacaacccccctccctccaacggcggcagggcctgcgggggcccagactcccagatccagcgatgcaatacagatatgtgtcccgtcgatgggtcatgggggtcttggcattcttggtctcagtgctcggctagctgcggaggaggagagaagactcggaagagattgtgtgaccatcctgtgcctgtaaaaggtggccgaccctgccccggcgacacaacccaggtgacccgatgcaacgtacaggcatgtccaggaggacctcagcgcgcccggggaagcgtcattggcaacattaacgatgttgagttcgggatcgcctttcttaacgcgacgattaccgattcccctaattctgacacccgcatcattcgggcaaagattacaaatgttccgcgttctctggggtcagcgatgaggaagatcgtgagcatcctgaacccaatctactggacaacagccaaggagattggcgaagccgttaatggctttacactaacgaatgccgtattcaagagagaaacgcaagtggagttcgctacaggcgaaattttgcaaatgtctcacatcgccagggggctggattctgacggatctctgctgctggacattgtcgtatcagggtatgtccttcaactacagtcgcccgcggaagtgacagtgaaggactatacggaagattacattcagaccgggccaggtcagctatacgcatactcaactaggttgtttactatcgatggaatctcgatcccctacacttggaatcacactgtcttttacgaccaggcacagggtcggatgccctttctggtggagaccctgcatgcaagttccgttgagtccgactataatcagattgaagaaactttaggttttaagattcacgcatcgattagtaaaggagaccggagcaaccagtgcccatcaggatttacgcttgactccgtgggccccttctgcgccgatgaagatgagtgcgccgcaggcaacccttgctctcactcctgtcacaatgcaatgggaacttattactgctcctgtcccaaaggactgactattgccgccgatggtcggacatgtcaggacatcgatgagtgcgctctgggccgccacacgtgtcatgctggacaggattgcgacaacaccattggcagctaccgatgtgtggtgcgctgtgggtctggctttcggaggacctccgatgggctgagctgtcaggacatcaatgaatgccaggaatcaagtccctgtcaccagaggtgcttcaacgccattggctccttccactgcgggtgcgaaccaggttatcaattgaaaggtcgcaaatgtatggacgtcaacgaatgcagacagaacgtgtgtcgccccgatcaacactgcaaaaacacccgtggaggctacaaatgtatcgatctgtgtccaaatgggatgaccaaagcggagaacggtacatgcatcgacatagatgaatgcaaagacggtactcaccagtgtcggtacaaccagatatgcgagaatacaagagggtcataccgatgtgtctgccctcgtggctacaggtcccagggggttggtcgcccttgcatggacataaatgagtgtgagcaagttcctaaaccctgcgcccaccagtgctcgaatactccgggatcgtttaagtgcatctgtcccccaggacagcacctcctgggcgatggtaagtcctgcgcaggcctggagaggttgccaaattatggaacacagtacagcagttataacctcgcccgcttctccccagtccggaataactatcaaccccagcaacactaccgacagtactctcacctgtattcctcctacagtgagtatcgaaacagtagaaccagcctatcccgcactcgcaggaccatacgcaagacttgccccgagggctccgaagcttcacatgacacctgtgttgacatagacgaatgcgagaacaccgacgcctgccagcacgagtgtaaaaatactttcggtagctatcagtgtatttgcccccccggctaccaactaacccacaatggcaaaacttgccaggacatagatgagtgtctggaacagaatgtccactgcggcccgaatagaatgtgctttaacatgcgcggcagctaccagtgtatagataccccatgcccacctaactatcagcgggacccagtgagtgggttttgcctcaaaaactgtcctcccaacgacctggaatgcgctctaagtccatatgcactagagtacaagctggtgtctctgcctttcgggattgccacgaatcaggacctgatccgactagtggcatacacccaagatggcgtcatgcatccacgtactacctttctgatggtggacgaagaacagaccgtgccttttgcattacgggacgaaaatctcaagggtgtggtgtacactacacgcccgctgcgcgaggcagagacctacaggatgcgggtacgcgcttcgtcctactcagccaacggtactattgaataccagaccactttcatcgtgtatatcgccgtgtctgcttacccctattag

SEQ ID NO: 222318 - DNA, 18208 bp, Artificial Sequence
  derived and/or modified sequence
gaagccgcatccagacaaaagctgccgcatccctgccctgcccaacccctggagggattcgagtttggtgcttgtccccgtctgattctcagcgccaaactttttgctagttcagagattccaagagtctgatgagttactctgagaggaaaccctctgcctgttgttgaggaggactgagcacagtgcttaggcgctgagggggaaaaagagggggaaaaaaaagaaaatgatttcctgggaagttgtccatacagtattcctgtttgctcttctttattcttccctagctcaagatgcgagcccccagtcagagatcagagctgaggaaattcccgagggggcctccacgttggcttttgtgtttgatgtgactggttctatgtatgatgatttagttcaggtgattgaaggggcttccaaaattttggagacgtctttgaaaagacctaaaagacctcttttcaactttgcgttggtgcctttccatgatccagaaattggcccagtgacaattaccacagatcccaagaaatttcaatatgaactcagagaactgtatgttcagggtggtggtgattgcccagaaatgagtattggagctataaaaattgccttggaaatttctcttcctggttctttcatctatgttttcactgatgctcggtccaaagattaccggctcacccatgaggtgctgcaacttatccaacagaaacagtcacaagtcgtatttgttctgactggagattgtgatgacaggacccatattggatataaagtctatgaagaaattgcctctacaagttctggtcaagtgttccatctggacaaaaaacaagttaatgaggtattaaaatgggtagaagaagcagtacaggcctccaaagttcaccttttatccacagatcatttggaacaggctgtaaatacttggagaattccttttgatcccagcctgaaagaggtcactgtgtctttgagtgggccttctccaatgattgaaattcgcaatcctttagggaagctgataaaaaagggatttggcctgcatgagctattaaatatccataactctgccaaagtagtgaatgtgaaagagccagaggctggaatgtggacagtgaagacctcaagcagtggaaggcactctgttcgcattactggcctcagtactattgatttccgagctggcttttctcgaaagcccaccctggacttcaaaaaaacagtcagcagaccagtgcaaggaatacctacctatgtactgctcaatacttctggaatttccactccagctagaatagatcttcttgaacttttgagtatctcaggaagttctcttaagactattcctgttaaatattacccacatcgaaaaccttatggcatatggaatatttctgactttgtaccaccaaatgaagctttctttctcaaagtaacaggctatgataaagatgattacctcttccagagagtatcaagtgtttccttttctagtattgtcccagatgctcccaaagttacgatgcctgagaaaaccccaggatactatctgcagccgggccaaattccctgctctgttgacagtcttttgccctttaccttgagctttgtcagaaatggagttacacttggagtagaccagtatttgaaagaatctgccagtgtgaacttagatattgcaaaggtcactttgtctgacgaaggtttctatgaatgcattgctgtcagcagtgcaggtactggacgggcacagacattttttgacgtatcagagccccctccggtcatccaagtgcctaacaatgttacagtcactcctggagagagagcagttttaacatgtctcatcatcagtgcggtggattacaatctaacctggcagaggaatgacagagatgtcagactggcagagccagcgagaattaggaccttggctaatctgtcattggagctaaagagtgtgaaattcaacgatgctggagagtatcattgtatggtttctagtgaaggtggatcatcagccgcttcagttttcctcacagtgcaagaaccacccaaagtcactgtgatgcccaagaatcagtctttcacaggagggtctgaggtctccatcatgtgttctgcaacaggttatcccaaaccaaagattgcctggaccgttaacgatatgtttatcgtgggttcacacaggtataggatgacctcagatggtaccttatttatcaaaaatgcagctcccaaagatgcagggatctatggttgcctagcaagtaattcagctggaacagataaacagaattctactctcagatacattgaagcccctaagttgatggtagttcagagtgagctcttggttgcccttggggatataaccgttatggaatgcaaaacctctggtattcctccacctcaagttaaatggttcaaaggagatcttgagttgaggccctcaacattcctcattattgaccctctcttgggacttttgaagattcaagaaacacaagatctggatgctggcgattatacctgtgtagccatcaatgaggctggaagagcaactggcaagataactctggatgttggctcacctccagttttcatacaagaacctgctgatgtgtctatggaaattggctcaaatgtgacattaccttgttatgttcagggttatccagaaccaacaatcaaatggcgaagattagacaacatgccaattttctcaagacctttttcagttagttccatcagccaactaagaacaggagctctctttattttaaacttatgggcaagtgataaaggaacctatatttgtgaagctgaaaaccagtttggaaagatccagtcagagacaacagtaacagtgaccggacttgttgctccacttattggaatcagcccttcagtggccaatgttattgaaggacagcagcttactttgccctgtactctgttagctggaaatcccattccagaacgtcggtggattaagaattcagctatgttgctccaaaatccttacatcactgtgcgcagtgatgggagcctccatattgaaagagttcagcttcaggatggtggtgaatatacttgtgtggccagtaacgttgctgggaccaataacaaaactacctctgtggttgtgcatgttctgccaaccattcagcatgggcagcagatactcagtacaattgaaggcattccagtaactttaccatgcaaagcaagtggaaatcccaaaccgtctgtcatctggtccaagaaaggagagctgatttcaaccagcagtgctaagttttcagcaggagctgatggtagtctgtatgtggtatcacctggaggagaggagagtggggagtatgtctgcactgccaccaatacagccggctacgccaaaaggaaagtgcagctaacagtctatgtaaggcccagagtgtttggagatcaacgaggactgtcccaggataagcctgttgagatctccgtccttgcaggggaagaggtaacacttccatgtgaagtgaagagcttacctccacccataattacttgggccaaagaaacccagctcatctcaccgttctctccaagacacacattcctcccttctggttcaatgaagatcactgaaacccgcacttcagatagtgggatgtatctttgtgttgccacaaatattgctgggaatgtgactcaggctgtcaaattaaatgtccatgttcctccaaagatacagcgtggacctaaacatctcaaagtccaagttggtcaaagagtggatattccatgtaatgctcaagggactcctcttcctgtaatcacctggtccaaaggtggaagcactatgctggttgatggagagcaccatgttagcaatccagacggaactttaagcatcgaccaagccacgccctcagatgctggcatatatacatgtgttgctactaacatagcaggcactgatgaaacagagataacgctacatgtccaagaaccacccacagtggaagatctagaacctccatataacactactttccaagaaagagtggccaatcaacgcattgaatttccatgtcctgcaaaaggtacccctaaaccaaccatcaaatggttacacaatggtagagagttgacaggcagagagcctggcatttctatcttggaagatggcacattgctggttattgcttctgttacaccctatgacaatggggagtacatctgtgtggcagtcaatgaagctggaaccacagaaagaaaatataacctcaaagtccatgttcctccagtaattaaagataaagaacaagttacaaatgtgtcggtgttgttaaatcagctgaccaatctcttctgtgaagtggaaggcactccatctcccatcattatgtggtataaagataatgtccaggtgactgaaagcagcactattcagactgtgaacaatgggaagatactgaagctcttcagagccactccagaggatgcaggaagatattcctgcaaagcaattaatattgcaggcacttctcagaagtactttaacattgatgtgctagttccacccaccataataggtaccaacttcccaaatgaagtctcagttgtcctcaaccgtgacgtcgcccttgaatgccaggtcaaaggcactccctttcctgatattcattggttcaaagatggcaagcctttatttttgggcgatcctaatgttgaacttctagacagaggacaagtcttacatttaaagaatgcacggagaaatgacaaggggcgctaccaatgtactgtgtctaatgcagctggcaaacaagccaaggatataaaactgactatctatattccacctagtattaaaggaggaaatgtcaccacagacatatcagtattgatcaacagccttattaaactggaatgtgaaacacggggacttccaatgcctgccattacttggtataaggacgggcagccaatcatgtccagctcacaagcactttatattgataaaggacaatatcttcatattcctcgagcacaggtctctgattcagcaacatatacgtgtcatgtagccaatgttgctggaactgctgaaaaatcattccatgtggatgtctatgttcctccaatgattgaaggcaacttggccacgcctttgaataagcaagtagttattgctcattctctgacactggagtgcaaagctgctggaaacccttctcccattctcacctggttgaaagatggtgtacctgtgaaagctaatgacaatatccgcatagaagctggtgggaagaaactcgaaatcatgagtgcccaagaaattgatcgaggacagtacatatgcgtggctaccagtgtggcaggagaaaaggaaatcaaatatgaagttgatgtcttggtgccaccagctatagaaggaggagatgaaacatcttacttcattgtgatggttaataacttactggagctagattgtcatgtgacaggctctcccccaccaactatcatgtggctgaaggatggccagttaattgatgaaagggatggattcaagattttattaaatggacgcaaactggttattgctcaggctcaagtgtcaaacacaggcctttatcggtgcatggcagcaaatactgctggagaccacaagaaggaatttgaagtgactgttcatgttcctccaacaatcaagtcctcaggcctttctgagagagttgtggtaaaatacaagcctgtcgccttgcagtgcatagccaatgggattccaaatccttccattacatggttaaaagatgaccagcctgtgaacactgcccaaggaaaccttaaaatacagtcttctggtcgagttctacaaattgccaaaaccctgttggaagatgctggcagatacacatgtgtggctaccaacgcagctggagaaacacaacagcacattcaactgcatgttcatgaaccacctagtctggaagatgctggaaaaatgctgaatgagactgtgttggtgagcaaccctgtacagctggagtgtaaggcagctggaaatcctgtgcctgttattacatggtacaaagataatcgtctactctcaggttccaccagcatgactttcttgaacagaggacagatcattgatattgaaagtgcccagatctcagatgctggcatatataaatgcgtggccatcaactcagctggagctacagagttattttacagtctgcaagttcatgtggccccatcaatttctggcagcaataacatggtggcagtggtggttaataacccggtgaggttagaatgtgaagccagaggtattcctgccccaagtctgacctggttgaaagatgggagtcctgtttctagtttttctaatggattacaggttctctctggtggtcgaatcctagcattgaccagtgcacaaatcagcgacacaggaaggtacacctgcgtggcagtgaatgctgctggagaaaagcaaagggacattgacctccgagtatatgttccgccaaatattatgggagaagaacagaatgtctctgtcctcattagccaagctgtggaattactatgtcaaagtgatgctattcccccacctactcttacttggttaaaagacggccaccccttgctgaagaaaccaggcctcagtatatctgaaaatagaagtgtgttaaagattgaagatgctcaggttcaagacactggtcgttacacttgtgaagcaacaaatgttgctggaaaaactgaaaaaaactacaatgtcaacatttgggtccccccaaatattggtggttctgatgaacttactcaacttacagtcattgaagggaatctcattagtctgttgtgtgaatcaagtggtattccacccccaaatctcatctggaagaagaaaggctctccagtgctgactgattccatggggcgagttagaattttatctgggggcaggcaattacaaatttcaattgctgaaaagtctgatgcagcactctattcatgtgtggcgtcgaatgttgctgggactgcaaagaaagaatacaatctgcaagtttacattagaccaaccataaccaacagtggcagccaccctactgaaattattgtgacccgagggaagagtatctccttggagtgtgaggtgcagggtattccaccaccaacagtgacctggatgaaagatggccaccccttgatcaaggcaaagggagtagaaatactggatgaaggtcacatccttcagctgaagaacattcatgtatctgacacaggccgttatgtgtgtgttgctgtgaatgtagcaggaatgactgacaaaaaatatgacttaagtgtccatgctcctccaagcatcataggaaaccacaggtcacctgaaaatattagtgtggtagaaaagaactcagtatctttgacttgtgaagcttctggaattcccctgccttccataacctggttcaaagatgggtggcctgtcagccttagcaattctgtgaggattctttcaggaggcaggatgctacggctgatgcagaccacaatggaagatgctggccaatatacttgcgttgtaaggaatgcagctggtgaagaaagaaaaatctttgggctttcagtattagtaccacctcatattgtgggtgaaaatacattggaagatgtgaaggtaaaagagaaacagagtgttacgctgacttgtgaagtgacagggaatccagtgccagaaattacatggcacaaagatgggcagcccctccaagaagatgaagcccatcacattatatctggtggccgttttcttcaaattaccaatgtccaggtgccacacactggaagatatacatgtttggcttccagtccagctggccacaagagcaggagcttcagtcttaatgtatttgtatctcctacaattgctggtgtaggtagtgatggcaaccctgaagatgtcactgtcatccttaacagccctacatctttggtctgtgaagcttattcatatcctccagctaccatcacctggtttaaggatggcactcctttagaatctaaccgaaatattcgtattcttccaggaggcagaactctgcagatcctcaatgcacaggaggacaatgctggaagatactcttgtgtagccacgaatgaggctggagaaatgataaagcactatgaagtgaaggtgtacattccacccataatcaataaaggggacctttgggggccaggtctttcccctaaagaagtgaagatcaaagtaaacaacactctgaccttggaatgtgaagcgtatgcaattccttctgcctccctcagctggtacaaggatggacagccccttaaatccgatgatcatgttaatattgctgcgaatggacacacacttcaaataaaggaggctcaaatatcagacaccggacgatatacttgtgtagcatctaacattgcaggtgaagatgagttggattttgatgtgaatattcaagttcctccaagttttcagaaactctgggaaataggaaacatgctagatactggcaggaatggtgaagccaaagatgtgatcatcaacaatcccatttctctttactgtgagacaaatgctgctccccctcctacactgacatggtacaaagatggccaccctctgacctcaagtgataaagtattgattttgccaggagggcgagtgttgcagattcctcgggctaaagtagaagatgctgggagatacacatgtgtggctgtgaatgaggctggagaagattcccttcaatatgatgtccgtgtactcgtgccgccaattatcaagggagcaaatagtgatctccctgaagaggtcaccgtgctggtgaacaagagtgcactgatagagtgtttatccagtggcagcccagcaccaaggaattcctggcagaaagatggacagcccttgctagaagatgaccatcataaatttctatctaatggacgaattctgcagattctgaatactcaaataacagatatcggcaggtatgtgtgtgttgctgagaacacagctgggagtgccaaaaaatattttaacctcaatgttcatgttcctccaagtgtcattggtcctaaatctgaaaatcttaccgtcgtggtgaacaatttcatctctttgacctgtgaggtctctggttttccacctcctgacctcagctggctcaagaatgaacagcccatcaaactgaacacaaatactctcattgtgcctggtggtcgaactctacagattattcgggccaaggtatcagatggtggtgaatacacttgtatagctatcaatcaagctggcgaaagcaagaaaaagttttccctgactgtttatgtgcccccaagcattaaagaccatgacagtgaatctctttctgtagttaatgtaagagagggaacttctgtgtctttggagtgtgagtcgaacgctgtgccacctccagtcatcacttggtataagaatgggcggatgataacagagtctactcatgtggagattttagctgatggacaaatgctacacattaagaaagctgaggtatctgacacaggccagtatgtatgtagagctataaatgtagcaggacgggatgataaaaatttccacctcaatgtatatgtgccacccagtattgaaggacctgaaagagaagtgattgtggagacgatcagcaatcctgtgacattaacatgtgatgccactgggatcccacctcccacgatagcatggttaaagaaccacaagcgcatagaaaattctgactcactggaagttcgtattttgtctggaggtagcaaactccagattgcccggtctcagcattcagatagtggaaactatacatgtattgcttcaaatatggagggaaaagcccagaaatattactttctttcaattcaagttcctccaagtgttgctggtgctgaaattccaagtgatgtcagtgtccttctaggagaaaatgttgagctggtctgcaatgcaaatggcattcctactccacttattcaatggcttaaagatggaaagcccatagctagtggtgaaacagaaagaatccgagtgagtgcaaatggcagcacattaaacatttatggagctcttacatctgacacggggaaatacacatgtgttgctactaatcccgctggagaagaagaccgaatttttaacttgaatgtctatgttacacctacaattaggggtaataaagatgaagcagagaaactaatgactttagtggatacttcaataaatattgaatgcagagccacagggacgcctccaccacagataaactggctgaagaatggacttcctctgcctctctcctcccatatccggttactggcagcaggacaagttatcaggattgtgagagctcaggtgtctgatgtcgctgtgtatacttgtgtggcctccaacagagctggggtggataataagcattacaatcttcaagtgtttgcaccaccaaatatggacaattcaatggggacagaggaaatcacagttctcaaaggtagttccacctctatggcatgcattactgatggaaccccagctcccagtatggcctggcttagagatggccagcctctggggcttgatgcccatctgacagtcagcacccatggaatggtcctgcagctcctcaaagcagagactgaagattcgggaaagtacacctgcattgcctcaaatgaagctggagaagtcagcaagcactttatcctcaaggtcctagaaccacctcacattaatggatctgaagaacatgaagagatatcagtaattgttaataacccacttgaacttacctgcattgcttctggaatcccagcccctaaaatgacctggatgaaagatggccggccccttccacagacggatcaagtgcaaactctaggaggaggagaggttcttcgaatttctactgctcaggtggaggatacaggaagatatacatgtctggcatccagtcctgcaggagatgatgataaggaatatctagtgagagtgcatgtacctcctaatattgctggaactgatgagccccgggatatcactgtgttacggaacagacaagtgacattggaatgcaagtcagatgcagtgcccccacctgtaattacttggctcagaaatggagaacggttacaggcaacacctcgagtgcgaatcctatctggagggagatacttgcaaatcaacaatgctgacctaggtgatacagccaattatacctgtgttgccagcaacattgcaggaaagactacaagagaatttattctcactgtaaatgttcctccaaacataaaggggggcccccagagccttgtaattcttttaaataagtcaactgtattggaatgcatcgctgaaggtgtgccaactccaaggataacatggagaaaggatggagctgttctagctgggaatcatgcaagatattccatcttggaaaatggattccttcatattcaatcagcacatgtcactgacactggacggtatttgtgtatggccaccaatgctgctggaacagatcgcaggcgaatagatttacaggtccatgttcctccatctattgctccgggtcctaccaacatgactgtaatagtaaatgttcaaactactctggcttgtgaggctactgggataccaaaaccatcaatcaattggagaaaaaatgggcatcttcttaatgtggatcaaaatcagaactcatacaggctcctttcttcaggttcactagtaattatttccccttctgtggatgacactgcaacctatgaatgtactgtgacaaacggtgctggagatgataaaagaactgtggatctcactgtccaagttccaccttccatagctgatgagcctacagatttcctagtaaccaaacatgccccagcagtaattacctgcactgcttcgggagttccatttccctcaattcactggaccaaaaatggtataagactgcttcccaggggagatggctatagaattctgtcctcaggagcaattgaaatacttgccacccaattaaaccatgctggaagatacacttgtgtcgctaggaatgcggctggctctgcacatcgacacgtgacccttcatgttcatgagcctccagtcattcagccccaaccaagtgaactacacgtcattctgaacaatcctattttattaccatgtgaagcaacagggacacccagtcctttcattacttggcaaaaagaaggcatcaatgttaacacttcaggcagaaaccatgcagttcttcctagtggcggcttacagatctccagagctgtccgagaggatgctggcacttacatgtgtgtggcccagaacccggctggtacagccttgggcaaaatcaagttaaatgtccaagttcctccagtcattagccctcatctaaaggaatatgttattgctgtggacaagcccatcacgttatcctgtgaagcagatggcctccctccgcctgacattacatggcataaagatgggcgtgcaattgtggaatctatccgccagcgcgtcctcagctctggctctctgcaaatagcatttgtccagcctggtgatgctggccattacacgtgcatggcagccaatgtagcaggatcaagcagcacaagcaccaagctcaccgtccatgtaccacccaggatcagaagtacagaaggacactacacggtcaatgagaattcacaagccattcttccatgcgtagctgatggaatccccacaccagcaattaactggaaaaaagacaatgttcttttagctaacttgttaggaaaatacactgctgaaccatatggagaactcattttagaaaatgttgtgctggaggattctggcttctatacctgtgttgctaacaatgctgcaggtgaagatacacacactgtcagcctgactgtgcatgttctccccacttttactgaacttcctggagacgtgtcattaaataaaggagaacagctacgattaagctgtaaagctactggtattccattgcccaaattaacatggaccttcaataacaatattattccagcccactttgacagtgtgaatggacacagtgaacttgttattgaaagagtgtcaaaagaggattcaggtacttatgtgtgcaccgcagagaacagcgttggctttgtgaaggcaattggatttgtttatgtgaaagaacctccagtcttcaaaggtgattatccttctaactggattgaaccacttggtgggaatgcaatcctgaattgtgaggtgaaaggagaccccaccccaaccatccagtggaacagaaagggagtggatattgaaattagccacagaatccggcaactgggcaatggctccctggccatctatggcactgttaatgaagatgccggtgactatacatgtgtagctaccaatgaagctggggtggtggagcgcagcatgagtctgactctgcaaagtcctcctattatcactcttgagccagtggaaactgttattaatgctggtggcaaaatcatattgaattgtcaggcaactggagagcctcaaccaaccattacatggtcccgtcaagggcactctatttcctgggatgaccgggttaacgtgttgtccaacaactcattatatattgctgatgctcagaaagaagatacctctgaatttgaatgtgttgctcgaaacttaatgggttctgtccttgtcagagtgccagtcatagtccaggttcatggtggattttcccagtggtctgcatggagagcctgcagtgtcacctgtggaaaaggcatccaaaagaggagtcgtctgtgcaaccagccccttccagccaatggtgggaagccctgccaaggttcagatttggaaatgcgaaactgtcaaaataagccttgtccagtggatggtagctggtcggaatggagtctttgggaagaatgcacaaggagctgtggacgcggcaaccaaaccaggaccaggacttgcaataatccatcagttcagcatggtgggcggccatgtgaagggaatgctgtggaaataattatgtgcaacattaggccttgcccagttcatggagcatggagcgcttggcagccttggggaacatgcagcgaaagttgtgggaaaggtactcagacaagagcaagactttgtaataacccaccaccagcgtttggtgggtcctactgtgatggagcagaaacacagatgcaagtttgcaatgaaagaaattgtccaattcatggcaagtgggcgacttgggccagttggagtgcctgttctgtgtcatgtggaggaggtgccagacagagaacaaggggctgctccgaccctgtgccccagtatggaggaaggaaatgcgaagggagtgatgtccagagtgatttttgcaacagtgacccttgcccaacccatggtaactggagtccttggagtggctggggaacatgcagccggacgtgtaacggagggcagatgcggcggtaccgcacatgtgataaccctcctccctccaatgggggaagagcttgtgggggaccagactcccagatccagaggtgcaacactgacatgtgtcctgtggatggaagttggggaagctggcatagttggagccagtgctctgcctcctgtggaggaggtgaaaagactcggaagcggctgtgcgaccatcctgtgccagttaaaggtggccgtccctgtcccggagacactactcaggtgaccaggtgcaatgtacaagcatgtccaggtgggccccagcgagccagaggaagtgttattggaaatattaatgatgttgaatttggaattgctttccttaatgccacaataactgatagccctaactctgatactagaataatacgtgccaaaattaccaatgtacctcgtagtcttggttcagcaatgagaaagatagtttctattctaaatcccatttattggacaacagcaaaggaaataggagaagcagtcaatggctttaccctcaccaatgcagtcttcaaaagagaaactcaagtggaatttgcaactggagaaatcttgcagatgagtcatattgcccggggcttggattccgatggttctttgctgctagatatcgttgtgagtggctatgtcctacagcttcagtcacctgctgaagtcactgtaaaggattacacagaggactacattcaaacaggtcctgggcagctgtacgcctactcaacccggctgttcaccattgatggcatcagcatcccatacacatggaaccacaccgttttctatgatcaggcacagggaagaatgcctttcttggttgaaacacttcatgcatcctctgtggaatctgactataaccagatagaagagacactgggttttaaaattcatgcttcaatatccaaaggagatcgcagtaatcagtgcccctccgggtttaccttagactcagttggacctttttgtgctgatgaggatgaatgtgcagcagggaatccctgctcccatagctgccacaatgccatggggacttactactgctcctgccctaaaggcctcaccatagctgcagatggaagaacttgtcaagatattgatgagtgtgctttgggtaggcatacctgccacgctggtcaggactgtgacaatacgattggatcttatcgctgtgtggtccgttgtggaagtggctttcgaagaacctctgatgggctgagttgtcaagatattaatgaatgtcaagaatccagcccctgtcaccagcgctgtttcaatgccataggaagtttccattgtggatgtgaacctgggtatcagctcaaaggcagaaaatgcatggatgtgaacgagtgtagacaaaatgtatgcagaccagatcagcactgtaagaacacccgtggtggctataagtgcattgatctttgtccaaatggaatgaccaaggcagaaaatggaacctgtattgatattgatgaatgtaaagatgggacccatcagtgcagatataaccagatatgtgagaatacaagaggcagctatcgttgtgtatgcccaagaggttatcggtctcaaggagttggaagaccctgcatggacattaatgaatgtgaacaagtgcctaaaccttgtgcacatcagtgctccaacacccccggcagcttcaagtgtatctgtccaccaggacaacatttattaggggacgggaaatcttgcgctggattggagaggctgccaaattatggcactcaatacagtagctataaccttgcacggttctcccctgtgagaaacaactatcaacctcaacagcattacagacagtactcacatctctacagctcctactcagagtatagaaacagcagaacatctctctccaggactagaaggactattaggaaaacttgccctgaaggctctgaggcaagccatgacacatgtgtagatattgatgaatgtgaaaatacagatgcctgccagcatgagtgtaagaatacctttggaagttatcagtgcatctgcccacctggctatcaactcacacacaatggaaagacatgccaagatatcgatgaatgtctggagcagaatgtgcactgtggacccaatcgcatgtgcttcaacatgagaggaagctaccagtgcatcgatacaccctgtccacccaactaccaacgggatcctgtttcagggttctgcctcaagaactgtccacccaatgatttggaatgtgccttgagcccatatgccttggaatacaaactcgtctccctcccatttggaatagccaccaatcaagatttaatccggctggttgcatacacacaggatggagtgatgcatcccaggacaactttcctcatggtagatgaggaacagactgttccttttgccttgagggatgaaaacctgaaaggagtggtgtatacaacacgaccactacgagaagcagagacctaccgcatgagggtccgagcctcatcctacagtgccaatgggaccattgaatatcagaccacattcatagtttatatagctgtgtccgcctatccatactaaggaactctccaaagcctattccacatatttaaaccgcattaatcatggcaatcaagcccccttccagattactgtctcttgaacagttgcaatcttggcagcttgaaaatggtgctacactctgttttgtgtgccttccttggtacttctgaggtattttcatgatcccaccatggtcatatcttgaagtatggtctagaaaagtcccttattattttatttattacactggagcagttacttcccaaagattattctgaacatctaacaggacatatcagtgatggtttacagtagtgtagtacctaagatcattttcctgaaagccaaaccaaacaacgaaaaacaagaacaactaattcagaatcaaatagagtttttgagcatttgactatttttagaatcataaaattagttactaagtattttgatcaaagcttataaaataacttacggagatttttgtaagtattgatacattataataggacttgcctattttcatttttaagaagaaaaacaccactcattttataaaatatagtacagctactataaggcttgtttgatcccaaatggtgcttatcttgattgaacattcagaacaaggatattattttcagtgattttgtgagatcagctgaaccacttatgataataataataaaaaagactgctttgccctcacgtcagttgtacatggcatggaactttaaaaattttaatataaactttcatccagttagcttcataacttttacgttccagaattttgtttattttcctgtcaatgaaagcaatttttaaagataccagtgggacagatttggttttttaaaaatctcatgtgttcaaattaacataaatattacacgtcaatacactgtacatggtggtaatagactctaagcaattgccaagatgtattctatttttatgaagtgtatatatattaccttagtgtgcattttctatataatatcttgatggactcttttataaaattattttataaaaaacaatgttacactaaaatcagcctaaataaattttcacaactttttttcataa

SEQ ID NO: 222319 - DNA, 16908 bp, Artificial Sequence
  derived and/or modified sequence
atgatctcctgggaggtggtgcacacagtgttcctgtttgccctgctgtacagcagcctggcccaggatgccagcccccagagcgagatccgggcagaggagatccctgagggcgccagcaccctggcctttgtgtttgatgtgacaggctccatgtatgatgacctggtgcaggtgattgagggcgccagcaagatcctggagaccagcctgaagaggcccaagaggcccctcttcaactttgccctggtgcccttccatgaccctgagatcggccctgtgaccatcaccacagaccccaagaagttccagtatgagctgcgggagctgtatgtgcagggcggcggggactgcccagagatgagcattggagccatcaagatcgccctggagatcagcctgcccggcagcttcatctacgtgttcacagatgcccggagcaaggactaccgcctgacccatgaggtgctgcagctgatccagcagaagcagagccaggtggtgtttgtgctgaccggggactgtgatgacaggacccacatcggctacaaggtgtatgaggagatcgccagcaccagcagcggccaggtgttccacctggacaagaagcaggtgaatgaggtgctgaagtgggtggaggaggccgtgcaggccagcaaggtgcacctgctgagcacagaccacctggagcaggccgtgaacacctggaggatcccctttgaccccagcctgaaggaggtgacagtgtccctgagcggccccagccccatgattgagatccggaaccccctgggcaagctgatcaagaagggcttcggcctgcacgagctgctgaacatccacaacagcgccaaggtggtgaatgtgaaggagcctgaggccggcatgtggacagtgaagaccagcagcagcggccgccacagcgtgcgcatcaccggcctgagcaccatcgacttccgggccggcttcagcaggaagcccaccctggacttcaagaagacagtgtccaggcctgtgcagggcatccccacctacgtgctgctgaacaccagcggcatcagcaccccagccagaattgacctgctggagctgctgagcatcagcggcagcagcctgaagaccatccctgtgaagtactacccccacaggaagccctacggcatctggaacatcagtgactttgtgcccccaaatgaggccttcttcctgaaggtgacaggctatgacaaggatgactacctgttccagagggtgtcctctgtgtccttcagcagcatcgtgcctgatgcccccaaggtgaccatgcctgagaagaccccaggctactacctgcagcccggccagatcccctgcagcgtggacagcctgctgcccttcaccctgagctttgtgagaaatggagtgaccctgggcgtggaccagtacctgaaggagagcgcctctgtgaacctggacatcgccaaggtgaccctgagtgatgagggcttctatgagtgcatcgctgtgagcagcgctggcaccggccgggcccagaccttctttgatgtgtctgagcccccacctgtgatccaggtgcccaacaacgtgacagtgaccccaggagagagagctgtgctgacctgcctgatcatctctgctgtggactacaacctgacctggcagagaaatgacagagatgtgcggctggccgagcccgcccgcatccgcaccctggccaacctgagcctggagctgaagtctgtgaagttcaatgatgctggggagtaccactgcatggtgtcctctgagggcggcagcagcgctgcctctgtgttcctgactgtgcaggagccccccaaggtgacagtgatgcccaagaaccagagcttcaccggcggcagcgaggtgtccatcatgtgcagcgccaccggctaccccaagcccaagatcgcctggacagtgaatgacatgttcatcgtgggcagccaccgctacaggatgaccagtgatggcaccctcttcatcaagaatgctgcccccaaggatgctggcatctacggctgcctggccagcaacagcgctggaacagacaagcagaacagcaccctgcgctacatcgaggcccccaagctgatggtggtgcagagcgagctgctggtggccctgggggacatcaccgtgatggagtgcaagaccagcggcatccccccaccccaggtgaagtggttcaagggggacctggagctgcggcccagcaccttcctgatcatcgaccccctgctgggcctgctgaagatccaggagacccaggacctggatgctggggactacacctgtgtggccatcaatgaggccggccgggccaccgggaagatcaccctggatgtgggcagcccccctgtgttcatccaggagccagcagatgtgtccatggagatcggcagcaatgtgaccctgccctgctacgtgcagggctacccagagcccaccatcaagtggaggcggctggacaacatgcccatcttcagccggcccttctctgtgagcagcatcagccagctgaggactggagccctcttcatcctgaacctgtgggccagtgacaagggcacctacatctgtgaggccgagaaccagtttgggaagatccagagcgagaccaccgtgacagtgacaggcctggtggcccccctcatcggcatcagccccagcgtggccaacgtcatcgagggccagcagctgaccctgccctgcaccctgctggccggcaaccccatccctgagcggcgctggatcaagaacagcgccatgctgctgcagaacccctacatcaccgtgcggagtgatggcagcctgcacatcgagcgggtgcagctgcaggacggcggggagtacacctgtgtggccagcaatgtggccggcaccaacaacaagaccacctctgtggtggtgcacgtgctgcccaccatccagcacggccagcagatcctgagcaccatcgagggcatccctgtgaccctgccctgcaaggccagcggcaaccccaagcccagcgtcatctggagcaagaagggggagctgatcagcaccagcagcgccaagttctctgctggagcagatggcagcctgtatgtggtgtccccaggaggagaggagagcggggagtatgtgtgcacagccaccaacacagctggctacgccaagaggaaggtgcagctgactgtgtatgtgcggccccgggtgtttggagaccagaggggcctgagccaggacaagcctgtggagatctctgtgctggccggggaggaggtgaccctgccctgtgaggtgaagagcctgcccccacccatcatcacctgggccaaggagacccagctgatcagccccttcagccccaggcacaccttcctgcccagcggctccatgaagatcacagagaccaggaccagtgacagcggcatgtacctgtgtgtggccaccaacattgctggaaatgtgacccaggccgtgaagctgaatgtgcacgtgccccccaagatccagaggggccccaagcacctgaaggtgcaggtgggccagagggtggacatcccctgcaatgcccagggcacccccctgcccgtcatcacctggagcaagggcggcagcaccatgctggtggatggagagcaccacgtgagcaacccagatggcaccctgagcattgaccaggccacccccagtgatgctggcatctacacctgtgtggccaccaacattgctggaacagatgaaacagagatcaccctgcacgtgcaggagcccccaacagtggaggacctggagcccccctacaacaccaccttccaggagcgggtggccaaccagagaattgagttcccctgcccagccaagggcacccccaagcccaccatcaagtggctgcacaacggccgggagctgaccggccgggagcccggcatcagcatcctggaggatggcaccctgctggtgattgcctctgtgaccccctatgacaatggagagtacatctgtgtggccgtgaatgaggccggcaccacagagaggaagtacaacctgaaggtgcacgtgccccctgtgatcaaggacaaggagcaggtgaccaacgtgtctgtgctgctgaaccagctgaccaacctcttctgtgaggtggagggcacccccagccccatcatcatgtggtacaaggacaacgtgcaggtgacagagagcagcaccatccagacagtgaacaacgggaagatcctgaagctgttccgggccaccccagaagatgctggccgctacagctgcaaggccatcaacattgctggcaccagccagaagtacttcaacattgatgtgctggtgccccccaccatcatcggcaccaacttccccaatgaggtgtctgtggtgctgaacagagatgtggccctggagtgccaggtgaagggcacccccttcccagacatccactggttcaaggatggcaagcccctcttcctgggggaccccaacgtggagctgctggaccggggccaggtgctgcacctgaagaatgccaggagaaatgacaagggccgctaccagtgcaccgtgtccaatgctgctgggaagcaggccaaggacatcaagctgaccatctacatccccccatccatcaagggcggcaatgtgaccacagacatctctgtgctgatcaacagcctcatcaagctggagtgtgagacccggggcctgcccatgcctgccatcacctggtacaaggatggccagcccatcatgagcagcagccaggccctgtacatcgacaagggccagtacctgcacatcccccgggcccaggtgtctgattctgccacctacacctgccacgtggccaacgtggccggcacagctgagaagagcttccacgtggatgtgtatgtgccccccatgattgagggcaacctggccacccccctgaacaagcaggtggtgattgcccacagcctgaccctggagtgcaaggccgccggcaaccccagccccatcctgacctggctgaaggatggagtgcctgtgaaggccaatgacaacatccgcatcgaggccggcggcaagaagctggagatcatgtctgcccaggagattgaccggggccagtacatctgtgtggccacctctgtggccggggagaaggagatcaagtatgaggtggatgtgctggtgcccccagccattgaaggaggagatgagaccagctacttcatcgtgatggtgaacaacctgctggagctggactgccacgtgacaggcagccccccacccaccatcatgtggctgaaggatggccagctgattgatgaaagagatggcttcaagatcctgctgaatggaaggaagctggtgattgcccaggcccaggtgagcaacacaggcctgtaccgctgcatggccgccaacacagctggggaccacaagaaggagtttgaggtgacagtgcacgtgccccccaccatcaagagcagcggcctgtctgagcgggtggtggtgaagtacaagcctgtggccctgcagtgcatcgccaacggcatccccaaccccagcatcacctggctgaaggatgaccagcctgtgaacacagcccagggcaacctgaagatccagagcagcggccgggtgctgcagatcgccaagaccctgctggaggatgctggccgctacacctgtgtggccaccaatgctgctggggagacccagcagcacatccagctgcacgtgcatgagccccccagcctggaggatgctgggaagatgctgaatgaaacagtgctggtgagcaaccctgtgcagctggagtgcaaggctgctggcaaccctgtgcctgtgatcacctggtacaaggacaaccggctgctgagcggcagcacctccatgaccttcctgaacagaggccagatcatcgacatcgagagcgcccagatcagtgatgctggcatctacaagtgtgtggccatcaacagcgctggggccacagagctgttctacagcctgcaggtgcacgtggcccccagcatcagcggcagcaacaacatggtggccgtggtggtgaacaaccctgtgcggctggagtgtgaggcccggggcatcccagcccccagcctgacctggctgaaggatggcagccctgtgagcagcttcagcaatggcctgcaggtgctgagcggcggccgcatcctggccctgaccagcgcccagatcagtgacaccggccgctacacctgtgtggccgtgaatgctgctggggagaagcagagggacatcgacctgcgggtgtatgtgccccccaacatcatgggagaggagcagaatgtgtctgtgctgatcagccaggccgtggagctgctgtgccagagtgatgccatccccccacccaccctgacctggctgaaggatggccaccccctgctgaagaagccaggcctgagcatcagcgagaacagatctgtgctgaagattgaagatgcccaggtgcaggacaccggccgctacacctgtgaggccaccaacgtggccggcaagacagagaagaactacaacgtgaacatctgggtgccccccaacattggaggcagtgatgagctgacccagctgactgtgattgagggcaacctgatcagcctgctgtgtgagagcagcggcatccccccacccaacctgatctggaagaagaagggcagccctgtgctgacagacagcatgggccgggtgcgcatcctgagcggcggccggcagctgcagatcagcattgctgagaagagtgatgctgccctgtacagctgtgtggccagcaatgtggccggcacagccaagaaggagtacaacctgcaggtgtacatccggcccaccatcaccaacagcggcagccaccccacagagatcatcgtgacccggggcaagagcatcagcctggagtgtgaggtgcagggcatccccccacccaccgtgacctggatgaaggatggccaccccctcatcaaggccaagggcgtggagatcctggatgagggccacatcctgcagctgaagaacatccacgtgtctgacaccggccgctacgtgtgtgtggccgtgaatgtggccggcatgacagacaagaagtatgacctgtctgtgcacgcccctccttccatcatcggcaaccacaggagccctgagaacatctctgtggtggagaagaacagcgtgtccctgacctgtgaggccagcggcatccccctgcccagcatcacctggttcaaggatggctggcctgtgtccctgagcaacagcgtgcgcatcctgagcggcggccgcatgctgcggctgatgcagaccaccatggaggatgctggccagtacacctgtgtggtgagaaatgctgctggggaggagaggaagatcttcggcctgtctgtgctggtgcccccccacatcgtgggggagaacaccctggaggatgtgaaggtgaaggagaagcagagcgtgaccctgacctgtgaggtgacaggcaaccctgtgcctgagatcacctggcacaaggatggccagcccctgcaggaggatgaggcccaccacatcatcagcggcggccgcttcctgcagatcaccaacgtgcaggtgccccacacaggccgctacacctgcctggccagcagccctgctggccacaagagccgctccttcagcctgaatgtgtttgtgagccccaccatcgccggcgtgggcagtgatggcaacccagaagatgtgaccgtcatcctgaacagccccaccagcctggtgtgtgaggcctacagctaccccccagccaccatcacctggttcaaggatggcacccccctggagagcaacagaaacatccgcatcctgcccggcggccgcaccctgcagatcctgaatgcccaggaggacaatgccggccgctacagctgtgtggccaccaatgaggccggggagatgatcaagcactatgaggtgaaggtgtacatcccccccatcatcaacaagggggacctgtggggccctggcctgagccccaaggaggtgaagatcaaggtgaacaacaccctgaccctggagtgtgaggcctatgccatccccagcgccagcctgtcctggtacaaggatggccagcccctgaagagtgatgaccacgtgaacattgctgccaacggccacaccctgcagatcaaggaggcccagatcagtgacaccggccgctacacctgtgtggccagcaacattgctggagaagatgagctggactttgatgtgaacatccaggtgcccccatccttccagaagctgtgggagatcggcaacatgctggacaccggcagaaatggagaggccaaggatgtgatcatcaacaaccccatcagcctgtactgtgagaccaatgctgcccccccacccaccctgacctggtacaaggatggccaccccctgaccagcagtgacaaggtgctgatcctgcccggcggccgggtgctgcagatcccccgggccaaggtggaggatgctggccgctacacctgtgtggccgtgaatgaggccggggaggacagcctgcagtatgatgtgcgggtgctggtgccccccatcatcaagggggccaacagcgacctgcctgaggaggtgacagtgctggtgaacaagagcgccctgattgaatgtctgagcagcggcagccctgcccccagaaattcctggcagaaggatggccagcccctgctggaggatgaccaccacaagttcctgagcaatggccgcatcctgcagatcctgaacacccagatcacagacatcggccgctacgtgtgtgtggccgagaacacagctggcagcgccaagaagtacttcaacctgaatgtgcacgtgcccccatctgtgattggccccaagtctgagaacctgactgtggtggtgaacaacttcatcagcctgacctgtgaggtgtctggcttccccccaccagacctgtcctggctgaagaatgagcagcccatcaagctgaacaccaacaccctgattgtgcctgggggccgcaccctgcagatcatccgggccaaggtgtctgatggaggagagtacacctgcatcgccatcaaccaggccggggagagcaagaagaagttcagcctgactgtgtatgtgcccccatccatcaaggaccatgattctgagagcctgtctgtggtgaatgtgcgggagggcacctctgtgtccctggagtgtgagagcaatgctgtgcccccacctgtgatcacctggtacaagaatggccgcatgatcacagagagcacccacgtggagatcctggctgatggccagatgctgcacatcaagaaggccgaggtgtctgacaccggccagtatgtgtgccgggccatcaacgtggccggcagagatgacaagaacttccacctgaatgtgtatgtgccccccagcattgagggccctgagcgggaggtgattgtggagaccatcagcaaccctgtgaccctgacctgtgatgccaccggcatccccccacccaccatcgcctggctgaagaaccacaagagaattgaaaattctgacagcctggaggtgcgcatcctgagcggcggcagcaagctgcagatcgcccggagccagcacagcgacagcggcaactacacctgcatcgccagcaacatggagggcaaggcccagaagtactacttcctgagcatccaggtgccccccagcgtggccggggctgagatccccagtgatgtgtctgtgctgctgggggagaatgtggagctggtgtgcaatgccaacggcatccccacccccctcatccagtggctgaaggatggcaagcccatcgccagcggggagacagagcgcatccgggtgtctgccaacggcagcaccctgaacatctatggagccctgaccagtgacaccgggaagtacacctgtgtggccaccaacccagctggggaggaggaccgcatcttcaacctgaatgtgtatgtgacccccaccatccggggcaacaaggatgaagctgagaagctgatgaccctggtggacaccagcatcaacattgaatgtcgggccaccggcaccccaccaccccagatcaactggctgaagaatggcctgcccctgcccctgagcagccacatccggctgctggccgccggccaggtgatccgcatcgtgcgggcccaggtgtctgatgtggccgtgtacacctgtgtggccagcaacagagctggggtggacaacaagcactacaacctgcaggtgtttgccccacccaacatggacaacagcatgggcacagaggagatcaccgtgctgaagggcagcagcacctccatggcctgcatcacagatggcaccccagcccccagcatggcctggctgagagatggccagcccctgggcctggatgcccacctgactgtgtccacccacggcatggtgctgcagctgctgaaggccgagacagaagattctgggaagtacacctgcatcgccagcaatgaggccggggaggtgtccaagcacttcatcctgaaggtgctggagcccccccacatcaatggcagcgaggagcacgaggagatctctgtgattgtgaacaaccccctggagctgacctgcatcgccagcggcatcccagcccccaagatgacctggatgaaggatggccggcccctgccccagacagaccaggtgcagaccctgggcggcggggaggtgctgcgcatcagcacagcccaggtggaggacaccggccgctacacctgcctggccagcagccctgctggagatgatgacaaggagtacctggtgcgggtgcacgtgccccccaacattgctggaacagatgagccccgggacatcaccgtgctgaggaaccggcaggtgaccctggagtgcaagagtgatgctgtgcccccacctgtgatcacctggctgagaaatggagagcggctgcaggccaccccccgggtgcgcatcctgagcggcggccgctacctgcagatcaacaatgctgacctgggggacacagccaactacacctgtgtggccagcaacattgctgggaagaccacccgggagttcatcctgactgtgaatgtgccccccaacatcaagggcggcccccagagcctggtgatcctgctgaacaagagcacagtgctggagtgcatcgccgagggcgtgcccaccccccgcatcacctggaggaaggatggagctgtgctggccggcaaccacgcccgctacagcatcctggagaatggcttcctgcacatccagagcgcccacgtgacagacaccggccgctacctgtgcatggccaccaatgctgctggaacagacagaagaagaattgacctgcaggtgcacgtgcccccatccatcgcccctggccccaccaacatgaccgtcatcgtgaatgtgcagaccaccctggcctgtgaggccaccggcatccccaagcccagcatcaactggaggaagaatggccacctgctgaatgtggaccagaaccagaacagctaccgcctgctgagcagcggcagcctggtgatcatcagccccagcgtggatgacacagccacctatgaatgtactgtgaccaacggggctggagatgacaagaggacagtggacctgactgtgcaggtgccccccagcattgctgatgagcccacagacttcctggtgaccaagcacgccccagctgtgatcacctgcacagccagcggcgtgcccttccccagcatccactggaccaagaatggcatccggctgctgcccagaggagatggctaccgcatcctgagcagcggggccatcgagatcctggccacccagctgaaccacgccggccgctacacctgtgtggccagaaatgctgctggcagcgcccacagacatgtgaccctgcacgtgcatgagccccctgtgatccagccccagcccagcgagctgcacgtgatcctgaacaaccccatcctgctgccctgtgaggccaccggcacccccagccccttcatcacctggcagaaggagggcatcaacgtgaacaccagcggcagaaatcatgctgtgctgcccagcggcggcctgcagatcagcagagctgtgagagaagatgctggcacctacatgtgtgtggcccagaacccagctggaacagccctgggcaagatcaagctgaatgtgcaggtgccccctgtgatcagcccccacctgaaggagtatgtgattgctgtggacaagcccatcaccctgagctgtgaggctgatggcctgcccccaccagacatcacctggcacaaggatggccgggccatcgtggagagcatccggcagagggtgctgagcagcggcagcctgcagatcgcctttgtgcagcctggagatgctggccactacacctgcatggccgccaacgtggccggcagcagcagcaccagcaccaagctgactgtgcacgtgcccccacgcatccgcagcacagagggccactacacagtgaatgaaaacagccaggccatcctgccctgtgtggctgatggcatccccaccccagccatcaactggaagaaggacaacgtgctgctggccaacctgctgggcaagtacacagctgagccctatggagagctgatcctggagaatgtggtgctggaggacagcggcttctacacctgtgtggccaacaatgctgctggggaggacacccacacagtgtccctgactgtgcacgtgctgcccaccttcacagagctgcctggagatgtgtccctgaacaagggggagcagctgcggctgagctgcaaggccaccggcatccccctgcccaagctgacctggaccttcaacaacaacatcatcccagcccactttgacagcgtgaatggccacagcgagctggtgattgagcgggtgtccaaagaagattctggcacctacgtgtgcacagcagaaaattctgtgggctttgtgaaggccatcggctttgtgtatgtgaaggagccccctgtgttcaagggggactaccccagcaactggattgagcccctgggcggcaatgccatcctgaactgtgaggtgaagggggaccccacccccaccatccagtggaacaggaagggcgtggacatcgagatcagccaccgcatccggcagctgggcaatggcagcctggccatctatggaacagtgaatgaagatgctggggactacacctgtgtggccaccaatgaagctggggtggtggagaggtccatgagcctgaccctgcagagcccccccatcatcaccctggagcctgtggagaccgtcatcaatgccggcggcaagatcatcctgaactgccaggccaccggggagccccagcccaccatcacctggagccggcagggccacagcatctcctgggatgacagagtgaatgtgctgagcaacaacagcctgtacatcgcagatgcccagaaggaggacaccagcgagtttgaatgtgtggccaggaacctgatgggctctgtgctggtgcgggtgcctgtgattgtgcaggtgcatggaggcttcagccagtggagcgcctggagggcctgcagcgtgacctgtgggaagggcatccagaagaggagccggctgtgcaaccagcccctgcctgccaatggaggcaagccctgccagggcagtgacctggagatgaggaactgccagaacaagccctgccctgtggatggctcctggagcgagtggagcctgtgggaggagtgcaccaggagctgtggccggggcaaccagaccaggaccaggacctgcaacaaccccagcgtgcagcacggcggccggccctgtgagggcaatgctgtggagatcatcatgtgcaacatccggccctgccctgtgcatggagcctggagcgcctggcagccctggggcacctgcagcgagagctgtgggaagggcacccagacccgggcccggctgtgcaacaaccccccaccagcctttggaggcagctactgtgatggagctgagacccagatgcaggtgtgcaatgaaagaaactgccccatccacggcaagtgggccacctgggcctcctggagcgcctgcagcgtgtcctgtggcggcggggcccggcagaggacccggggctgcagcgaccctgtgccccagtatggaggcaggaaatgtgagggcagtgatgtgcagagcgacttctgcaacagcgacccctgccccacccacggcaactggagcccctggagcggctggggcacctgcagcaggacctgcaatggaggccagatgaggcgctaccgcacctgtgacaaccccccacccagcaatggaggccgggcctgtggcggccctgacagccagatccagcgctgcaacacagacatgtgccctgtggatggctcctggggctcctggcacagctggagccagtgcagcgccagctgtggcggcggggagaagaccaggaagaggctgtgtgaccaccctgtgcctgtgaagggcggccggccctgccctggggacaccacccaggtgacccgctgcaatgtgcaggcctgccctgggggcccccagagggcccggggcagcgtcatcggcaacatcaatgatgtggagtttggcatcgccttcctgaatgccaccatcacagacagccccaacagcgacacccgcatcatccgggccaagatcaccaacgtgcccaggagcctgggcagcgccatgaggaagatcgtgtccatcctgaaccccatctactggaccacagccaaggagattggagaggccgtgaatggcttcaccctgaccaatgctgtgttcaagcgggagacccaggtggagtttgccactggagagatcctgcagatgagccacatcgcccggggcctggacagtgatggcagcctgctgctggacatcgtggtgtctggctacgtgctgcagctgcagagccctgctgaggtgacagtgaaggactacacagaggactacatccagacaggccctggccagctgtatgcctacagcaccaggctcttcaccattgatggcatcagcatcccctacacctggaaccacacagtgttctatgaccaggcccagggccgcatgcccttcctggtggagaccctgcacgccagctctgtggagagtgactacaaccagatcgaggagaccctgggcttcaagatccacgccagcatcagcaaaggagacaggagcaaccagtgccccagcggcttcaccctggacagcgtgggccccttctgtgctgatgaagatgaatgtgccgccggcaacccctgcagccacagctgccacaatgccatgggcacctactactgcagctgccccaagggcctgaccatcgccgcagatggccgcacctgccaggacattgatgaatgtgccctgggccgccacacctgccacgccggccaggactgtgacaacaccatcggcagctaccgctgtgtggtgcgctgtggcagcggcttccggaggaccagtgatggcctgagctgccaggacatcaatgaatgccaggagagcagcccctgccaccagcgctgcttcaatgccatcggcagcttccactgcggctgtgagcccggctaccagctgaagggcaggaagtgcatggatgtgaatgaatgtcggcagaatgtgtgcaggccagaccagcactgcaagaacacccggggcggctacaagtgcatcgacctgtgccccaacggcatgaccaaggccgagaatggcacctgcattgatattgatgagtgcaaggatggcacccaccagtgccgctacaaccagatctgtgagaacacccggggcagctaccgctgtgtgtgcccccggggctaccgcagccagggcgtgggccggccctgcatggacatcaatgaatgtgagcaggtgcccaagccctgtgcccaccagtgcagcaacaccccaggcagcttcaagtgcatctgccccccaggccagcacctgctgggagatggcaagagctgtgccggcctggagcggctgcccaactacggcacccagtacagcagctacaacctggcccgcttcagccctgtgaggaacaactaccagccccagcagcactaccggcagtacagccacctgtacagcagctacagcgagtacagaaacagcaggaccagcctgagcaggaccaggaggaccatcaggaagacctgcccagagggcagcgaggccagccatgacacctgtgtggacattgatgaatgtgaaaatacagatgcctgccagcacgagtgcaagaacaccttcggcagctaccagtgcatctgccccccaggctaccagctgacccacaacgggaagacctgccaggacattgatgaatgtctggagcagaatgtgcactgcggccccaacaggatgtgcttcaacatgaggggcagctaccagtgcatcgacaccccctgcccccccaactaccagagggaccctgtgtctggcttctgcctgaagaactgccccccaaatgacctggagtgtgccctgagcccctatgccctggagtacaagctggtgtccctgccctttggaattgccaccaaccaggacctgatccggctggtggcctacacccaggatggagtgatgcaccccaggaccaccttcctgatggtggatgaggagcagacagtgccctttgccctgagagatgagaacctgaagggcgtggtgtacaccacccggcccctgcgggaggccgagacctacaggatgagggtgcgggccagcagctacagcgccaacggcaccatcgagtaccagaccaccttcatcgtgtacatcgctgtgtctgcctacccctactag

SEQ ID NO: 222320 - DNA, 16908 bp, Artificial Sequence
  derived and/or modified sequence
atgatcagctgggaggtggtgcacaccgtgttcctgttcgccctgctgtactctagcctggctcaggatgctagccctcagtctgaaattagagccgaagaaatacccgaaggcgcctctacgctcgccttcgtcttcgatgtgacaggatccatgtatgacgatcttgttcaggtgattgagggtgcctctaagattcttgagacttcactcaaacgtccaaaacgccctttattcaacttcgcgctggtcccctttcatgacccagagatcggcccagtaaccatcactaccgatcctaagaaatttcagtatgaactgagggaactgtacgtccagggtgggggggattgtccagaaatgtcgattggcgccatcaagatagcccttgaaatctcactccccgggagttttatctatgttttcacggatgcccgatccaaggattatcgcctgactcacgaggtgctgcagctgatacaacagaagcaaagccaggtggtcttcgtgttgactggcgactgcgacgataggacccatattggctataaggtttacgaggaaatcgcaagtacctcttcgggacaggtgttccacctggataaaaaacaggtcaatgaagtcctgaaatgggtggaagaagctgtacaggcctctaaggtgcacctattgagcaccgaccacttggaacaggccgtgaacacctggagaataccttttgatcctagcctaaaagaggtgaccgtgagcctctctggtcccagtcccatgatagagatcagaaatccactgggcaagctaataaagaagggctttggcctgcacgagctgcttaacattcacaatagcgcaaaggtcgtgaatgtgaaggagcccgaggccggaatgtggacagttaagaccagctccagtgggagacactccgttcgcatcaccggactgtcaaccatcgatttccgtgcgggattctcacgcaagcctacactagacttcaagaaaacagtaagcagacctgtgcaagggattccaacttatgtgctcctgaacacttctgggatttccacacctgcacggattgacctccttgagctgctatctatttccggctcgagcctgaagacaataccagttaaatattacccccatcgaaagccatacggtatttggaatatcagcgactttgtgccacctaacgaggcattcttcttgaaggtgaccggctatgacaaagacgattatttatttcagcgggtgagctccgtcagcttttcctctatagtgcccgatgcccccaaggttaccatgccggaaaaaactcctggctattacctgcagccaggccagatcccctgtagtgtggattcattgttgccctttacactgagcttcgtgcgcaacggcgtcacgctcggagtggaccagtacttgaaggagtccgctagtgtgaacttggatatcgctaaggtgacactttcggatgaggggttctatgagtgcattgctgtgagcagtgcaggaaccggacgcgctcagactttttttgatgtaagcgagccccctccagtgattcaggtgcccaacaatgtgaccgttacacccggtgaaagagccgtgctcacctgtctcataatttccgctgtcgactataacctcacatggcagcgaaatgaccgggacgtgcggcttgcggaaccggccagaatccgtaccctcgccaacctctccctagagttgaaatcggtgaagttcaatgatgccggcgaataccactgcatggtgagtagcgagggtggcagcagcgcagcaagtgtgtttctgacagtgcaggaacctcctaaggtgactgtgatgccaaaaaatcaatcatttacagggggttctgaggtaagcatcatgtgcagcgccaccggctatcccaagcccaaaatcgcatggactgtgaacgatatgtttatcgtgggctcccaccgctacagaatgacaagcgatggcaccctgtttatcaaaaacgcagcccctaaggacgctgggatatacggctgtctcgccagtaattcagccggcactgataaacaaaacagtacactgcgttatattgaggcgcccaagttaatggtggttcagtctgaactcttggtggctctgggtgatattacagtgatggaatgcaagacctcgggcatccctcccccacaggtaaaatggttcaagggggatctggagctgaggcctagcacctttctcattatcgacccactccttgggctgttgaagattcaagagacccaagatctagacgccggcgattacacatgcgtcgccatcaacgaagccggcagggccaccgggaagatcaccctggacgtgggaagcccccccgtctttatccaagagcctgccgacgtgtcaatggaaattgggagtaatgtgacccttccatgttacgtgcagggatatccagagcccacgataaagtggcgccgacttgataatatgcctatcttctccaggccatttagcgtctcctctatctctcagctgagaacaggtgctctttttatcctaaacctctgggccagtgacaagggaacctacatctgcgaggccgaaaaccagttcggcaaaatccagagcgaaacaaccgtgaccgtcaccgggctcgtggcacccctgatcggcattagccccagtgttgcaaacgttattgaaggacagcaactgaccttgccctgtacacttctggcaggcaaccctattcctgaacgaagatggatcaagaactcggccatgctgctgcaaaatccttacattacagtgaggtctgatggctctttacacatagagagagttcagctacaggacggaggtgaatatacatgtgtagccagcaatgtcgctggcacgaataataaaaccacgagtgtggtagtacacgttctcccaacgatccagcacggacagcaaatcctcagtaccatcgagggtataccagttactctcccgtgtaaggccagcgggaacccaaaaccctccgttatttggagtaaaaagggcgagctgatcagtacctctagcgccaaatttagtgctggtgcagacggtagcctgtatgtcgtgtctcctggtggagaggaaagcggcgagtacgtgtgtaccgcaacaaataccgccggatatgccaagagaaaagtccagctgactgtgtacgtcagacctagagtcttcggagaccagcggggactttctcaggacaagccagtagagatctccgtcctggccggcgaggaggtcaccctgccctgcgaggtcaagtccctgcctccacctattattacctgggccaaggagactcagctgatatcccccttcagccccaggcatacttttttaccgagtggcagcatgaagattacagagactcggacgagcgattctggcatgtatttgtgcgttgcgacaaacattgcaggcaatgtcacacaggcggttaagttgaacgtacatgtgcctccgaaaattcagcgcggtcccaagcatctcaaagtgcaggttggacagcgtgtggatattccctgcaacgcgcaaggaacccctcttcccgtgataacctggagcaaaggagggtccaccatgcttgtggatggggagcatcacgtgtctaacccagatggaaccctctctatcgaccaggctaccccatctgatgctggcatttatacatgtgtagccacgaacattgccggcactgatgagactgagatcacacttcacgtgcaggagcccccgacagtggaagacttggagccaccgtacaacactacgtttcaagagcgtgttgccaatcaacgcatcgaattcccatgtcctgccaagggaactccaaaaccgacgataaagtggctccataacggacgtgaactgaccggtagagagcctgggatctccatacttgaggacggcaccttactggttatagctagcgtgactccatacgacaacggcgaatacatctgcgtagccgttaacgaagcaggaaccaccgagcggaaatacaacctgaaggtgcacgtgccacctgttatcaaagacaaagagcaggtaaccaatgtgtctgtactgctgaatcaactgacaaatcttttttgtgaagtcgaggggacccccagtccaattattatgtggtataaagacaatgtgcaggtcacagagtcctccacgatccagaccgttaacaatggaaaaattctcaagctgtttagagcgactcccgaggatgctgggagatacagttgcaaggccatcaatatcgcgggaacctcccagaagtacttcaacattgacgtgttggttccaccaactatcattggcacgaattttccaaacgaagtctccgtggtcctgaacagggatgtggcactggaatgccaagttaagggcaccccgttcccagatatccactggtttaaggatggtaaacccctattcttgggggatccaaacgtggaacttctggatcgtgggcaggtattacatctgaagaacgcacgaagaaacgataagggacgctaccaatgcaccgtgtctaatgccgccgggaaacaggctaaggacattaagttaacgatttacatcccaccatcgataaaagggggcaatgtgactaccgatatcagcgtattaatcaactccctgataaagcttgaatgtgaaactagggggctgccgatgcctgccatcacttggtacaaggatggacagccaataatgagtagttctcaggccctttacatagacaaaggccaatatctacatattcctcgcgcacaggtctcagacagtgctacgtacacttgccatgtggccaacgtcgccggcacagccgaaaaatctttccatgtcgacgtatatgtcccaccgatgatcgaaggaaaccttgcgacaccattgaataaacaggtggtgatcgcccactcacttactctcgagtgtaaggctgccggaaatccttcaccaatattgacctggttgaaagatggagtaccggttaaagccaacgacaatatacggatcgaagccggcggaaagaaactggagattatgtccgcccaggagattgaccggggtcagtacatttgcgtggccaccagcgtggccggggaaaaggaaattaaatacgaggtggatgtcctcgtgccaccggccattgaagggggcgacgaaacatcctactttattgttatggtgaacaacctacttgaactggattgtcacgtcacaggtagccctcctccaactatcatgtggttgaaggacggccagttaatcgatgagagagacgggtttaagatactccttaacggacgcaagctcgtgatagctcaggctcaagtgagtaacacaggcctttataggtgtatggcggccaacaccgccggcgatcataagaaagaatttgaggtgacagtgcacgtgccccctacaattaaaagttctgggcttagcgaacgtgtggttgtgaaatataaacctgtcgcacttcagtgcatcgccaacggtatcccaaatccttccataacctggctgaaagacgaccagcccgtcaacaccgcacagggcaatctgaaaattcaatcaagtggtagggtgctgcaaatcgctaaaacactgttggaggacgcgggccgatatacttgtgttgcaaccaacgccgccggagagactcagcaacacattcaactgcacgtgcacgagccacccagtctcgaagacgcagggaaaatgttgaatgagacagtacttgtgagtaacccggttcaactggaatgtaaggcagcaggcaatcccgtcccagtgatcacctggtataaggacaaccgactgctcagcggatctaccagcatgacttttcttaataggggccagataatcgatattgaaagcgcacagatttccgatgctggaatatacaagtgtgtcgccattaatagcgccggtgctaccgaactcttctactcactgcaggtgcatgtcgcgcctagcatttcaggctcaaacaacatggtcgcagtggttgtcaacaaccctgtgagacttgaatgtgaggcccggggcatacccgcgcctagtctaacctggttaaaagacggttctccggtcagtagcttttccaatggactccaggtactaagcggaggacggattctggctctcactagtgctcagatttccgataccggcagatatacttgcgtcgccgttaacgctgccggtgaaaagcagagggatatcgacctgcgggtttatgttcctcccaacatcatgggagaggagcaaaacgtaagcgtgctaatcagccaagccgtcgagctgctatgtcagtcagacgctatacccccaccaactctgacatggctgaaggacggccacccacttctgaagaagcctggcttgagcatatctgagaatcgaagtgtcttgaaaattgaagacgcacaggtccaagacacaggtaggtacacgtgtgaagcaaccaacgtcgctgggaagacggagaagaattataatgtcaacatttgggtgcctcctaatattggaggcagcgacgagttaactcagctcactgtcattgaggggaacttgatctccctactttgcgaatcctcaggaattcctcccccaaatcttatctggaagaagaagggaagtcccgtactgactgattccatgggaagagtgaggatcctctctgggggccgccagctgcagataagcatcgcagagaagtcggatgctgccctgtattcgtgtgtggctagcaatgttgctggaacagctaaaaaagagtacaacctgcaggtgtacatccgccccacaatcaccaattcaggcagtcaccccacagagattatcgtgacgcgggggaagagcattagtcttgagtgtgaagtgcagggtatccctccaccaactgtgacatggatgaaagatggccatcctttgataaaggccaaaggcgtggagattctcgatgaggggcacatcttgcagttgaaaaatatccatgtgagtgatactggtcgttatgtgtgcgtagctgtgaacgtcgccgggatgacggataaaaagtacgacctgagtgtccacgccccgccaagtattattggcaatcacagaagtcctgaaaatatttcagtggtggagaaaaactcagtctctctgacatgcgaggcatctgggatccccttacccagtatcacatggttcaaagatgggtggcctgtgagcttatccaatagcgtgagaattctgtctggagggaggatgctccgcctcatgcagactaccatggaagacgcagggcagtatacctgcgtcgtgcggaacgcggccggcgaagagcgcaagatttttgggctctctgtattggtcccaccgcacattgtgggtgagaacacccttgaggacgtgaaggtcaaggagaagcagtctgtaaccctaacttgcgaagtaaccgggaaccccgtccctgagatcacctggcacaaggatggccagcccttgcaggaggacgaggcccaccacatcatctctgggggcagattcctccagattactaacgtccaggtacctcatactggtagatacacatgcttagcctcttcccccgcaggacataagagcaggagctttagtctgaacgttttcgtgtctccaaccattgccggggtagggagtgacggtaaccccgaagacgtcaccgtgattctgaatagcccgacctcacttgtttgcgaggcgtattcttacccccccgctacgattacctggttcaaagatggaacccccctggaatccaataggaatatcaggatcctcccaggtggccggacactgcaaattctcaatgctcaggaggacaatgctggccgctactcctgtgtcgcaaccaatgaggcgggggagatgatcaaacactatgaggtgaaggtgtacatccctcccatcatcaataagggggatttgtggggacccggattaagccccaaagaggttaaaataaaggtgaataatacactgactctagagtgcgaagcctacgctattccctctgcaagcctgtcctggtacaaggacgggcagcccttaaaaagcgacgaccacgtcaacatcgccgctaatggtcataccttgcagatcaaagaagcccagatcagcgacacagggaggtacacctgtgtcgcctccaatatcgccggagaagacgaactcgatttcgatgtgaacatccaggtgcctcccagctttcagaagctttgggaaattggcaacatgctcgataccgggagaaatggtgaagcaaaagatgtcatcatcaacaatcctatttccctgtactgcgagaccaacgcagcccctcccccaactcttacctggtacaaagacggacaccctcttacctcttctgataaagtcctgatcctgcccggggggcgcgtcctgcagatcccacgcgctaaagtcgaagacgcggggagatatacatgcgtggctgtaaatgaagccggcgaggattctctgcagtatgacgtcagggtgttggtgccacctatcataaagggcgccaattccgatctgcccgaggaagtgaccgtcctcgtgaacaaatccgctcttatcgaatgtttgagcagcggctcacctgctccaagaaatagctggcaaaaggacggacagccactgttagaggacgatcaccataagttcctctcgaatggacgcattctacagattctcaatacccagattaccgatattggccggtatgtgtgtgttgcagagaacaccgccggctccgctaaaaaatatttcaatttaaacgtccacgttcccccatcagtgattgggcccaagagcgagaatctgaccgtggtggtaaacaactttatctcccttacatgcgaggtgagtggtttcccccctccggacctgagctggctgaaaaatgagcagcctattaagctgaatacgaacactctaattgtgccgggcggtcgaacactgcagatcatccgcgctaaggtatccgatgggggggaatacacttgcatagcaattaatcaggcgggggaaagtaagaaaaaatttagtctaaccgtctatgtaccaccatctatcaaggaccatgactctgaaagtctaagcgtcgtaaacgtgcgggaggggaccagcgtcagtttggaatgcgaatctaacgcagtgcccccaccagtaattacctggtataaaaatggaaggatgatcacagagtccacacacgtggaaatcctagctgacggtcaaatgcttcacatcaagaaagctgaggtgagcgataccgggcagtacgtttgtagggccatcaacgtggctggcagggacgataagaattttcacctaaatgtgtacgtgccgccatctatcgaagggcccgagcgggaagtgatcgtggaaacaatatccaacccggtgactctgacatgcgacgcgaccggtattccacccccgactattgcctggctcaagaaccataagcggatagaaaattcagacagcctggaagtgagaatcttatctgggggcagtaaactgcagattgcacgtagccagcatagcgacagtggcaattatacatgtatagctagtaacatggaaggaaaggctcaaaagtactattttctctcgatccaggtgccacctagcgtcgctggcgcagaaatcccgtccgatgtgagcgtgctgctgggggaaaatgtcgaactggtctgcaatgctaacgggatcccaactcccctcatccaatggctgaaagacggtaagccgattgctagcggcgaaacggaaagaattcgtgtctcagccaacggctccaccctgaacatctatggagccctgactagcgacacagggaaatatacgtgtgttgctacaaatcccgcaggagaggaggaccgtattttcaatctgaacgtatacgttactcccactatccgggggaacaaggatgaggcggaaaagctaatgaccttggtagacacaagcatcaacattgagtgcagggcaacaggaacgccccctccgcagattaactggctgaagaatggcctgccgctccctctgtcctcccatatccgattactggcggccgggcaagtgattcggatcgtacgagcacaggtgtcagacgttgctgtttatacgtgtgttgcatctaaccgggccggtgtggacaataagcattacaatctacaggtgtttgctcccccgaacatggataactccatgggcacagaagaaatcaccgtgctgaaaggaagctctactagcatggcgtgcattaccgacggcactcccgcaccatctatggcctggctccgagatggacaacctctgggacttgatgcccacctgacggtgtcaacccacgggatggttctacaactgttgaaggccgagaccgaggactcagggaaatacacctgtatagccagcaatgaggctggggaagtgtccaagcatttcatattgaaggttctcgagccaccgcatataaatggtagcgaagaacacgaagagattagtgtcattgtgaacaaccccctggagttgacctgtattgcctcagggatccccgcgcctaaaatgacgtggatgaaggacggacgccccctcccccagaccgaccaggtgcagactcttggagggggtgaggtgttacgcatatcaactgctcaggtggaggacactggaaggtacacatgcctggcttcatcacccgccggcgatgacgacaaagaatatctcgtccgtgtacatgtgccccctaatattgctggtactgacgagcccagagacatcacagtgcttaggaacagacaggtaaccctcgagtgtaagagcgatgcggtgcccccccccgtgataacttggcttagaaatggcgagagactacaggcaaccccgagagtgaggattctttcaggtgggcgatatctgcagataaacaatgccgacctgggagataccgccaactatacctgcgttgcttcgaatatcgccgggaaaacaacgagggagtttatcttgacagtgaatgttccccccaatatcaaaggcgggcctcagtctttggttattttgctgaacaaatcaaccgtcctcgaatgcattgcagaaggggtcccaacacctaggattacttggaggaaagatggcgccgttctggccggaaaccacgcgcggtatagtatcttggaaaacgggttccttcacatccagtcagcccacgttacagacacaggccgatacctctgcatggcaacgaatgctgctgggactgatcgtaggcggattgatctgcaagttcacgtgccaccctcaatcgccccgggccccacaaacatgaccgtgatcgtgaatgtgcaaacaacactcgcctgcgaagctacaggcattcccaagccctccatcaattggaggaagaacggacaccttctgaacgtggaccagaaccaaaatagctatagactcctgagttcagggtcacttgtgatcatttcccccagtgttgacgacaccgctacctacgaatgtacagtgaccaatggcgccggggacgacaaacggaccgtcgaccttaccgttcaagttccacctagtattgccgacgagcctaccgattttctggtgacaaagcacgcacccgccgtgatcacctgcactgctagcggagtgccctttcctagcatccattggacaaagaatggcatacgcttgctgccccgcggcgatggatacaggatcctttcaagcggggctattgagattcttgccacacagttgaatcacgctggaaggtatacgtgcgtggctcgtaatgcagccgggagcgcccaccgacacgttacgcttcatgtccatgagcccccggtcattcagccacaaccctcagaactgcatgtcatcttgaataaccctattctcctcccttgtgaggccactgggaccccatccccattcatcacttggcaaaaggaaggaatcaatgtcaacaccagcggacgaaaccatgccgtgttgccctctggtggcctgcagatctcccgggcagtgagggaagatgctggcacgtatatgtgtgttgcccaaaatccggcgggaaccgccctgggtaaaatcaaactgaacgtccaggtaccaccagtcatctccccacatctcaaggaatatgtgatagctgtggataaacccatcacgctcagttgtgaggctgatggccttcctccacctgacatcacttggcacaaggatggtcgggccattgtggaatccattaggcagcgagtcctgagctctggaagccttcaaatcgcgttcgtgcagcccggcgacgcaggacactacacatgtatggctgccaatgtcgccggatcatccagcacaagcactaaactcactgttcatgtcccacccagaatcaggagcacagagggccattatacggtgaacgagaacagtcaggcaattctgccctgtgttgccgacgggatacctacaccagcaataaactggaaaaaggacaacgtactgctggccaatctactaggtaagtatactgctgagccatacggagagctcattctggagaacgtagtgctggaagactccggcttctatacctgtgtggcaaataatgcagctggtgaggacacacacacagtgagtttgactgtgcatgtcttaccaacattcaccgagctgcccggcgatgtttccttgaataaaggcgaacagctgaggttgtcatgtaaggctaccggcattcccctacccaaactgacttggacattcaacaataatattataccagctcacttcgacagcgttaatggccatagcgaacttgtgattgaacgggttagcaaggaagattcaggaacctacgtgtgtacggcagagaacagcgtgggttttgttaaagcaataggcttcgtgtacgtaaaggagccccctgtcttcaagggcgattacccgagtaactggattgaaccactgggaggtaacgccatattgaactgcgaagtgaagggtgacccaaccccgactattcagtggaatagaaaaggggtggacatagagattagccataggataaggcagctgggtaatggctctctggcaatatacggtacggttaacgaggacgctggcgactacacttgcgtcgccactaatgaggcaggagtggttgagcgtagcatgtctctcacacttcagtcacctccaattataacgttggagcccgttgaaactgtgatcaacgctggcggaaagataattcttaattgccaggccactggtgagccacaaccaacgatcacctggtccaggcaagggcactcaatttcttgggacgacagggtgaatgtcttgagtaacaatagtctctacattgccgacgcccagaaagaggacacttctgagtttgagtgcgtagctcggaacctgatggggtctgtcctggtcagggtcccggttattgtgcaggtgcacggcgggttcagccagtggagtgcttggcgcgcctgcagcgtcacctgtggcaagggaatacaaaaacggtccaggctgtgcaaccagcctttgccagcgaatggcgggaaaccttgtcagggctctgacctagagatgagaaattgccaaaacaagccatgcccagtcgatggctcatggtctgagtggtccctctgggaggaatgcactagatcctgcggcagaggaaaccagacacggacgagaacctgcaataacccctccgtgcagcatggaggtcggccatgtgaagggaacgctgtcgagataatcatgtgtaacatacgtccgtgcccagtgcacggcgcctggtcggcttggcagccatggggcacctgcagtgaatcctgtgggaagggtacgcagacaagggcccgattatgtaataaccccccgccggctttcggcgggtcctattgcgatggggccgagactcaaatgcaagtatgcaatgaaagaaactgtcccatccatggcaagtgggcaacatgggcgtcctggtcggcctgtagcgtctcatgcgggggaggcgctcgtcagcggacgaggggttgtagcgatcccgttcctcagtatggaggccgcaagtgcgaaggctcagacgtccagtccgacttctgtaattctgatccctgtccaacccacggcaattggtctccttggtcaggctggggaacctgtagcagaacatgcaatggcggacaaatgaggcgatacaggacttgtgataatcctcccccttcaaacggtggaagggcctgcgggggacccgacagtcagattcagcgatgcaacaccgacatgtgccctgttgacggaagctggggcagctggcatagctggtcacagtgcagcgcctcctgtggcggtggtgagaaaacgaggaagcggctctgcgatcaccctgtccctgtaaagggcgggaggccatgccctggggacacaacacaggtcactcgatgtaacgtccaggcgtgccccggagggccccagcgtgcacgcggttctgtgataggaaatatcaatgatgtggagttcggcatcgccttccttaacgccactatcaccgattctcctaattccgatacccgtatcattcgggcaaaaattaccaatgtacccagaagcctggggagtgccatgcgaaaaattgtgagcatcctcaatcccatatactggaccacagctaaggaaattggagaggctgtgaatgggttcacactaaccaacgcggtgttcaaaagggaaacacaggtcgaattcgccaccggtgagattctgcagatgagtcatattgctcgaggcttagactccgatgggtcccttctactcgacattgtggtttcagggtacgtcctccaactgcaatctcccgcagaagtgacagtgaaggattatacagaggactacatccagactggccctggccagctctacgcgtattctaccaggctgttcaccattgacggtattagcattccctacacttggaaccacaccgttttctacgaccaggcacaaggcagaatgcctttcttggtggaaaccctccacgcctcaagcgtggagtctgattacaaccagatcgaggagaccttgggattcaagattcacgcttccatatcaaagggggaccgatccaatcagtgcccttccggatttactttggacagcgtgggccccttttgtgccgatgaggatgaatgcgcggctggcaacccgtgctctcattcctgccacaatgccatgggaacttactactgctcatgtccaaagggcctgacaatagccgctgatggccgcacttgtcaggacatcgacgaatgtgccctcggacgccatacatgtcacgctggacaggactgcgataacacaataggcagctacaggtgcgtcgttagatgcggaagcggttttagacgaacttctgatggcctttcttgtcaggatatcaatgagtgccaggagtccagcccatgtcaccaacgctgttttaacgctatcgggtcttttcactgtgggtgcgagccgggctaccagttgaagggccgaaaatgcatggatgtgaatgaatgtcgacagaatgtttgtcggcccgaccagcactgtaagaatacaagggggggatataaatgcatagacctttgccctaacggcatgacaaaggctgagaacggcacatgcatcgacattgatgaatgtaaggatggcacccaccagtgcagatataaccagatttgtgaaaacaccagaggctcttatcggtgcgtctgtccaagaggctacaggtctcagggcgtgggccggccctgtatggatattaatgagtgtgagcaggttccgaagccttgcgcgcatcagtgttctaacacgccgggaagcttcaagtgtatttgcccacccggccagcatttgcttggagatggcaaatcatgtgccggtttggaaagattgccgaactatggaacacagtattcttcatataatctagcacgattttcaccggtgagaaacaactatcagcctcagcagcattaccggcagtacagccacctgtatagtagctactctgaatatcgcaacagtcggactagcctgtcccgaactcgccgcacaatccgtaaaacctgccccgaagggtcagaggcctctcacgacacctgcgtggatatcgatgaatgcgagaatacagacgcctgtcagcatgagtgcaagaatacattcgggagctaccagtgtatatgcccccctggatatcagctgacccacaatggtaagacctgtcaggatattgacgagtgcctggaacaaaatgttcactgcgggcccaaccggatgtgttttaacatgcgcggtagctaccagtgcatcgacactccctgtccacccaattaccagcgagatcctgtctctggcttttgtttaaaaaactgtccacctaacgacttagaatgtgcactgagtccctacgctctcgaatataaacttgttagcctcccttttggaatagccacaaatcaggaccttatcagacttgtggcctacacccaggatggtgtcatgcaccccaggacaacttttttgatggttgacgaggaacagacagttccttttgctctgcgcgatgagaacctcaagggcgtggtctatacaactcggcctttgcgcgaggctgagacataccgaatgagggtgagggcttcgtcctattctgccaatggtactatcgaatatcaaaccacgttcatcgtgtacatcgctgtttccgcctacccatattag

SEQ ID NO: 222321 - DNA, 16907 bp, Artificial Sequence
  derived and/or modified sequence
atgatcagttgggaggtagtgcacaccgtgtttctgtttgccctcctgtactcttccttggcccaagatgcttcaccacaatcagaaatccgtgccgaagaaatccctgaaggagcctccacgttagcttttgtgtttgatgttacggggtccatgtatgatgaccttgtgcaagtcatcgaaggagcctcaaagattcttgaaacctctctgaagagacccaagagaccacttttcaactttgccctcgtgccttttcacgacccggaaattgggccagtgactataaccaccgatccaaaaaagttccagtatgagctccgggaactttacgttcagggcggtggagattgtcctgaaatgagcatcggcgctatcaagatcgccctcgagataagccttcccggtagtttcatttacgttttcactgatgcaagatcaaaagattacaggcttacacatgaggtccttcagctgatacagcagaagcagagtcaagtggtctttgtgctaacaggcgactgtgatgatagaacacacatcggctacaaagtctacgaggaaatcgcatccacaagtagtggccaggtgttccacttagacaaaaagcaggttaacgaagtattgaagtgggttgaggaggccgtacaagccagcaaagttcacctcctcagtacggaccacctggagcaagccgtgaacacttggcggattccatttgaccccagcctgaaggaagtcacagttagcctttcagggccttctccaatgatcgagatccgtaaccctctgggaaagctcattaaaaaaggttttgggcttcacgagctcctgaacatccataacagtgccaaggtggtcaacgtgaaggagcctgaggcgggaatgtggaccgtgaaaaccagctcatctggccgtcacagcgtgagaatcactggtctgtctaccattgatttccgcgcaggtttcagtcggaaacccacattggacttcaaaaagacggtatcaaggccggtacaaggcattccaacatacgtactgctgaacacaagcgggatttctacacccgctcggatcgaccttctggagctgctaagcatctcagggtctagcttaaagacaatccctgtgaaatactatccacatagaaaaccatacggaatctggaacataagtgacttcgtgcccccaaacgaagcgttttttctcaaggtcacgggttatgacaaggatgattatctgttccagagggtaagtagcgtatccttttccagtatcgtcccagacgctccaaaggttacaatgcctgagaagactccaggatattaccttcagcccggacagattccttgctccgtggactccctccttcctttcacattatccttcgtacggaacggcgtcacgctcggcgttgaccagtatctcaaagagtccgccagcgtgaatctcgacatcgcaaaggtgactctgtcggacgagggcttctacgagtgcatcgccgtatcctcagccggtacgggtagggctcagacattttttgacgttagcgagccccctcccgtaattcaagtccctaacaatgtgacggtaaccccaggggagagagccgtgctcacttgtcttatcatctcagctgtggactataatctcacttggcagcgtaatgaccgagatgttaggcttgccgagcctgccaggattcggaccctggccaacctgagcctggagctcaaaagcgtgaagttcaatgatgccggtgaataccactgtatggtttccagtgaaggcggttccagcgcagctagcgtgtttttgacggttcaagaaccgcctaaagtaaccgtgatgcccaaaaatcaatcctttacaggaggttccgaggtctccatcatgtgctctgcaaccgggtaccccaaacctaagattgcgtggaccgtaaatgacatgttcatcgtgggctctcatcgatacagaatgacgtcagacggtacgctgtttattaagaacgccgctccaaaggatgcagggatctacggctgtctcgcttcaaactcggccggaacagacaaacagaacagcacactacgatacatagaagctcccaagctcatggtggtccagtcagagctgctcgttgccctgggagacataactgtgatggaatgcaaaacttctggcatccccccaccacaagtaaaatggtttaagggcgacctggagttgagaccaagcacctttttgatcatcgaccctcttcttgggctgttaaagatccaggaaactcaggatctggatgcaggtgactacacgtgtgttgccataaatgaggccggtagggccacaggaaaaataacgcttgatgtgggctcacctcccgtctttattcaggaacccgcagatgtatcaatggaaattgggtctaacgtcacactgccctgctacgtgcaggggtaccccgaacccaccatcaaatggcgtagactcgataacatgcctatatttagtaggccattctccgtgtctagcatctctcagttaagaactggagcactgtttatcttgaatctatgggcttctgacaagggaacctatatttgcgaagctgagaatcagttcggaaaaatccagtctgaaaccactgtcacggtgacgggactggtcgctccacttatcggtatcagcccttccgtagcgaatgtgattgagggtcagcagctcacccttccatgcactctactcgctggaaacccaattcctgagcgacgatggattaagaatagtgccatgctgctgcagaatccctacatcacagtcagatcggacggaagtctgcatattgaacgggtgcaactgcaagatggaggcgaatatacctgtgtggcatctaacgtggctggaacaaataataaaactacctccgtggtggtgcatgtgctgcccacaatccagcacggacagcaaatcttgagcactatcgaggggatacccgtgacattgccctgcaaagcgtccgggaatccaaaaccaagtgtcatctggagcaagaaaggagagctcatttccacatcctctgcaaagttctcagctggtgcagatggctccctttacgttgtgtcgcctggcggagaagaatcaggggagtatgtctgtacagctaccaacacagcgggatacgctaagcgaaaagtccagttaaccgtttacgtgcggcctagggtgttcggcgatcagagaggtctgtcacaggacaagccggtagagatctccgtgctggccggtgaggaggtgactttgccttgcgaggtcaagagcctccctccacctatcattacttgggctaaagagacacagcttatctcccccttttccccccgtcatacattcctgccttccggctccatgaaaatcaccgaaacgaggacatctgactcagggatgtatctttgtgtcgcaaccaacatcgccggaaatgtcacccaggcagtgaagcttaacgtccacgttcctccaaagatacagcgtggcccaaaacacttgaaggtccaggtggggcaaagggtggacataccctgcaacgctcagggaactcctctccctgtcatcacgtggtcaaagggtggctcaacgatgctagtagacggtgaacatcatgtatctaatccagacggcaccctgtccatagaccaggctacgccgtctgatgctggcatttacacatgtgtggctactaatatcgcgggaactgacgagactgaaattacccttcatgtgcaggagcccccaaccgtagaggacctggaacctccgtataatacaacctttcaagaaagagtggcaaaccagcgcattgaattcccctgtcccgctaaaggtacccctaaacccaccataaaatggctgcacaatggcagggagctgaccggacgagagcctggaatctccattctcgaagatggtacactccttgtgatcgcctctgttacaccgtatgacaacggcgaatacatctgtgtcgccgtcaacgaggctgggacgacagaacggaagtataacctgaaggtgcacgtgccccctgtgattaaggacaaagagcaggtgaccaatgtcagtgtcctgctaaatcaactgacaaacctgttctgtgaagtagaaggaaccccttccccgatcatcatgtggtataaggacaatgtgcaggttactgaaagctcaactatccagacagttaacaatggaaaaattctgaaactatttcgcgcaacgccagaggacgcgggtagatactcctgtaaggccattaacatagccggtacatcacagaagtattttaacattgatgtactcgtcccgccaactataatcgggaccaactttcctaacgaggttagcgtggtccttaaccgggacgtggcgctggaatgtcaggtgaagggcacaccatttccagacatacattggttcaaagatggtaaacccctttttctgggagatccgaacgttgaattgttggaccgtggacaggtgctgcacctgaagaacgctaggcggaacgataagggcaggtatcagtgcactgtgtccaacgccgctgggaaacaggctaaggacattaagctgaccatctacattccccctagcatcaagggaggaaacgtaaccacagacatctcagtccttatcaattctcttattaagctcgagtgtgaaacgagggggctgcccatgcccgctataacttggtacaaggatggacagcctataatgagcagtagccaagccctttatatcgacaagggccagtatctgcatatccccagggcccaagtctcggattcagccacatacacctgtcacgtggccaatgttgcagggacagcagaaaagagttttcatgtcgacgtatatgtgcctcctatgattgaggggaatctggctactcccctgaataaacaggtggtgatagcacactccctaacactcgaatgtaaggccgctggcaacccttctccaatcctcacctggcttaaagacggcgtccccgtgaaggcaaatgacaacatcaggatcgaagcagggggtaagaagctggagatcatgtctgcccaagagattgaccgtggccagtacatatgcgttgctacaagtgtggctggcgaaaaagaaatcaagtatgaagtggacgtgttggtgccacccgctatcgaggggggtgatgagacttcctatttcatagttatggttaataatctcttggagctcgactgtcatgtgacaggcagccctcctcctacaataatgtggcttaaagacggccagctgatagacgagcgtgacggattcaaaatactacttaatgggcgtaagcttgtcatagcacaagctcaagtgtccaacacagggctgtacaggtgcatggccgctaataccgccggtgatcacaaaaaagaatttgaggttactgttcacgtgccccctacaatcaaaagctctggtctatccgagagagttgtcgtgaaatacaaacctgtggcgctgcagtgcattgctaatgggatccccaatccaagcattacatggctgaaagacgaccaacccgtgaacactgctcagggaaacctcaaaattcagtcgagcggacgagtccttcagattgccaaaactctgctggaggacgcaggtaggtacacttgcgtggctactaatgccgcaggtgaaacccagcaacacatccagctacatgtgcatgaacctccaagcctcgaggacgcaggtaagatgctaaatgaaactgtgcttgtgagcaaccccgtccagctggagtgtaaagcagcagggaatcccgtgccggttatcacgtggtataaggataatcgactccttagcggctctacctcgatgactttcctgaatcgcggtcagattattgatatcgaaagtgctcagattagtgatgccggtatttacaagtgcgttgccatcaattccgcaggggcaaccgagctgttctactccttgcaggtccacgtcgctcctagcatttcagggtccaacaacatggtggccgtggtcgtaaacaaccctgtacgattggaatgtgaagcacgcggtatccccgctccctcacttacctggcttaaggacgggtcaccagtgagttccttttccaacggtctccaagtgttatccggcggacgaatactggctctgaccagcgcacagatttcagatacaggccgatatacatgcgtggccgtgaatgcagcaggcgagaaacaacgcgacatagacttgagggtttacgtgccaccaaacattatgggcgaggaacaaaacgttagcgtgctgatcagtcaggccgttgaactgctttgtcagtcagacgcgattcctccccctacacttacttggttgaaagatgggcacccactgctgaaaaagccaggtttaagcattagcgaaaacaggtcggtcctcaaaatcgaagatgcgcaggtgcaggataccggtagatacacgtgtgaagctaccaatgtagcgggaaagactgaaaagaactataatgtgaatatctgggttccaccaaatatcggtggaagcgatgagctgacacagctcacagtgatagaaggaaaccttatttctctgctttgtgagtcatccggaataccccctccaaatttgatttggaaaaaaaagggaagtcccgtgttgactgatagcatgggcagggttagaatcctgtcgggcggaagacagttgcagatcagcatcgctgagaagtctgacgcggctctgtattcctgtgtggcctccaacgtggcagggactgcaaagaaagagtacaacctccaggtatatatccggccaaccatcaccaactcaggatcgcaccccaccgagataattgtgacccggggtaagtcaattagcctggagtgcgaggtgcaggggatcccgcctccaaccgtgacgtggatgaaagacgggcatcctctaattaaagctaaaggcgtggagattctggatgaaggccacatccttcagctgaaaaacatccatgtaagtgacacaggtcggtatgtttgtgttgcggttaacgtcgcgggaatgacagataagaagtatgacttgtctgtccacgctccacctagtatcattgggaaccacagaagtcccgaaaatatctcggtggtggaaaagaactctgtctccctgacctgtgaggccagcgggattccgctgccctctattacttggtttaaagacggatggcctgtttccttgagcaattcagtgcgaattctgtccggcggaaggatgcttcgtcttatgcagaccacaatggaggacgcaggtcagtatacatgtgtcgtgaggaatgcggcaggcgaggagcgcaagatttttggcttgtcggtactcgtgcccccacatatcgtcggagaaaatacattagaggatgtcaaagtgaaggagaaacagtcggtcacactaacttgcgaagtgacaggaaacccagtgcccgagatcacgtggcacaaagacgggcaacctctgcaggaggacgaagcccatcacattataagcggaggacggtttctgcagataacaaatgtacaagtgccacacactggacggtacacatgcctcgcttccagcccggcagggcataaatcgcgcagcttcagtcttaacgtgtttgtgagccccaccatcgccggagttggatcagatggcaaccctgaggatgtgacagtcattcttaactcaccgaccagcctagtatgtgaggcatactcctaccctccggcaaccatcacatggtttaaggatggaacaccattggagagtaaccggaacattaggatactgcctggcggtaggactctgcagatcctgaatgctcaggaggacaatgcgggaaggtactcatgtgtggctactaacgaggcgggagagatgattaagcattacgaggtcaaagtgtacattccacccattataaataagggcgacctatgggggcctggcttatctcccaaggaggttaagataaaggttaataatactctaacccttgagtgcgaggcttacgccataccgagcgctagcctgtcctggtacaaggatggccagcctctcaagtctgatgaccatgtaaatatcgctgccaatggacatactctccaaatcaaggaggctcagattagcgacaccggacgctatacctgtgtagcttcaaacattgccggtgaggacgagcttgatttcgatgtgaacattcaggtgccaccgtcatttcagaaattatgggagattggcaacatgcttgacaccgggcgtaacggcgaggctaaagatgtgataatcaataatccaatttcgctgtattgcgagactaacgccgctccccctcccacgttgacatggtataaggacggccaccctttgactagttcagacaaggtgttgattctgcccggtggccgtgtgttacagatccccagggctaaggtggaagacgcaggcaggtacacgtgcgtggcagtcaatgaggccggtgaagacagcttgcaatatgatgttcgagtgctcgtccctccgattattaagggcgctaacagcgatctgccggaggaagtcaccgtcctagtcaacaagtctgcgctcattgagtgtctttcctcaggatctcctgccccaagaaactcctggcaaaaggacggccagcctctactggaagacgaccaccataagttcctcagcaatgggcgtatcctacagattctgaacacacaaattaccgatattggcagatatgtgtgtgtggccgaaaacacggcaggtagtgccaagaaatatttcaacctgaatgtccacgtgcccccttccgtgatcggacctaagagcgaaaacctgacggtggtcgtaaataactttatatcccttacgtgtgaggtctcggggtttccacccccagacctgtcttggctcaagaatgaacaacccatcaaactgaacaccaataccttgatcgtcccgggaggtaggactctccaaatcatacgtgccaaggtgtctgatggtggtgagtatacatgcatagctataaatcaggccggagagagcaaaaaaaaattttccctgacggtctacgtgccaccgtccataaaggaccacgacagcgaatcactaagcgtggtcaatgtcagggaagggacatctgtgtcattggaatgcgaatctaacgctgttccgcctccagtgatcacatggtataagaatgggcgtatgataacggagagcacccatgtggaaatcctggccgacggccagatgctacacatcaagaaagctgaggtgagcgatacaggtcagtacgtttgccgggctatcaatgttgccggacgggacgataaaaacttccacctcaacgtgtacgtgccacctagtatcgaagggcctgaaagagaggttatagtcgagactattagtaacccagttacactcacatgtgatgctacaggaattcctccacccaccatcgcctggcttaagaaccataaacgtatcgaaaactccgactcactcgaagtgcgcatcctcagtggtgggtctaaactgcagatagccaggtcccaacacagcgatagcggcaactacacatgtatagccagcaatatggagggtaaggcccagaagtactattttctgtcaatacaggtgcccccttctgttgccggagctgagatcccctcagacgtgagcgtcttactgggcgagaacgtggagttagtgtgtaacgctaatgggatacccaccccactcatccagtggcttaaagacggtaaaccgattgcatcaggggaaacagagaggattcgtgtctctgcgaatgggagtacactgaatatttatggcgctctaacatcggacacaggaaagtacacctgtgttgctacgaacccggctggcgaagaagaccgaatcttcaatctaaatgtttacgtaactccgactatcagaggcaacaaagacgaagcagagaagctcatgacactggtggacactagcatcaatatcgaatgcagagcgaccggaacacctcctccacagattaactggctgaaaaacggactgccgttacccctcagttcccacattaggctgctggccgcaggtcaggtgatccggattgtgcgggctcaagtgagcgacgtggccgtgtatacctgcgtggcctccaacagagctggagttgacaataaacattacaatcttcaggtctttgctccccctaatatggacaatagtatgggcacagaggagattaccgtgctgaaggggtcctctacctccatggcatgcatcactgacggcacccctgcgcctagtatggcatggcttcgagatgggcagcccctcgggctggatgcccacctgacagtgagcacgcacgggatggtcctgcagctcttaaaggccgagacagaggatagcggcaagtatacatgtatagcaagtaatgaagcaggagaggtgtccaaacatttcattctgaaagtgctggagcccccacatatcaatggctccgaagaacacgaagaaataagcgtgattgtcaacaatcccttggaactgacctgcatcgcttccggaatccccgcacctaagatgacatggatgaaggacggcagacctctgccccaaaccgaccaggtgcaaaccttggggggtggagaggtgttgcgaatttccactgctcaggtggaggacacaggaaggtacacctgcctagcctcctcgcccgctggagacgacgataaagagtacctggtgcgggtccacgtacccccaaatatcgccggaaccgatgaaccccgagacatcacagtactgcggaatagacaagtgaccctggaatgcaagtccgacgccgtgcctccccctgtgatcacatggctgcgaaacggggagagactgcaggccacaccccgagtgaggatcctgagcggcggaaggtacttgcagatcaataatgccgacctgggagatactgccaactacacctgtgtagcgtctaacatagcgggtaagacgacacgcgagttcattctgaccgtgaacgtgccaccaaatattaaaggaggacctcagtcgctagtcatacttctgaacaaatccaccgtccttgaatgcatcgctgaaggagttccaacgcccaggattacatggcggaaagacggcgcagtgttagccggtaatcacgctagatacagcatcttggagaatgggttcttgcacatacaaagcgcacacgtgacagatacagggaggtacctatgtatggcaacgaacgcagcgggaaccgatcgcagacggattgacttgcaggtgcatgtgcccccatcaattgctccgggaccaaccaacatgaccgtgattgttaatgtgcaaaccaccctcgcatgcgaagcaacaggcattccaaagcccagcattaactggaggaaaaacggccacttgctcaacgtggaccaaaatcaaaattcctaccgtctcctctccagtgggagcctggtgatcatttcaccatccgtagatgacaccgccacttacgagtgcacagtaaccaacggagccggtgacgacaagcgcaccgttgatctcacagtccaggtacctccgtccattgcagatgaacccacagatttcctggtcactaaacatgcacccgcagttattacctgtacggcttctggcgttccttttccgtctatccactggacaaagaacggtatcagactgctgccgagaggggacggttaccggattctttcatctggagctatcgagatcttagcaacccagctcaatcacgcgggtagatatacttgtgttgctaggaacgccgcaggtagcgcgcaccgccatgtgactctccacgttcacgagccccctgtgatccaaccgcaaccaagcgagctgcacgtcatcctgaataatccaattctgctgccttgtgaagccacaggcacaccaagtccattcatcacttggcagaaagagggcattaacgtaaacacatctggacggaatcatgcagtactgccatccggtgggctccagattagcagagctgtgagagaggatgccggaacatacatgtgtgtcgcccagaaccccgcaggcacggctttagggaagatcaaattaaacgtccaggtaccacccgtgatctcgccccacctgaaggagtatgtgatcgcagtggataagcccattacactgtcctgtgaggcagatggcctgccaccacccgatattacttggcacaaggacgggcgtgcgattgtcgaaagcataaggcagcgggtgttgagtagcggcagtttgcagatagcatttgttcagcctggggacgctggacactatacatgcatggccgctaacgtggcaggctcctctagtactagcaccaaacttacggtgcacgtccctccacgcatccggtccactgaaggccattacacagtgaatgagaacagccaggcaatacttccttgtgtagctgacggcatccccacacctgcaatcaactggaaaaaggacaacgtgttgttggccaatctgctggggaagtacacagctgagccatacggagaactcatactggagaacgtggtgctggaggacagcgggttttatacttgcgtggcgaataatgccgcaggcgaggacacgcataccgtgagccttactgtacacgtgctgccgactttcaccgagcttccaggtgatgtgtcactgaacaaaggcgagcagcttcggctatcatgcaaagccacaggcattcctctcccaaaacttacctggacgtttaataacaacattatccctgcccactttgattccgtgaacggccacagcgagctggtgatcgagagggtgtctaaggaggattccggcacatacgtttgcacggctgagaactctgtgggcttcgtgaaggccattggttttgtgtacgtgaaggaaccacccgtgttcaagggagactacccctctaactggatcgagccacttggcggaaacgccatcttgaattgcgaggtgaagggcgacccgacacccaccatccagtggaaccgcaaaggtgtggacatcgagatctctcaccgtatacgccagctagggaacggctcacttgccatctatgggacagtgaacgaggacgccggtgattacacgtgcgtggctactaacgaggcaggcgtggtagagcgctctatgtccttaaccctgcagagcccaccaattattactctggaaccagtggagacggtaataaatgctggcggaaaaattatcctaaattgccaggctacgggggaaccccagccaactatcacctggtcacggcaaggacactctatttcttgggatgaccgagtgaacgtcctgtccaataatagcctttacattgccgacgcccagaaggaagatacaagcgaattcgagtgcgtggcaaggaatctgatgggaagcgtgctggtaagggtgcctgtcatcgtacaagtgcacgggggattttcgcagtggtccgcctggcgggcatgttcggtgacttgcggcaagggcatccaaaagcggagcaggctatgcaatcagccccttccagcaaatggagggaaaccatgtcaaggctcagatttggaaatgcgaaattgtcaaaacaaaccttgtccagtggacggatcgtggtcagaatggagcctgtgggaggagtgcacaaggtcatgcgggaggggaaatcaaacaagaacacgcacttgtaacaatccatccgtgcagcatggaggtagaccctgtgagggtaacgctgttgaaattattatgtgcaacataagaccatgccctgtccatggggcttggtcagcttggcaaccgtggggaacatgtagcgagagctgtggcaagggcacacaaactcgggctagactctgtaacaaccctccaccagcctttggtggttcgtattgcgacggggctgagacacagatgcaagtgtgcaacgagagaaactgtccaatacatggtaaatgggctacatgggcatcatggagtgcctgcagtgtcagttgcggcggtggcgctcgccaacgaacaaggggctgctccgatccagtaccccagtacggtggcaggaaatgtgaaggctccgatgtccagtcagatttttgcaatagcgatccatgccctacgcacggaaattggagcccatggtctgggtggggaacgtgctcacgcacctgcaacggagggcagatgcgcagatacagaacgtgtgataacccgcctcccagtaacgggggaagggcttgcggaggccctgactcacaaattcagaggtgtaatacagacatgtgccccgtggacggttcttggggctcttggcattcctggagccagtgttccgccagctgcgggggaggcgagaaaacccgcaaacggctatgcgaccaccccgttccggtcaaaggaggacgcccatgtcctggtgacaccacacaggttactcgttgcaacgtccaggcctgtcctggcggaccccagcgggcacggggttccgtcattggcaatatcaatgatgttgagtttggcattgcctttctgaatgcgactataactgactctccaaactccgatacccgcataattcgagcaaagatcaccaacgtcccccgatcgctaggatccgctatgaggaagattgtgtctattctgaacccgatctattggacaactgccaaggaaattggggaggcagtaaatggtttcactctgactaatgcagtcttcaagcgcgaaacccaagtggagttcgccacaggggaaatccttcagatgagccacatcgcgagaggcctggacagtgacggaagtctcctgttggacatcgtggtatcaggctatgtgctgcagctacagtcgcctgcagaggttaccgtgaaagactatactgaggactatattcaaactggccctgggcagctgtacgcctactctacgcgtctgttcaccatcgatgggatttctattccctacacctggaatcataccgtgttctatgatcaagctcagggcaggatgccttttcttgtcgagaccctgcacgcctccagcgtggagtcagattacaaccaaatcgaagagaccctcggctttaagattcacgccagcatctctaaaggtgaccgctcgaatcagtgtccttcaggctttaccctggactcagtggggccattctgtgctgacgaagacgaatgcgccgcaggaaatccttgttcacactcttgccacaacgctatgggcacatactattgttcctgtccgaagggcctgactatcgcagcggatgggcgtacctgtcaagacattgatgagtgcgcgcttggacgccacacatgtcacgctggacaggactgcgacaatacaatcggatcctacaggtgtgtggtgcgttgtggttccggttttcgcaggacaagcgacggactatcctgtcaggacattaatgagtgccaagaaagttcaccctgccatcaacgttgttttaatgccattggcagttttcactgtgggtgcgagccaggataccaactgaaagggagaaaatgcatggacgtcaatgagtgcagacagaatgtttgccgcccagatcagcactgcaagaacacacgaggcggttacaagtgcatcgatctttgtcccaacggtatgaccaaggccgagaatggtacttgcattgatatcgacgagtgtaaagacgggacacaccaatgtagatacaatcagatttgtgaaaatactcgcggttcatatcgctgtgtctgtccaaggggctacagatctcaaggagtagggcgaccttgcatggatattaacgaatgcgaacaggttcctaaaccatgtgcacatcagtgttccaacaccccaggcagtttcaagtgtatctgtcccccagggcagcacctgttaggagacggcaaaagctgtgctggcttggaaagattgccgaactacgggacgcagtatagctcgtataacctggccaggtttagccctgtgcggaataactatcagcctcagcagcactatcgtcaatatagccacctgtacagtagttattccgagtacaggaactctcggaccagtctgagtaggactagacgcacaatccggaaaacttgccctgagggaagcgaggccagtcatgatacgtgcgtggatattgacgaatgtgagaacacagacgcgtgtcagcacgagtgtaagaatacttttggttcttatcagtgcatctgcccacccggatatcaactgactcataacggaaagacctgtcaggacattgacgagtgtctggagcagaatgttcattgtggacccaacagaatgtgctttaatatgcggggttcatatcagtgtatcgatacaccttgccctcctaattatcagagagatccagtttccggcttctgcctcaaaaattgtccacccaatgacttggagtgcgcgctatctccctacgccctcgagtacaagctggtttcgctaccatttgggatcgccacaaaccaagatctgatccggcttgtggcatacacccaagatggggtcatgcaccccagaactactttcctcatggttgatgaggagcagactgtgccattcgcactaagagatgagaatctgaaaggcgtggtgtacacaaccagacccttgagagaggctgagacatatagaatgagagtccgggctagcagctattccgctaacggcaccatcgagtaccagactacgttcatcgtatacattgccgtcagtgcttacccatacta

SEQ ID NO: 222322 - DNA, 16908 bp, Artificial Sequence
  derived and/or modified sequence
atgatcagctgggaggtggtgcacaccgtgttcctgttcgccctgctgtacagcagcctggcccaggacgccagcccccagagcgagatcagagccgaggagatccccgagggcgccagcaccctggccttcgtgttcgacgtgaccggcagcatgtacgacgacctggtgcaggtgatcgagggcgccagcaagatcctggagaccagcctgaagagacccaagagacccctgttcaacttcgccctggtgcccttccacgaccccgagatcggccccgtgaccatcaccaccgaccccaagaagttccagtacgagctgagagagctgtacgtgcagggcggcggcgactgccccgagatgagcatcggcgccatcaagatcgccctggagatcagcctgcccggcagcttcatctacgtgttcaccgacgccagaagcaaggactacagactgacccacgaggtgctgcagctgatccagcagaagcagagccaggtggtgttcgtgctgaccggcgactgcgacgacagaacccacatcggctacaaggtgtacgaggagatcgccagcaccagcagcggccaggtgttccacctggacaagaagcaggtgaacgaggtgctgaagtgggtggaggaggccgtgcaggccagcaaggtgcacctgctgagcaccgaccacctggagcaggccgtgaacacctggagaatccccttcgaccccagcctgaaggaggtgaccgtgagcctgagcggccccagccccatgatcgagatcagaaaccccctgggcaagctgatcaagaagggcttcggcctgcacgagctgctgaacatccacaacagcgccaaggtggtgaacgtgaaggagcccgaggccggcatgtggaccgtgaagaccagcagcagcggcagacacagcgtgagaatcaccggcctgagcaccatcgacttcagagccggcttcagcagaaagcccaccctggacttcaagaagaccgtgagcagacccgtgcagggcatccccacctacgtgctgctgaacaccagcggcatcagcacccccgccagaatcgacctgctggagctgctgagcatcagcggcagcagcctgaagaccatccccgtgaagtactacccccacagaaagccctacggcatctggaacatcagcgacttcgtgccccccaacgaggccttcttcctgaaggtgaccggctacgacaaggacgactacctgttccagagagtgagcagcgtgagcttcagcagcatcgtgcccgacgcccccaaggtgaccatgcccgagaagacccccggctactacctgcagcccggccagatcccctgcagcgtggacagcctgctgcccttcaccctgagcttcgtgagaaacggcgtgaccctgggcgtggaccagtacctgaaggagagcgccagcgtgaacctggacatcgccaaggtgaccctgagcgacgagggcttctacgagtgcatcgccgtgagcagcgccggcaccggcagagcccagaccttcttcgacgtgagcgagcccccccccgtgatccaggtgcccaacaacgtgaccgtgacccccggcgagagagccgtgctgacctgcctgatcatcagcgccgtggactacaacctgacctggcagagaaacgacagagacgtgagactggccgagcccgccagaatcagaaccctggccaacctgagcctggagctgaagagcgtgaagttcaacgacgccggcgagtaccactgcatggtgagcagcgagggcggcagcagcgccgccagcgtgttcctgaccgtgcaggagccccccaaggtgaccgtgatgcccaagaaccagagcttcaccggcggcagcgaggtgagcatcatgtgcagcgccaccggctaccccaagcccaagatcgcctggaccgtgaacgacatgttcatcgtgggcagccacagatacagaatgaccagcgacggcaccctgttcatcaagaacgccgcccccaaggacgccggcatctacggctgcctggccagcaacagcgccggcaccgacaagcagaacagcaccctgagatacatcgaggcccccaagctgatggtggtgcagagcgagctgctggtggccctgggcgacatcaccgtgatggagtgcaagaccagcggcatcccccccccccaggtgaagtggttcaagggcgacctggagctgagacccagcaccttcctgatcatcgaccccctgctgggcctgctgaagatccaggagacccaggacctggacgccggcgactacacctgcgtggccatcaacgaggccggcagagccaccggcaagatcaccctggacgtgggcagcccccccgtgttcatccaggagcccgccgacgtgagcatggagatcggcagcaacgtgaccctgccctgctacgtgcagggctaccccgagcccaccatcaagtggagaagactggacaacatgcccatcttcagcagacccttcagcgtgagcagcatcagccagctgagaaccggcgccctgttcatcctgaacctgtgggccagcgacaagggcacctacatctgcgaggccgagaaccagttcggcaagatccagagcgagaccaccgtgaccgtgaccggcctggtggcccccctgatcggcatcagccccagcgtggccaacgtgatcgagggccagcagctgaccctgccctgcaccctgctggccggcaaccccatccccgagagaagatggatcaagaacagcgccatgctgctgcagaacccctacatcaccgtgagaagcgacggcagcctgcacatcgagagagtgcagctgcaggacggcggcgagtacacctgcgtggccagcaacgtggccggcaccaacaacaagaccaccagcgtggtggtgcacgtgctgcccaccatccagcacggccagcagatcctgagcaccatcgagggcatccccgtgaccctgccctgcaaggccagcggcaaccccaagcccagcgtgatctggagcaagaagggcgagctgatcagcaccagcagcgccaagttcagcgccggcgccgacggcagcctgtacgtggtgagccccggcggcgaggagagcggcgagtacgtgtgcaccgccaccaacaccgccggctacgccaagagaaaggtgcagctgaccgtgtacgtgagacccagagtgttcggcgaccagagaggcctgagccaggacaagcccgtggagatcagcgtgctggccggcgaggaggtgaccctgccctgcgaggtgaagagcctgcccccccccatcatcacctgggccaaggagacccagctgatcagccccttcagccccagacacaccttcctgcccagcggcagcatgaagatcaccgagaccagaaccagcgacagcggcatgtacctgtgcgtggccaccaacatcgccggcaacgtgacccaggccgtgaagctgaacgtgcacgtgccccccaagatccagagaggccccaagcacctgaaggtgcaggtgggccagagagtggacatcccctgcaacgcccagggcacccccctgcccgtgatcacctggagcaagggcggcagcaccatgctggtggacggcgagcaccacgtgagcaaccccgacggcaccctgagcatcgaccaggccacccccagcgacgccggcatctacacctgcgtggccaccaacatcgccggcaccgacgagaccgagatcaccctgcacgtgcaggagccccccaccgtggaggacctggagcccccctacaacaccaccttccaggagagagtggccaaccagagaatcgagttcccctgccccgccaagggcacccccaagcccaccatcaagtggctgcacaacggcagagagctgaccggcagagagcccggcatcagcatcctggaggacggcaccctgctggtgatcgccagcgtgaccccctacgacaacggcgagtacatctgcgtggccgtgaacgaggccggcaccaccgagagaaagtacaacctgaaggtgcacgtgccccccgtgatcaaggacaaggagcaggtgaccaacgtgagcgtgctgctgaaccagctgaccaacctgttctgcgaggtggagggcacccccagccccatcatcatgtggtacaaggacaacgtgcaggtgaccgagagcagcaccatccagaccgtgaacaacggcaagatcctgaagctgttcagagccacccccgaggacgccggcagatacagctgcaaggccatcaacatcgccggcaccagccagaagtacttcaacatcgacgtgctggtgccccccaccatcatcggcaccaacttccccaacgaggtgagcgtggtgctgaacagagacgtggccctggagtgccaggtgaagggcacccccttccccgacatccactggttcaaggacggcaagcccctgttcctgggcgaccccaacgtggagctgctggacagaggccaggtgctgcacctgaagaacgccagaagaaacgacaagggcagataccagtgcaccgtgagcaacgccgccggcaagcaggccaaggacatcaagctgaccatctacatcccccccagcatcaagggcggcaacgtgaccaccgacatcagcgtgctgatcaacagcctgatcaagctggagtgcgagaccagaggcctgcccatgcccgccatcacctggtacaaggacggccagcccatcatgagcagcagccaggccctgtacatcgacaagggccagtacctgcacatccccagagcccaggtgagcgacagcgccacctacacctgccacgtggccaacgtggccggcaccgccgagaagagcttccacgtggacgtgtacgtgccccccatgatcgagggcaacctggccacccccctgaacaagcaggtggtgatcgcccacagcctgaccctggagtgcaaggccgccggcaaccccagccccatcctgacctggctgaaggacggcgtgcccgtgaaggccaacgacaacatcagaatcgaggccggcggcaagaagctggagatcatgagcgcccaggagatcgacagaggccagtacatctgcgtggccaccagcgtggccggcgagaaggagatcaagtacgaggtggacgtgctggtgccccccgccatcgagggcggcgacgagaccagctacttcatcgtgatggtgaacaacctgctggagctggactgccacgtgaccggcagccccccccccaccatcatgtggctgaaggacggccagctgatcgacgagagagacggcttcaagatcctgctgaacggcagaaagctggtgatcgcccaggcccaggtgagcaacaccggcctgtacagatgcatggccgccaacaccgccggcgaccacaagaaggagttcgaggtgaccgtgcacgtgccccccaccatcaagagcagcggcctgagcgagagagtggtggtgaagtacaagcccgtggccctgcagtgcatcgccaacggcatccccaaccccagcatcacctggctgaaggacgaccagcccgtgaacaccgcccagggcaacctgaagatccagagcagcggcagagtgctgcagatcgccaagaccctgctggaggacgccggcagatacacctgcgtggccaccaacgccgccggcgagacccagcagcacatccagctgcacgtgcacgagccccccagcctggaggacgccggcaagatgctgaacgagaccgtgctggtgagcaaccccgtgcagctggagtgcaaggccgccggcaaccccgtgcccgtgatcacctggtacaaggacaacagactgctgagcggcagcaccagcatgaccttcctgaacagaggccagatcatcgacatcgagagcgcccagatcagcgacgccggcatctacaagtgcgtggccatcaacagcgccggcgccaccgagctgttctacagcctgcaggtgcacgtggcccccagcatcagcggcagcaacaacatggtggccgtggtggtgaacaaccccgtgagactggagtgcgaggccagaggcatccccgcccccagcctgacctggctgaaggacggcagccccgtgagcagcttcagcaacggcctgcaggtgctgagcggcggcagaatcctggccctgaccagcgcccagatcagcgacaccggcagatacacctgcgtggccgtgaacgccgccggcgagaagcagagagacatcgacctgagagtgtacgtgccccccaacatcatgggcgaggagcagaacgtgagcgtgctgatcagccaggccgtggagctgctgtgccagagcgacgccatccccccccccaccctgacctggctgaaggacggccaccccctgctgaagaagcccggcctgagcatcagcgagaacagaagcgtgctgaagatcgaggacgcccaggtgcaggacaccggcagatacacctgcgaggccaccaacgtggccggcaagaccgagaagaactacaacgtgaacatctgggtgccccccaacatcggcggcagcgacgagctgacccagctgaccgtgatcgagggcaacctgatcagcctgctgtgcgagagcagcggcatccccccccccaacctgatctggaagaagaagggcagccccgtgctgaccgacagcatgggcagagtgagaatcctgagcggcggcagacagctgcagatcagcatcgccgagaagagcgacgccgccctgtacagctgcgtggccagcaacgtggccggcaccgccaagaaggagtacaacctgcaggtgtacatcagacccaccatcaccaacagcggcagccaccccaccgagatcatcgtgaccagaggcaagagcatcagcctggagtgcgaggtgcagggcatccccccccccaccgtgacctggatgaaggacggccaccccctgatcaaggccaagggcgtggagatcctggacgagggccacatcctgcagctgaagaacatccacgtgagcgacaccggcagatacgtgtgcgtggccgtgaacgtggccggcatgaccgacaagaagtacgacctgagcgtgcacgccccccccagcatcatcggcaaccacagaagccccgagaacatcagcgtggtggagaagaacagcgtgagcctgacctgcgaggccagcggcatccccctgcccagcatcacctggttcaaggacggctggcccgtgagcctgagcaacagcgtgagaatcctgagcggcggcagaatgctgagactgatgcagaccaccatggaggacgccggccagtacacctgcgtggtgagaaacgccgccggcgaggagagaaagatcttcggcctgagcgtgctggtgcccccccacatcgtgggcgagaacaccctggaggacgtgaaggtgaaggagaagcagagcgtgaccctgacctgcgaggtgaccggcaaccccgtgcccgagatcacctggcacaaggacggccagcccctgcaggaggacgaggcccaccacatcatcagcggcggcagattcctgcagatcaccaacgtgcaggtgccccacaccggcagatacacctgcctggccagcagccccgccggccacaagagcagaagcttcagcctgaacgtgttcgtgagccccaccatcgccggcgtgggcagcgacggcaaccccgaggacgtgaccgtgatcctgaacagccccaccagcctggtgtgcgaggcctacagctacccccccgccaccatcacctggttcaaggacggcacccccctggagagcaacagaaacatcagaatcctgcccggcggcagaaccctgcagatcctgaacgcccaggaggacaacgccggcagatacagctgcgtggccaccaacgaggccggcgagatgatcaagcactacgaggtgaaggtgtacatcccccccatcatcaacaagggcgacctgtggggccccggcctgagccccaaggaggtgaagatcaaggtgaacaacaccctgaccctggagtgcgaggcctacgccatccccagcgccagcctgagctggtacaaggacggccagcccctgaagagcgacgaccacgtgaacatcgccgccaacggccacaccctgcagatcaaggaggcccagatcagcgacaccggcagatacacctgcgtggccagcaacatcgccggcgaggacgagctggacttcgacgtgaacatccaggtgccccccagcttccagaagctgtgggagatcggcaacatgctggacaccggcagaaacggcgaggccaaggacgtgatcatcaacaaccccatcagcctgtactgcgagaccaacgccgcccccccccccaccctgacctggtacaaggacggccaccccctgaccagcagcgacaaggtgctgatcctgcccggcggcagagtgctgcagatccccagagccaaggtggaggacgccggcagatacacctgcgtggccgtgaacgaggccggcgaggacagcctgcagtacgacgtgagagtgctggtgccccccatcatcaagggcgccaacagcgacctgcccgaggaggtgaccgtgctggtgaacaagagcgccctgatcgagtgcctgagcagcggcagccccgcccccagaaacagctggcagaaggacggccagcccctgctggaggacgaccaccacaagttcctgagcaacggcagaatcctgcagatcctgaacacccagatcaccgacatcggcagatacgtgtgcgtggccgagaacaccgccggcagcgccaagaagtacttcaacctgaacgtgcacgtgccccccagcgtgatcggccccaagagcgagaacctgaccgtggtggtgaacaacttcatcagcctgacctgcgaggtgagcggcttccccccccccgacctgagctggctgaagaacgagcagcccatcaagctgaacaccaacaccctgatcgtgcccggcggcagaaccctgcagatcatcagagccaaggtgagcgacggcggcgagtacacctgcatcgccatcaaccaggccggcgagagcaagaagaagttcagcctgaccgtgtacgtgccccccagcatcaaggaccacgacagcgagagcctgagcgtggtgaacgtgagagagggcaccagcgtgagcctggagtgcgagagcaacgccgtgcccccccccgtgatcacctggtacaagaacggcagaatgatcaccgagagcacccacgtggagatcctggccgacggccagatgctgcacatcaagaaggccgaggtgagcgacaccggccagtacgtgtgcagagccatcaacgtggccggcagagacgacaagaacttccacctgaacgtgtacgtgccccccagcatcgagggccccgagagagaggtgatcgtggagaccatcagcaaccccgtgaccctgacctgcgacgccaccggcatccccccccccaccatcgcctggctgaagaaccacaagagaatcgagaacagcgacagcctggaggtgagaatcctgagcggcggcagcaagctgcagatcgccagaagccagcacagcgacagcggcaactacacctgcatcgccagcaacatggagggcaaggcccagaagtactacttcctgagcatccaggtgccccccagcgtggccggcgccgagatccccagcgacgtgagcgtgctgctgggcgagaacgtggagctggtgtgcaacgccaacggcatccccacccccctgatccagtggctgaaggacggcaagcccatcgccagcggcgagaccgagagaatcagagtgagcgccaacggcagcaccctgaacatctacggcgccctgaccagcgacaccggcaagtacacctgcgtggccaccaaccccgccggcgaggaggacagaatcttcaacctgaacgtgtacgtgacccccaccatcagaggcaacaaggacgaggccgagaagctgatgaccctggtggacaccagcatcaacatcgagtgcagagccaccggcaccccccccccccagatcaactggctgaagaacggcctgcccctgcccctgagcagccacatcagactgctggccgccggccaggtgatcagaatcgtgagagcccaggtgagcgacgtggccgtgtacacctgcgtggccagcaacagagccggcgtggacaacaagcactacaacctgcaggtgttcgccccccccaacatggacaacagcatgggcaccgaggagatcaccgtgctgaagggcagcagcaccagcatggcctgcatcaccgacggcacccccgcccccagcatggcctggctgagagacggccagcccctgggcctggacgcccacctgaccgtgagcacccacggcatggtgctgcagctgctgaaggccgagaccgaggacagcggcaagtacacctgcatcgccagcaacgaggccggcgaggtgagcaagcacttcatcctgaaggtgctggagcccccccacatcaacggcagcgaggagcacgaggagatcagcgtgatcgtgaacaaccccctggagctgacctgcatcgccagcggcatccccgcccccaagatgacctggatgaaggacggcagacccctgccccagaccgaccaggtgcagaccctgggcggcggcgaggtgctgagaatcagcaccgcccaggtggaggacaccggcagatacacctgcctggccagcagccccgccggcgacgacgacaaggagtacctggtgagagtgcacgtgccccccaacatcgccggcaccgacgagcccagagacatcaccgtgctgagaaacagacaggtgaccctggagtgcaagagcgacgccgtgcccccccccgtgatcacctggctgagaaacggcgagagactgcaggccacccccagagtgagaatcctgagcggcggcagatacctgcagatcaacaacgccgacctgggcgacaccgccaactacacctgcgtggccagcaacatcgccggcaagaccaccagagagttcatcctgaccgtgaacgtgccccccaacatcaagggcggcccccagagcctggtgatcctgctgaacaagagcaccgtgctggagtgcatcgccgagggcgtgcccacccccagaatcacctggagaaaggacggcgccgtgctggccggcaaccacgccagatacagcatcctggagaacggcttcctgcacatccagagcgcccacgtgaccgacaccggcagatacctgtgcatggccaccaacgccgccggcaccgacagaagaagaatcgacctgcaggtgcacgtgccccccagcatcgcccccggccccaccaacatgaccgtgatcgtgaacgtgcagaccaccctggcctgcgaggccaccggcatccccaagcccagcatcaactggagaaagaacggccacctgctgaacgtggaccagaaccagaacagctacagactgctgagcagcggcagcctggtgatcatcagccccagcgtggacgacaccgccacctacgagtgcaccgtgaccaacggcgccggcgacgacaagagaaccgtggacctgaccgtgcaggtgccccccagcatcgccgacgagcccaccgacttcctggtgaccaagcacgcccccgccgtgatcacctgcaccgccagcggcgtgcccttccccagcatccactggaccaagaacggcatcagactgctgcccagaggcgacggctacagaatcctgagcagcggcgccatcgagatcctggccacccagctgaaccacgccggcagatacacctgcgtggccagaaacgccgccggcagcgcccacagacacgtgaccctgcacgtgcacgagccccccgtgatccagccccagcccagcgagctgcacgtgatcctgaacaaccccatcctgctgccctgcgaggccaccggcacccccagccccttcatcacctggcagaaggagggcatcaacgtgaacaccagcggcagaaaccacgccgtgctgcccagcggcggcctgcagatcagcagagccgtgagagaggacgccggcacctacatgtgcgtggcccagaaccccgccggcaccgccctgggcaagatcaagctgaacgtgcaggtgccccccgtgatcagcccccacctgaaggagtacgtgatcgccgtggacaagcccatcaccctgagctgcgaggccgacggcctgcccccccccgacatcacctggcacaaggacggcagagccatcgtggagagcatcagacagagagtgctgagcagcggcagcctgcagatcgccttcgtgcagcccggcgacgccggccactacacctgcatggccgccaacgtggccggcagcagcagcaccagcaccaagctgaccgtgcacgtgccccccagaatcagaagcaccgagggccactacaccgtgaacgagaacagccaggccatcctgccctgcgtggccgacggcatccccacccccgccatcaactggaagaaggacaacgtgctgctggccaacctgctgggcaagtacaccgccgagccctacggcgagctgatcctggagaacgtggtgctggaggacagcggcttctacacctgcgtggccaacaacgccgccggcgaggacacccacaccgtgagcctgaccgtgcacgtgctgcccaccttcaccgagctgcccggcgacgtgagcctgaacaagggcgagcagctgagactgagctgcaaggccaccggcatccccctgcccaagctgacctggaccttcaacaacaacatcatccccgcccacttcgacagcgtgaacggccacagcgagctggtgatcgagagagtgagcaaggaggacagcggcacctacgtgtgcaccgccgagaacagcgtgggcttcgtgaaggccatcggcttcgtgtacgtgaaggagccccccgtgttcaagggcgactaccccagcaactggatcgagcccctgggcggcaacgccatcctgaactgcgaggtgaagggcgaccccacccccaccatccagtggaacagaaagggcgtggacatcgagatcagccacagaatcagacagctgggcaacggcagcctggccatctacggcaccgtgaacgaggacgccggcgactacacctgcgtggccaccaacgaggccggcgtggtggagagaagcatgagcctgaccctgcagagcccccccatcatcaccctggagcccgtggagaccgtgatcaacgccggcggcaagatcatcctgaactgccaggccaccggcgagccccagcccaccatcacctggagcagacagggccacagcatcagctgggacgacagagtgaacgtgctgagcaacaacagcctgtacatcgccgacgcccagaaggaggacaccagcgagttcgagtgcgtggccagaaacctgatgggcagcgtgctggtgagagtgcccgtgatcgtgcaggtgcacggcggcttcagccagtggagcgcctggagagcctgcagcgtgacctgcggcaagggcatccagaagagaagcagactgtgcaaccagcccctgcccgccaacggcggcaagccctgccagggcagcgacctggagatgagaaactgccagaacaagccctgccccgtggacggcagctggagcgagtggagcctgtgggaggagtgcaccagaagctgcggcagaggcaaccagaccagaaccagaacctgcaacaaccccagcgtgcagcacggcggcagaccctgcgagggcaacgccgtggagatcatcatgtgcaacatcagaccctgccccgtgcacggcgcctggagcgcctggcagccctggggcacctgcagcgagagctgcggcaagggcacccagaccagagccagactgtgcaacaaccccccccccgccttcggcggcagctactgcgacggcgccgagacccagatgcaggtgtgcaacgagagaaactgccccatccacggcaagtgggccacctgggccagctggagcgcctgcagcgtgagctgcggcggcggcgccagacagagaaccagaggctgcagcgaccccgtgccccagtacggcggcagaaagtgcgagggcagcgacgtgcagagcgacttctgcaacagcgacccctgccccacccacggcaactggagcccctggagcggctggggcacctgcagcagaacctgcaacggcggccagatgagaagatacagaacctgcgacaaccccccccccagcaacggcggcagagcctgcggcggccccgacagccagatccagagatgcaacaccgacatgtgccccgtggacggcagctggggcagctggcacagctggagccagtgcagcgccagctgcggcggcggcgagaagaccagaaagagactgtgcgaccaccccgtgcccgtgaagggcggcagaccctgccccggcgacaccacccaggtgaccagatgcaacgtgcaggcctgccccggcggcccccagagagccagaggcagcgtgatcggcaacatcaacgacgtggagttcggcatcgccttcctgaacgccaccatcaccgacagccccaacagcgacaccagaatcatcagagccaagatcaccaacgtgcccagaagcctgggcagcgccatgagaaagatcgtgagcatcctgaaccccatctactggaccaccgccaaggagatcggcgaggccgtgaacggcttcaccctgaccaacgccgtgttcaagagagagacccaggtggagttcgccaccggcgagatcctgcagatgagccacatcgccagaggcctggacagcgacggcagcctgctgctggacatcgtggtgagcggctacgtgctgcagctgcagagccccgccgaggtgaccgtgaaggactacaccgaggactacatccagaccggccccggccagctgtacgcctacagcaccagactgttcaccatcgacggcatcagcatcccctacacctggaaccacaccgtgttctacgaccaggcccagggcagaatgcccttcctggtggagaccctgcacgccagcagcgtggagagcgactacaaccagatcgaggagaccctgggcttcaagatccacgccagcatcagcaagggcgacagaagcaaccagtgccccagcggcttcaccctggacagcgtgggccccttctgcgccgacgaggacgagtgcgccgccggcaacccctgcagccacagctgccacaacgccatgggcacctactactgcagctgccccaagggcctgaccatcgccgccgacggcagaacctgccaggacatcgacgagtgcgccctgggcagacacacctgccacgccggccaggactgcgacaacaccatcggcagctacagatgcgtggtgagatgcggcagcggcttcagaagaaccagcgacggcctgagctgccaggacatcaacgagtgccaggagagcagcccctgccaccagagatgcttcaacgccatcggcagcttccactgcggctgcgagcccggctaccagctgaagggcagaaagtgcatggacgtgaacgagtgcagacagaacgtgtgcagacccgaccagcactgcaagaacaccagaggcggctacaagtgcatcgacctgtgccccaacggcatgaccaaggccgagaacggcacctgcatcgacatcgacgagtgcaaggacggcacccaccagtgcagatacaaccagatctgcgagaacaccagaggcagctacagatgcgtgtgccccagaggctacagaagccagggcgtgggcagaccctgcatggacatcaacgagtgcgagcaggtgcccaagccctgcgcccaccagtgcagcaacacccccggcagcttcaagtgcatctgcccccccggccagcacctgctgggcgacggcaagagctgcgccggcctggagagactgcccaactacggcacccagtacagcagctacaacctggccagattcagccccgtgagaaacaactaccagccccagcagcactacagacagtacagccacctgtacagcagctacagcgagtacagaaacagcagaaccagcctgagcagaaccagaagaaccatcagaaagacctgccccgagggcagcgaggccagccacgacacctgcgtggacatcgacgagtgcgagaacaccgacgcctgccagcacgagtgcaagaacaccttcggcagctaccagtgcatctgcccccccggctaccagctgacccacaacggcaagacctgccaggacatcgacgagtgcctggagcagaacgtgcactgcggccccaacagaatgtgcttcaacatgagaggcagctaccagtgcatcgacaccccctgcccccccaactaccagagagaccccgtgagcggcttctgcctgaagaactgcccccccaacgacctggagtgcgccctgagcccctacgccctggagtacaagctggtgagcctgcccttcggcatcgccaccaaccaggacctgatcagactggtggcctacacccaggacggcgtgatgcaccccagaaccaccttcctgatggtggacgaggagcagaccgtgcccttcgccctgagagacgagaacctgaagggcgtggtgtacaccaccagacccctgagagaggccgagacctacagaatgagagtgagagccagcagctacagcgccaacggcaccatcgagtaccagaccaccttcatcgtgtacatcgccgtgagcgcctacccctactag

SEQ ID NO: 222323 - protein, 579 aa, Artificial Sequence
  derived and/or modified sequence
MFFRVFLHFIRSHSATAVDFLPVMVHRLPVFKRYMGNTPQKKAVFGQCRGLPCVAPLLTTVEEAPRGISARVWGHFPKWLNGSLLRIGPGKFEFGKDKYNHWFDGMALLHQFRMAKGTVTYRSKFLQSDTYKANSAKNRIVISEFGTLALPDPCKNVFERFMSRFELPGKAAAMTDNTNVNYVRYKGDYYLCTETNFMNKVDIETLEKTEKVDWSKFIAVNGATAHPHYDLDGTAYNMGNSFGPYGFSYKVIRVPPEKVDLGETIHGVQVICSIASTEKGKPSYYHSFGMTRNYIIFIEQPLKMNLWKIATSKIRGKAFSDGISWEPQCNTRFHVVEKRTGQLLPGRYYSKPFVTFHQINAFEDQGCVIIDLCCQDNGRTLEVYQLQNLRKAGEGLDQVHNSAAKSFPRRFVLPLNVSLNAPEGDNLSPLSYTSASAVKQADGTIWCSHENLHQEDLEKEGGIEFPQIYYDRFSGKKYHFFYGCGFRHLVGDSLIKVDVVNKTLKVWREDGFYPSEPVFVPAPGTNEEDGGVILSVVITPNQNESNFILVLDAKNFEELGRAEVPVQMPYGFHGTFIPI

SEQ ID NO: 222324 - protein, 545 aa, Artificial Sequence
  derived and/or modified sequence
MGNTPQKKAVFGQCRGLPCVAPLLTTVEEAPRGISARVWGHFPKWLNGSLLRIGPGKFEFGKDKYNHWFDGMALLHQFRMAKGTVTYRSKFLQSDTYKANSAKNRIVISEFGTLALPDPCKNVFERFMSRFELPGKAAAMTDNTNVNYVRYKGDYYLCTETNFMNKVDIETLEKTEKVDWSKFIAVNGATAHPHYDLDGTAYNMGNSFGPYGFSYKVIRVPPEKVDLGETIHGVQVICSIASTEKGKPSYYHSFGMTRNYIIFIEQPLKMNLWKIATSKIRGKAFSDGISWEPQCNTRFHVVEKRTGQLLPGRYYSKPFVTFHQINAFEDQGCVIIDLCCQDNGRTLEVYQLQNLRKAGEGLDQVHNSAAKSFPRRFVLPLNVSLNAPEGDNLSPLSYTSASAVKQADGTIWCSHENLHQEDLEKEGGIEFPQIYYDRFSGKKYHFFYGCGFRHLVGDSLIKVDVVNKTLKVWREDGFYPSEPVFVPAPGTNEEDGGVILSVVITPNQNESNFILVLDAKNFEELGRAEVPVQMPYGFHGTFIPI

SEQ ID NO: 222325 - DNA, 1740 bp, Artificial Sequence
  derived and/or modified sequence
atgttctttagggtatttttacatttcattaggagccatagtgccactgctgtagattttttaccagtcatggtgcacaggctccctgtctttaaaagatacatgggtaacacaccccagaagaaagccgtgttcggtcagtgtcgtggtctcccttgcgtcgctcctctgctcactaccgtggaagaagcaccacggggaattagcgctcgagtgtggggacattttccaaagtggctgaatggctcactgctcagaatcggacccggcaaatttgagttcgggaaggataaatataatcattggttcgatggcatggccctgttacaccagtttcgcatggcaaaggggaccgtgacctaccgcagtaaattccttcagagtgatacgtacaaagcaaattcggccaaaaatcgcatcgtgatctccgagttcggtactctggctctaccagacccctgtaagaatgtatttgagcggtttatgtctcggttcgaactgcccggaaaggccgccgcaatgacagacaatacaaatgtcaattatgtgcgctataaaggtgattactatctgtgtacagaaaccaactttatgaacaaggtagacatcgagactttggaaaaaactgaaaaggtggactggtccaagtttattgccgtaaatggagcaactgctcacccccattacgaccttgacggtaccgcatacaacatgggtaactcttttggtccctatggtttcagttataaagtaattcgtgtcccgcccgagaaggtcgatctgggagaaacgatccacggagtgcaggtgatctgctctattgcctctaccgaaaaaggaaagccatcgtactaccatagcttcggcatgacaaggaactacattatctttatcgaacagcccctgaagatgaatctctggaaaattgccacttctaagatccgcggcaaagccttcagtgacggcatcagttgggagccccagtgtaataccagatttcacgtggttgagaagcgcaccggccagctcctccccggccggtactactcaaaaccttttgtgacctttcaccagattaatgcattcgaagatcaggggtgcgtcatcatcgacttgtgctgtcaggacaacggccggacgttggaagtttaccaactgcagaatcttaggaaggcaggggaaggattagatcaggtgcataactccgcggctaaaagtttccctcggaggtttgtactgccacttaacgtctcacttaacgctccagaaggtgataacctgtctcccttgtcttatacctccgcctccgctgtgaaacaggctgatggtactatttggtgcagccatgagaacctgcatcaggaggatttagagaaagagggagggatcgaattcccacaaatatattacgataggttctccggcaagaaataccatttcttttatggttgcggcttccgccacctggtaggggactctttgataaaggtcgatgtggtgaacaagaccctcaaggtgtggagggaggacggcttttatcctagcgagcccgtgttcgttccggctccgggtacaaatgaggaggacggtggtgttatcctgtcagtggttatcacgccaaaccagaacgagagtaattttatccttgtgctcgatgccaaaaactttgaagaactgggcagggcagaggtcccagtccagatgccctacggctttcatggtacctttattcctatctag

SEQ ID NO: 222326 - DNA, 1638 bp, Artificial Sequence
  derived and/or modified sequence
atgggtaacaccccccagaagaaagccgtcttcggacagtgccgtggactgccctgtgtcgctcctctgctcacaaccgttgaagaggctccacggggaatctcagcgagagtgtggggtcacttccctaagtggcttaacggaagcctcctgcgaattggacctggcaagttcgaatttggcaaagacaagtataaccactggtttgacggtatggcattattacatcagtttcggatggccaagggcaccgtgacataccgttcaaaattcttgcagtccgacacctacaaggccaacagcgcaaagaatcgtattgtgatctcagaattcgggactctggcactcccggacccatgcaaaaacgtttttgaacgctttatgtcccggtttgagctgcctggaaaggccgcagccatgacggataataccaacgtgaactacgtccgttataagggtgattactatctatgcaccgagaccaactttatgaataaggtggatatagaaactcttgagaaaaccgaaaaggtggactggtctaaatttatcgccgtcaacggggcaactgcgcatcctcattatgacttagacggcaccgcatataacatgggcaacagttttggaccctatgggtttagttacaaggtgattcgcgttcctccagagaaggtggacctaggtgaaacaattcacggcgtgcaagtcatatgctccatcgcctctactgagaagggaaagccctcttattatcattctttcggcatgacacggaactacatcattttcatcgaacagccattgaagatgaacctatggaagatcgcaaccagcaagattcggggcaaagcattctccgatggaatctcttgggaaccccagtgtaataccaggttccacgtagtcgagaagaggaccgggcagctcctgcctggaagatattactccaagcccttcgtaacatttcaccagatcaatgcctttgaagaccaggggtgcgtcatcatagatttatgctgccaggacaacgggaggacgctggaggtttaccagctgcaaaacctgcgcaaagcaggggaaggactagatcaggtgcacaacagcgcggctaagtccttcccaagaaggtttgtcctaccactgaacgtttcactgaatgccccagagggggacaacctctcaccactgagctacacttctgcttctgccgttaagcaggcagacggcacaatttggtgttcccacgaaaacctgcaccaagaggatcttgaaaaggagggtggcatcgagttcccacagatctattacgacagattctcaggaaagaaatatcacttcttctatggctgtgggttccggcatctagtcggggatagcttaatcaaagtcgacgtggtcaacaagacccttaaagtgtggagagaagatggtttctacccatctgagcctgtgtttgtacctgcaccaggaaccaacgaagaagacgggggcgtgattctttctgttgttataacgcctaaccagaatgagtctaacttcattcttgtcctagatgcaaaaaattttgaagagctcggcagggcagaagtacccgtgcagatgccttatggtttccacggcacatttatccctatttag

SEQ ID NO: 222327 - DNA, 1638 bp, Artificial Sequence
  derived and/or modified sequence
atgggaaatacaccgcagaagaaggcagtgttcggtcagtgtcgtgggcttccctgtgtcgcccctctgttaactacggtcgaggaagcacccaggggaattagcgccagggtctggggccactttccaaagtggcttaacgggtcactgctacgcattggccccggtaagttcgagttcggtaaggacaaatacaaccactggttcgacggaatggcgctcctccatcagttccgtatggcgaaaggcaccgtgacctaccggtctaagttcctgcagagtgacacgtacaaggccaactctgcaaaaaaccgaatcgtgataagcgagttcggcactttggccctgccagatccttgcaagaacgtctttgagcgcttcatgtcgcgcttcgagcttcctggcaaagcagctgccatgacagacaataccaatgtgaattatgtgagatacaaaggggactattatctgtgcacggagactaactttatgaataaagtggacattgagacactggagaagactgagaaagttgactggtcgaaatttatcgcagttaatggcgccaccgctcatccgcattatgacttggacggaaccgcgtacaacatgggaaatagtttcggcccctacggcttttcctataaagtaatccgcgttcctccagagaaagtggatttgggagaaaccatacatggggtgcaggtcatctgttctattgccagcaccgagaagggaaagccttcctactaccactctttcggcatgacgaggaattacatcatttttatagagcagcctctgaagatgaatctttggaagattgctaccagcaagattcgtggcaaagcgtttagcgacggtatttcttgggaacctcaatgcaatacccgcttccacgtagtggagaagcgtactggccaacttctgcccgggagatactatagtaaaccctttgtcaccttccaccaaatcaacgccttcgaagatcaggggtgcgtcatcattgacctctgctgtcaggacaacggccgcaccctggaagtttaccaacttcaaaaccttcgcaaggctggcgaagggttagatcaggtgcacaactcagcagccaaaagcttccccagacgcttcgtactgccgttgaatgtctctcttaacgccccagaaggcgacaacctgagccccctgtcctacacctcagcctctgctgtcaagcaggctgatggaaccatttggtgttcacatgagaacctgcaccaggaagatctggagaaggaaggggggattgagttcccccagatctactacgataggttcagtgggaagaaataccactttttctatggttgcggtttccgccatctggttggcgactcactgattaaggttgatgttgtcaataagacattaaaagtgtggagggaggatggcttctaccccagtgagccagtttttgtgcccgcccctggcaccaatgaggaggatggcggcgtgatcctgtcggtagtgattacgcccaatcaaaacgagagcaatttcatactagtacttgacgccaaaaacttcgaagaactgggcagggctgaggtgcctgtgcagatgccatacggttttcacggaacctttatcccaatctag

SEQ ID NO: 222328 - DNA, 1638 bp, Artificial Sequence
  derived and/or modified sequence
atggggaacaccccccagaaaaaggcagtctttggacaatgtcgtggacttccttgcgtagcccccctgttaaccacagtcgaggaggcaccacgcggcatctccgctagagtctgggggcacttcccgaaatggctcaacggctccctactacggatcggcccaggcaagttcgaattcggtaaggataagtacaaccactggttcgacggcatggctcttctgcatcagtttagaatggccaagggtactgtgacataccggagtaagtttcttcagtccgacacgtacaaagcaaactctgccaagaaccgcatcgtgatttctgaattcggcacactcgccctcccagacccatgcaagaatgtttttgagagattcatgtcccgatttgaactgcccgggaaagcagctgccatgacggataatactaatgtgaattacgtccgctataaaggagactactacctttgcacggaaaccaattttatgaacaaagtggacatcgagacactcgaaaagaccgagaaagttgattggagtaaattcattgctgtgaatggtgccaccgctcatccccactatgatttggatggaacagcatataatatgggaaactccttcgggccttatggtttttcatataaagttattagagtaccaccagagaaggtcgacctcggagaaacaatccatggcgtgcaggtgatctgttctatcgcctctacagagaagggaaagccatcctactaccattcctttgggatgactcggaactatattattttcatcgaacaacccctgaagatgaatctgtggaagatcgctactagcaagatccgagggaaggcatttagtgacggtataagttgggagccccagtgcaatactcggttccatgttgtggagaagagaacaggccagttgttgccagggcgttactactccaagccctttgtaacctttcatcagataaacgcatttgaagaccaggggtgcgtcatcattgacctgtgctgccaggacaatggccgaacactcgaggtgtaccagctgcagaacctacgaaaggcaggagaaggcctcgaccaggtgcataattcagcggcgaagagcttccctcggcggtttgtgctgcccctcaacgtaagtctcaatgcccccgagggagataatctgagccctctgtcctacaccagcgctagcgctgtcaagcaggcagatggtacaatatggtgttcacacgagaacctacaccaggaggatctggagaaagagggagggatcgaatttcctcagatttactacgacagattcagcggcaagaaataccattttttctacggatgtggttttaggcatctagtgggagactcactaataaaagtggacgttgttaacaaaacgttgaaggtgtggcgagaggatgggttctacccaagtgaacctgtgtttgtgccagccccaggcacaaacgaggaagacggcggtgtgatcctctccgtggttatcacaccaaatcagaacgaatccaactttatattggtgctagatgctaagaatttcgaggaactcgggagagccgaagttccagtccagatgccctacggcttccatgggacattcatccccatttag

SEQ ID NO: 222329 - DNA, 1740 bp, Artificial Sequence
  derived and/or modified sequence
atgttcttccgggtcttcctgcacttcatccgcagccacagcgccacagctgtggacttcctgcctgtgatggtgcaccggctgcctgtgttcaagcgctacatgggcaacaccccccagaagaaggctgtgtttggccagtgccggggcctgccctgtgtggcccccctgctgaccaccgtggaggaggccccccggggcatcagcgcccgggtgtggggccacttccccaagtggctgaatggcagcctgctgagaattggccctgggaagtttgaatttgggaaggacaagtacaaccactggtttgatggcatggccctgctgcaccagttcaggatggccaagggcaccgtgacctaccgcagcaagttcctgcagagcgacacctacaaggccaacagcgccaagaaccgcatcgtcatcagcgagtttggcaccctggccctgcctgacccctgcaagaatgtgtttgagcgcttcatgagcagatttgagctgcccgggaaggccgccgccatgacagacaacaccaacgtgaactacgtgcgctacaagggggactactacctgtgcacagagaccaacttcatgaacaaggtggacatcgagaccctggagaagacagagaaggtggactggagcaagttcatcgctgtgaatggagccacagcccacccccactatgacctggatggaacagcctacaacatgggcaacagctttggcccctacggcttctcctacaaggtgatccgggtgcccccagagaaggtggacctgggggagaccatccacggcgtgcaggtgatctgcagcatcgccagcacagagaagggcaagcccagctactaccacagctttggcatgaccaggaactacatcatcttcatcgagcagcccctgaagatgaacctgtggaagatcgccaccagcaagatccggggcaaggccttcagtgatggcatctcctgggagccccagtgcaacacccgcttccacgtggtggagaagaggacaggccagctgctgcccggccgctactacagcaagccctttgtgaccttccaccagatcaatgcctttgaggaccagggctgtgtgatcatcgacctgtgctgccaggacaatggaagaaccctggaggtgtaccagctgcagaacctgaggaaggccggggagggcctggaccaggtgcacaacagcgctgccaagagcttccccaggagatttgtgctgcccctgaatgtgtccctgaatgcccctgagggggacaacctgagccccctgagctacaccagcgccagcgctgtgaagcaggctgatggcaccatctggtgcagccatgagaacctgcaccaggaggacctggagaaggagggcggcatcgagttcccccagatctactatgaccgcttcagcggcaagaagtaccacttcttctacggctgcggcttccgccacctggtgggggacagcctcatcaaggtggatgtggtgaacaagaccctgaaggtgtggagagaagatggcttctaccccagcgagcctgtgtttgtgcctgcccctggcaccaatgaggaggatggaggagtcatcctgtctgtggtgatcacccccaaccagaatgaaagcaacttcatcctggtgctggatgccaagaactttgaggagctgggccgggcagaggtgcctgtgcagatgccctacggcttccacggcaccttcatccccatctag

SEQ ID NO: 222330 - DNA, 1638 bp, Artificial Sequence
  derived and/or modified sequence
atgggcaacaccccccagaagaaggctgtgtttggccagtgccggggcctgccctgtgtggcccccctgctgaccaccgtggaggaggccccccggggcatcagcgcccgggtgtggggccacttccccaagtggctgaatggcagcctgctgagaattggccctgggaagtttgaatttgggaaggacaagtacaaccactggtttgatggcatggccctgctgcaccagttcaggatggccaagggcaccgtgacctaccgcagcaagttcctgcagagcgacacctacaaggccaacagcgccaagaaccgcatcgtcatcagcgagtttggcaccctggccctgcctgacccctgcaagaatgtgtttgagcgcttcatgagcagatttgagctgcccgggaaggccgccgccatgacagacaacaccaacgtgaactacgtgcgctacaagggggactactacctgtgcacagagaccaacttcatgaacaaggtggacatcgagaccctggagaagacagagaaggtggactggagcaagttcatcgctgtgaatggagccacagcccacccccactatgacctggatggaacagcctacaacatgggcaacagctttggcccctacggcttctcctacaaggtgatccgggtgcccccagagaaggtggacctgggggagaccatccacggcgtgcaggtgatctgcagcatcgccagcacagagaagggcaagcccagctactaccacagctttggcatgaccaggaactacatcatcttcatcgagcagcccctgaagatgaacctgtggaagatcgccaccagcaagatccggggcaaggccttcagtgatggcatctcctgggagccccagtgcaacacccgcttccacgtggtggagaagaggacaggccagctgctgcccggccgctactacagcaagccctttgtgaccttccaccagatcaatgcctttgaggaccagggctgtgtgatcatcgacctgtgctgccaggacaatggaagaaccctggaggtgtaccagctgcagaacctgaggaaggccggggagggcctggaccaggtgcacaacagcgctgccaagagcttccccaggagatttgtgctgcccctgaatgtgtccctgaatgcccctgagggggacaacctgagccccctgagctacaccagcgccagcgctgtgaagcaggctgatggcaccatctggtgcagccatgagaacctgcaccaggaggacctggagaaggagggcggcatcgagttcccccagatctactatgaccgcttcagcggcaagaagtaccacttcttctacggctgcggcttccgccacctggtgggggacagcctcatcaaggtggatgtggtgaacaagaccctgaaggtgtggagagaagatggcttctaccccagcgagcctgtgtttgtgcctgcccctggcaccaatgaggaggatggaggagtcatcctgtctgtggtgatcacccccaaccagaatgaaagcaacttcatcctggtgctggatgccaagaactttgaggagctgggccgggcagaggtgcctgtgcagatgccctacggcttccacggcaccttcatccccatctag

SEQ ID NO: 222331 - DNA, 1740 bp, Artificial Sequence
  derived and/or modified sequence
atgttcttccgggtgttcctgcacttcatccggagccacagcgccacagccgtggatttccttcccgtgatggtgcatcggctgcccgtattcaagcggtatatggggaacaccccacagaagaaggccgtatttggtcagtgccggggtctcccctgcgtagctccgctgttaacaacagtagaagaggcgcctcggggcataagtgcacgggtatggggccatttccctaagtggcttaacggttctctcctccgtataggcccgggtaaatttgagttcggtaaggataaatacaaccactggtttgacggtatggcactgcttcaccagtttaggatggccaaagggaccgtgacctatagaagcaagttcctacagtccgacacatacaaagccaactccgcaaagaacagaatcgtcatttccgagtttggaacgctggctctgcccgacccttgcaaaaacgtattcgagaggtttatgagtaggtttgagctgcctggcaaggccgccgctatgaccgacaataccaacgtcaactatgtgcgctacaaaggagactattatctgtgtacggagacaaactttatgaataaggtggacattgagaccctcgaaaagacggagaaagtggactggagtaagttcatagccgtgaacggagcgactgcacatccacactacgatttggacggcacggcctataatatgggtaacagcttcggcccgtacggcttctcttacaaagtaatccgcgtaccacctgagaaggtggatttaggtgagaccatccatggtgtacaggtgatctgcagtatagcctctaccgaaaaaggcaaaccctcctattaccattcgtttggaatgacccgcaattacatcatatttattgagcagccactcaagatgaatttgtggaagatagcaacatcgaaaattcggggcaaagcgttctctgacgggattagctgggagccgcagtgtaatacgagattccacgtcgtggagaagcggactggtcaactactgcctggaagatactattcgaaaccctttgtaacttttcatcagatcaacgcctttgaggaccaaggctgtgtgatcatcgatctgtgctgccaggataacggacggactctcgaggtttaccagcttcagaacctaaggaaggccggggagggactcgaccaggtccacaactccgcagccaagtcattccctagacggtttgtgctgcccctaaacgtctctctgaatgccccagaaggagacaacctctcccctctttcatatacgagcgcctccgcggtcaaacaggctgatggcacaatctggtgtagtcacgagaacctccaccaggaggacctagaaaaagagggcggcattgagttcccccagatttactacgacagatttagcgggaaaaaatatcactttttttacggttgcggctttcgccacttggtgggtgatagcctaattaaggtggacgtagttaacaaaaccctgaaggtgtggcgcgaggacggattttacccctccgaacctgtgtttgtgcctgctccagggactaacgaggaagatggcggcgtcatcctgtccgtcgttatcacgcctaaccagaacgagtcgaactttatcttggtcctggacgccaagaactttgaggagttaggacgcgccgaggtgcctgtgcagatgccctacggcttccatggcactttcatcccgatctag

SEQ ID NO: 222332 - DNA, 1638 bp, Artificial Sequence
  derived and/or modified sequence
atgggcaacaccccccagaagaaggccgtgttcggccagtgccgggggttaccatgtgtagccccccttctgacaaccgtagaagaggcccctcgaggcatatcagccagggtatggggccacttccctaagtggctgaatggatctctgcttcggattggcccaggaaagtttgaattcggcaaggacaaatacaaccattggttcgacgggatggcgttacttcatcagtttcggatggccaagggcactgtaacatatagaagtaagtttctgcagtctgacacctataaggccaattccgctaagaacaggatcgttatttcggagttcggaaccttggccttacccgacccgtgcaaaaatgtgtttgagaggttcatgagcagattcgagttgcctggaaaggcagctgctatgacagacaacactaacgtgaactacgttcggtacaaaggcgactattatttgtgtacagagacaaatttcatgaacaaggtcgatattgagaccttggaaaaaaccgaaaaggtcgattggtccaagttcattgccgtaaacggcgccactgctcaccctcattatgacttagatgggaccgcttataatatgggcaactcttttggcccttatggcttctcttacaaagtgatccgagtgccacctgagaaggtcgacctaggggagacaatccatggggtgcaggtcatttgcagtatcgcttctaccgagaaggggaagccttcctattatcatagctttggaatgacccgcaattacatcattttcatcgaacagcccctcaaaatgaatctgtggaagatcgcgacgtcaaagatccggggaaaggccttctccgatgggatctcctgggaaccacagtgtaacacacgctttcatgttgtagagaagcgcactggccagctcctacccggaaggtactattccaagccttttgtgacctttcaccagatcaatgctttcgaagatcaagggtgcgtgatcattgacctctgttgccaagacaatggaaggacattggaggtataccaactacagaacttacgaaaggcaggtgaaggattagaccaggtgcacaattcagccgccaaatcttttccacggcggttcgtgctgcccctcaatgtttctctgaatgcccctgaaggtgacaacctctcacccctgtcttacacatccgccagcgcagtgaagcaggccgatggaacaatctggtgctcacacgagaatttgcatcaagaggacttggagaaggaaggcgggatcgaatttcctcagatatactatgaccggttcagcggaaagaagtaccactttttttacggatgcggcttcagacacctcgtgggggactcactcattaaagtggacgtggttaacaaaaccttgaaggtctggcgcgaagatggcttctacccctctgaaccagttttcgtgcccgcacccggcacaaacgaggaggacggtggagtgattctgtcggtggtcatcaccccaaaccagaacgagagcaatttcatcttggtcctagacgctaagaatttcgaggaactgggcagggcagaagtacctgtacagatgccttacggcttccatggcacgtttatacctatttag

SEQ ID NO: 222333 - DNA, 1638 bp, Artificial Sequence
  derived and/or modified sequence
atgggcaacaccccccagaagaaggccgtgttcggccagtgccggggtctgccatgcgtcgcgcctctcctcaccaccgtggaagaggccccccgcgggatcagcgctagggtgtggggacatttccctaagtggctgaatgggagccttctgcgcatcggccccggtaagtttgagtttggcaaggacaagtataatcactggtttgatgggatggccctgctccatcagttcagaatggcaaaagggacagtcacctatcgctccaaatttctgcagagcgacacatataaggccaactctgccaagaatcgaattgtcatctcggagttcgggacgcttgctctccctgacccgtgtaaaaatgtattcgagaggttcatgagcaggttcgagctcccagggaaggcagctgcgatgactgacaatactaatgtcaactacgtgagatacaagggagactactacctctgcacagagaccaatttcatgaacaaggttgatattgagacactcgagaagaccgagaaggttgattggtccaaattcatcgctgtcaacggggctacagctcatccccactatgaccttgacggtactgcctataacatgggaaattccttcggaccttacgggtttagctacaaggtgatcagggtgcctcccgagaaagtcgaccttggagagacaatccacggagtccaggtgatctgtagcattgcttctacagagaaaggaaaaccctcctactatcactcctttgggatgacccgcaattatatcatcttcatagagcaaccgctcaagatgaatttatggaagattgctacctcgaaaatacgcggcaaagctttttctgacggcatctcatgggaacctcagtgcaatacacgcttccacgtggtggaaaaacggactggacaattgctgcccggcagatactattctaaacctttcgtgaccttccaccaaataaacgccttcgaggaccagggatgtgtaattattgatctgtgctgccaagacaatggcagaacactggaagtctaccaactgcagaacttgaggaaagccggggaaggtttggaccaggtgcataattctgcggccaaaagtttcccccggcgtttcgtgctgccactgaacgtcagcctaaacgcacctgaaggagataatctttctcccctttcctacacttcagctagcgcggtgaaacaggctgacggaactatttggtgcagtcatgaaaaccttcatcaggaggacctcgagaaggaaggaggaattgagttcccgcagatctattacgacagattcagcggaaagaaataccactttttttacggttgcggctttcggcatctggtcggtgactcgttaataaaggttgacgtggtgaacaaaaccctcaaggtgtggcgggaggatggcttctacccgagcgagcccgtgttcgttccagctcctgggaccaatgaggaggatggcggcgtcatcctgtccgtcgttatcacgcccaaccaaaatgaatcgaactttatcttggtactggacgccaagaactttgaggagctagggcgcgctgaggtgcccgtgcagatgccttatggcttccacggaacctttatccccatctag

SEQ ID NO: 222334 - DNA, 1638 bp, Artificial Sequence
  derived and/or modified sequence
atgggcaacaccccccagaagaaggccgtgttcggccagtgccggggattaccgtgcgtggcccccctgctcactactgttgaagaagccccgcgagggattagcgccagagtgtgggggcacttccccaaatggctgaacgggtccctgctgcggattgggccaggaaagttcgagttcggaaaagataagtacaaccattggtttgacgggatggcactgcttcatcaatttaggatggctaaggggaccgtcacttatcggtccaaatttctgcagtccgatacctataaggctaactcagctaagaaccggattgtgatttctgaattcggcaccttggccctgccagacccctgcaagaacgttttcgagagattcatgtctcgctttgagctgccaggcaaagcagccgcaatgactgacaacacaaacgtcaattacgtgcgttacaaaggagattattatctgtgcaccgagactaacttcatgaacaaagtggacattgaaactttggagaaaacggaaaaggtcgattggtccaagttcatagccgtgaatggggctaccgcgcatcctcattacgacctggacggcacggcctacaacatgggaaacagctttggcccttatggttttagctacaaggttattagggtccctccagagaaggttgacctgggagaaaccatccacggcgtccaagtgatctgttctattgctagcactgaaaaagggaagcccagctactatcatagctttgggatgaccagaaactacatcatcttcatcgaacagcctctcaagatgaatctatggaaaattgccacgtccaaaataaggggtaaagccttcagcgacgggatctcctgggaacctcaatgtaatacaagatttcatgtggtcgaaaagagaactggccagctgctgccagggcgatattattctaagcctttcgttacgttccatcagatcaacgctttcgaagatcagggctgcgtcattatcgacctgtgctgtcaagacaatggccggacactggaagtataccaactgcagaatctccgcaaagccggcgaagggctagatcaagtgcacaacagtgcagcgaagtcctttcctagaagatttgtgctgcctctgaacgtgagccttaacgcgccagaaggggataaccttagtcccctttcctacacttccgctagcgccgtaaaacaagccgatggcaccatttggtgctcccacgaaaacctgcaccaggaggatctagagaaggaggggggtatcgagtttcctcagatatactatgatcggttttcaggcaagaaatatcacttcttctacggatgtggctttcgccacctcgtgggggactctctgatcaaagttgatgtagtgaacaagactcttaaggtttggcgcgaagatggcttctatccctctgagcctgtgtttgttcccgccccgggcacgaacgaagaggatgggggcgtcatactcagtgtcgttataacgcccaaccagaatgagtcaaacttcatactggtgcttgatgcgaagaacttcgaggaactggggcgtgccgaagttccagtacagatgccgtatgggtttcacggcacgttcattccaatctag

SEQ ID NO: 222335 - DNA, 1740 bp, Artificial Sequence
  derived and/or modified sequence
atgttttttcgagtctttctgcattttattcgaagccactccgctactgcagtggacttccttccagtcatggtccacagactccccgtgtttaaacgttatatgggaaatacccctcagaagaaggcggtatttgggcaatgtcgcggactgccatgcgtagcccctctgctgactacagtggaggaagcaccccgagggataagcgcccgtgtgtggggacactttcccaagtggctaaacggcagcttattacgcataggtccagggaagtttgagttcgggaaggataaatataaccattggtttgacggaatggccctgctccaccaattccgtatggctaaggggaccgttacctatcggagtaaattcctgcagagcgatacctacaaagcaaactctgccaaaaatcgtatcgtgattagcgaatttgggacgctggccctgcctgatccttgtaagaacgtattcgaacgattcatgtcaagattcgaactgccaggcaaggccgctgccatgactgacaacacgaatgtgaactatgtcaggtacaagggggactactatctttgcactgaaacaaactttatgaataaagtcgatattgagactttggaaaaaactgagaaggtcgactggtccaaattcattgccgtcaacggggcaacagcacatcctcattatgatctagatggtaccgcatataacatgggaaactccttcggcccttatggttttagctataaagtgataagagtgccgccagagaaagttgacctcggagagacaatccacggagtacaggttatctgtagcatcgcctcaaccgaaaaagggaagcccagctattaccatagcttcgggatgacccggaattacatcatattcattgaacagccacttaaaatgaacctctggaagatcgccactagtaaaatcaggggcaaagcattctctgatggaattagctgggagccacaatgtaacacgcgtttccacgtggtggaaaaacgtactggccagcttctgcccggtcgctattatagtaagccattcgtcacgttccaccaaatcaacgcatttgaggaccaaggatgcgtcatcatcgacctctgctgccaagacaacggacgcaccctggaggtctaccaacttcagaacctaaggaaggctggggaaggcctcgaccaggttcacaattcagccgctaaaagctttccacgacgctttgtcctccccttgaatgtatccttgaacgctcctgagggcgacaacttgtcccccctgtcatatacttccgcaagtgccgttaagcaggccgacggcaccatttggtgctcccacgagaatctgcatcaagaagatctggaaaaggagggagggattgagttcccacaaatatattacgacaggttttccgggaagaagtaccacttcttttacggctgcggtttcagacacttggttggagattccctcatcaaggtcgatgtggtcaacaaaactctgaaagtgtggagagaggacggcttttatccaagcgagccagtgttcgtccctgctcccggtaccaatgaggaggacggcggtgtgatcttgtcagtagtgattacaccaaaccaaaatgagagtaactttatcctggttctggatgctaagaattttgaagaacttggaagagccgaggtcccagtacagatgccatatggattccacggtacatttatccccatctag

SEQ ID NO: 222336 - DNA, 1638 bp, Artificial Sequence
  derived and/or modified sequence
atgggtaacacaccacagaagaaggcagtctttggccagtgtcgtgggctgccttgtgtggctcctttgttaactaccgttgaggaggcccctagaggaatatctgccagagtttggggtcattttcctaagtggctcaatggctctctgttgcgcatcgggccaggcaaatttgaatttggaaaagacaagtataaccattggttcgacggcatggccttgctgcatcagttccggatggcaaaaggcaccgtaacttaccggtccaagttcctccaaagcgacacttataaggctaattctgccaagaatcggatagtcatctcagaatttggcacattggccctgcccgacccttgcaaaaacgtcttcgaacggtttatgtcccgttttgaactgcctggcaaggccgctgcgatgaccgataatactaacgtgaattatgtgcgatacaagggagattactatctgtgtactgagacaaacttcatgaataaggtagacatagagacattggagaagaccgagaaggtcgattggtctaagttcatagcagtgaatggcgctaccgcccacccccactacgatctggatgggactgcttacaacatggggaatagtttcggaccctacgggttctcctacaaggtaatcagggtgccacccgagaaggtggacttgggagaaacaatccatggggttcaggtcatatgctctatcgcgtcaacggagaagggtaagccctcttattaccactcatttggcatgaccaggaattacatcatttttatcgaacaacccttgaagatgaacctatggaagatcgccacgagcaagatcagggggaaggcgtttagcgacgggatcagctgggaaccccagtgcaacactcgattccatgtggtcgaaaaaaggactggtcagttgttaccagggaggtactatagtaagccattcgtgacctttcatcagatcaatgctttcgaggaccagggatgtgtcatcatcgacttgtgttgccaagataatggtaggaccctggaagtgtatcaattgcagaacctgcgaaaggccggtgaaggtctggaccaggtccacaattcagcggcaaaatcattccccaggcgatttgtgctcccccttaacgtgtcgctgaatgcacctgagggtgataatctgagccctctctcttacaccagcgcctccgcagtgaaacaagctgacggaacgatttggtgttcccatgagaatctgcaccaggaagatctggagaaagaaggcggtatcgagttccctcaaatttactacgacagattttcagggaaaaagtatcattttttctacgggtgcggatttcgccatttagtcggggattctctgataaaagttgatgttgtgaacaaaacactgaaggtgtggcgagaggacggcttctatccctcagaacctgtgttcgtacccgcaccaggaaccaatgaagaagacggcggtgttatcttgtccgttgtcattaccccaaatcagaacgagtcaaattttatcctagttttggacgctaagaattttgaggaactgggcagggcagaggtgcccgttcagatgccatatggattccacggcacgtttatcccaatttag

SEQ ID NO: 222337 - DNA, 1638 bp, Artificial Sequence
  derived and/or modified sequence
atgggtaataccccccagaaaaaggccgtttttggtcaatgccgagggctgccctgcgtggcgcctttgcttaccactgtggaggaggcaccgagagggattagcgccagagtgtggggacacttccccaaatggttgaacgggagcctattaaggatcggccctgggaaatttgagtttggaaaagacaaatacaatcactggttcgacgggatggctcttctgcaccaatttaggatggccaaggggactgtcacttatcggtcaaagtttctgcagtcagatacttataaggccaactcagcaaagaaccgtattgtgatcagcgaattcgggaccctggcactgcctgacccgtgcaaaaatgtgtttgaacggtttatgagcagattcgaactaccaggaaaggcagctgccatgaccgacaacaccaacgttaattacgtgcggtacaagggagactactatctttgcaccgaaacaaattttatgaataaagtggacatcgagaccctggaaaagacggagaaggtggactggtctaagttcattgccgtcaatggtgcaactgctcacccacactatgatttagacggtaccgcctacaacatgggcaatagttttggaccttacgggttttcttacaaagttatcagggtcccccctgagaaggtggatctgggtgagacaatacacggggtgcaggtgatctgctccatagctagcacagaaaagggtaagccctcctactatcattcctttggtatgacaagaaactacattattttcatcgagcaaccacttaagatgaacctgtggaagatcgcaacctctaaaatccggggaaaagccttttctgacggcattagctgggagcctcagtgcaacactagattccacgttgtggaaaagcgaaccggccagctactgcccggtaggtactacagtaaaccctttgtgacgtttcatcaaattaacgccttcgaagaccaaggctgcgttatcatagatctctgctgtcaggacaacgggagaactcttgaagtgtaccaactccagaacttgcgcaaggccggtgagggattagatcaggtgcacaactccgcggctaaaagtttccccaggcgcttcgtactccctctcaacgtaagcctcaatgctccggaaggagataacctgtcaccgctaagctacacaagcgcttcggcagtgaagcaagctgatgggacaatatggtgtagtcacgagaacctccaccaggaggatctggaaaaagaagggggaatcgagttcccccagatttattacgatcgcttttctggaaagaaatatcacttcttttatggctgcggcttccgacatctggtgggggactctttaatcaaggtagatgtcgtgaataaaacgctgaaagtttggcgggaggacggattctacccatccgagcctgtgttcgtgcccgcacctggcaccaacgaagaagacggcggtgtgatcttgagtgtggtgatcacccctaaccagaatgagtcaaacttcattctcgttctggatgcaaagaactttgaagagctcggaagggccgaagtgcccgtccagatgccatacggctttcacggaacgtttatcccgatctag

SEQ ID NO: 222338 - DNA, 1638 bp, Artificial Sequence
  derived and/or modified sequence
atgggaaatacccctcaaaaaaaggctgtgttcgggcagtgccggggactcccatgcgtggccccacttttgacgaccgtcgaggaagctcctagggggattagtgcaagggtctggggtcacttcccaaaatggcttaatggatcccttctcaggattgggcctggcaagtttgagttcggcaaggacaaatataatcactggttcgacggcatggcgctgcttcatcaatttaggatggccaagggaaccgtcacatatcgttccaagtttctgcagtctgatacttataaggccaacagtgcaaagaacagaattgtcatcagcgagtttgggacactcgctttgcctgacccttgcaagaatgtcttcgagcgtttcatgagcaggtttgaattgcccggtaaggccgctgcaatgactgacaataccaacgtgaactatgtgcggtataagggagactattatctctgtacggaaacgaattttatgaataaagtggacatcgaaactctggagaaaaccgaaaaggttgattggtctaagtttatagccgtcaatggcgctactgcccacccccattatgacttggatggaacggcctacaacatgggaaactcattcggcccatacggtttttcatacaaggtcattagagtcccacccgagaaggtggacttgggcgagactatccatggcgtacaggttatatgcagcatagcttctactgagaagggcaaaccgtcctactaccatagctttggcatgaccagaaactacattatctttatcgaacagcctcttaaaatgaacttgtggaagattgcaacctcaaagattcgaggcaaggcctttagcgatggaatttcatgggagcctcagtgtaatacccgatttcacgtggtggaaaagcgaacaggccaactcctgcccggacggtactatagcaagccctttgtcactttccaccagatcaacgcctttgaagatcagggctgcgtcattatagacttatgctgccaagataacgggcgtacacttgaggtctatcagctgcagaaccttagaaaagctggcgagggtctggatcaggtccacaacagtgctgcaaaatcttttcccaggcgtttcgtgctcccgctgaacgtatccctcaatgcccctgaaggagataacctctctcccctaagctatacctccgcgtccgccgtgaagcaagctgatggcaccatatggtgcagccatgaaaatttgcaccaggaggacctggagaaagagggaggtatcgaatttccccaaatctattatgataggttctccggcaagaaataccactttttttacggctgtggatttcggcatttagtgggagacagtctcatcaaggtggacgtcgtcaacaagaccctgaaggtgtggagggaagacggattctacccttccgaacccgtgtttgtaccggcacctggtacaaatgaggaagacgggggagtaatactgtctgtggtcataacccctaaccaaaatgagtccaatttcatcttggtcctggatgctaagaatttcgaagaactaggacgcgctgaagtaccggtgcagatgccgtatggctttcacggtacatttattcccatatag

SEQ ID NO: 222339 - DNA, 2930 bp, Artificial Sequence
  derived and/or modified sequence
aagctgcgtcctctctttgacctgtcagtgagggagggacagtccaggcagttctgtgcgtgttcactgtttagtagtactcaaaactgccagtgtgagaggatttggaaatcactggatctgctcaatacaaaaatgttttttcgagtctttctccattttatcaggagtcattctgccactgcagtggatttccttcctgtgatggtgcaccggctcccagttttcaaaaggtacatgggaaatactcctcagaaaaaagccgtctttgggcagtgtcggggtctgccatgtgttgcaccgctgctgaccacagtggaagaggctccacggggcatctctgctcgagtctggggacattttcctaagtggctcaatggctctctacttcgaattggacctgggaaattcgagtttgggaaggataagtacaatcattggtttgatgggatggcgctgcttcaccagttcagaatggcaaagggcacagtgacatacaggagcaagtttctacagagtgatacatataaggccaacagtgctaaaaaccgaattgtgatctcagaatttggcacactggctctcccggatccatgcaagaatgtttttgaacgtttcatgtccaggtttgagctgcctggtaaagctgcagccatgactgacaatactaatgtcaactatgtgcggtacaagggtgattactacctctgcactgagaccaactttatgaataaagtggacattgaaactctggaaaaaacagaaaaggtagattggagcaaatttattgctgtgaatggagcaactgcacatcctcattatgacctggatggaacagcatacaatatggggaactcctttgggccatatggtttctcctataaggttattcgggttcctccagagaaggtggaccttggggagacaatccatggagtccaggtgatatgttctattgcttctacagagaaagggaaaccttcttactaccatagctttggaatgacaaggaactatataattttcattgaacaacctctaaagatgaacctgtggaaaattgccacttctaaaattcggggaaaggccttttcagatgggataagctgggaaccccagtgtaatacgcggtttcatgtggtggaaaaacgcactggacagctccttccagggagatactacagcaaaccttttgttacatttcatcaaatcaatgcctttgaggaccagggctgtgttataattgatttgtgctgtcaagataatggaagaaccctagaagtttaccagttacagaatctcaggaaggctggggaagggcttgatcaggtccataattcagcagccaaatctttccctcgaaggtttgttttgcctttaaatgtcagtttgaatgcccctgagggagacaacctgagtccattgtcctatacttcagccagtgctgtgaaacaggctgatggaacgatctggtgctctcatgaaaatctacatcaggaggacctagaaaaggaaggaggcattgaatttcctcagatctactatgatcgattcagtggcaaaaagtatcatttcttttatggctgtggctttcggcatttagtgggggattctctgatcaaggttgatgtggtgaataagacactgaaggtttggagagaagatggcttttatccctcagaacctgtttttgttccagcaccaggaaccaatgaagaagatggtggggttattctttctgtggtgatcactcccaaccagaatgaaagcaattttatcctagttttggatgccaagaactttgaagagctgggccgagcagaggtacctgtgcagatgccttatgggttccatggtaccttcatacccatctgatgggacaaccacaaggtctggaaactaggtttaaaataagtgtgcacttggacataaagactggagaaataaacactgaggactccaaaaggggggcaaggaggaagaggggcaggggttaaaaagctacctattgaatactatgttccctatttgggtgatgggttcgttagaagtccaaacctcagcagcacacaatatactcatgtaacaagcctgcacatgtaccccagaatctaaaataaaaataaaaagaaaaacaaagaatgtactctatacaaaagacagagcataaagggcaccgtacctcccaaaccaatgtcccaaatagacatttagtttaaaaatttctgttaaaaacagaattcactatttccttgccactgccaagtcacgccatggcagaggctcgagtgcatacaagcttcggttttacccttaatacaccatcatgaccaatggaggcattgctgctggaggtgtcatggccattaacactactttataagaggtgcggaagactgccctcactcatcatggcctagcatgtgcaatttgtgaagctgccaaagcgttagacaagcaccaagcccacttttgtctgcctgcacccaactgcaatgagcctatgtatgtcaagttggtggagtcccatggtgctgaacaccaactcaccctaattaaggttgatgacaacaagaaaccagaggaatgggtaggcctctgtaaaactgagagggaaacccccgaaaagtggttggctgcagttgtgcagtagttaaggactaggtcaaagaatcttaagtcaaggatgtcatcgaagagtatttcaaatgtaagaaatgaacaaataaaactttggcactcatgtttcttaagaaaaaacaccacaaagcagaattcataatataactatggttatagatatttattttttagggctcttacttgaaataattaagaaagtattgatacaaccttttgaagagggttttaaatttcatttattggatatatcttcctctaggtaataataagaatacacgaaataaaaa

SEQ ID NO: 222340 - DNA, 2903 bp, Artificial Sequence
  derived and/or modified sequence
gacctgtcagtgagggagggacagtccaggcagttctgtgcgtgttcactgtttagtagtactcaaaactgccagtgtgagaggatttggaaatcactggatctgctcaatacaaaaatgttttttcgagtctttctccattttatcaggagtcattctgccactgcagtggatttccttcctgtgatggtgcaccggctcccagttttcaaaaggtacatgggaaatactcctcagaaaaaagccgtctttgggcagtgtcggggtctgccatgtgttgcaccgctgctgaccacagtggaagaggctccacggggcatctctgctcgagtctggggacattttcctaagtggctcaatggctctctacttcgaattggacctgggaaattcgagtttgggaaggataagtacaatcattggtttgatgggatggcgctgcttcaccagttcagaatggcaaagggcacagtgacatacaggagcaagtttctacagagtgatacatataaggccaacagtgctaaaaaccgaattgtgatctcagaatttggcacactggctctcccggatccatgcaagaatgtttttgaacgtttcatgtccaggtttgagctgcctggtaaagctgcagccatgactgacaatactaatgtcaactatgtgcggtacaagggtgattactacctctgcactgagaccaactttatgaataaagtggacattgaaactctggaaaaaacagaaaaggtagattggagcaaatttattgctgtgaatggagcaactgcacatcctcattatgacctggatggaacagcatacaatatggggaactcctttgggccatatggtttctcctataaggttattcgggttcctccagagaaggtggaccttggggagacaatccatggagtccaggtgatatgttctattgcttctacagagaaagggaaaccttcttactaccatagctttggaatgacaaggaactatataattttcattgaacaacctctaaagatgaacctgtggaaaattgccacttctaaaattcggggaaaggccttttcagatgggataagctgggaaccccagtgtaatacgcggtttcatgtggtggaaaaacgcactggacagctccttccagggagatactacagcaaaccttttgttacatttcatcaaatcaatgcctttgaggaccagggctgtgttataattgatttgtgctgtcaagataatggaagaaccctagaagtttaccagttacagaatctcaggaaggctggggaagggcttgatcaggtccataattcagcagccaaatctttccctcgaaggtttgttttgcctttaaatgtcagtttgaatgcccctgagggagacaacctgagtccattgtcctatacttcagccagtgctgtgaaacaggctgatggaacgatctggtgctctcatgaaaatctacatcaggaggacctagaaaaggaaggaggcattgaatttcctcagatctactatgatcgattcagtggcaaaaagtatcatttcttttatggctgtggctttcggcatttagtgggggattctctgatcaaggttgatgtggtgaataagacactgaaggtttggagagaagatggcttttatccctcagaacctgtttttgttccagcaccaggaaccaatgaagaagatggtggggttattctttctgtggtgatcactcccaaccagaatgaaagcaattttatcctagttttggatgccaagaactttgaagagctgggccgagcagaggtacctgtgcagatgccttatgggttccatggtaccttcatacccatctgatgggacaaccacaaggtctggaaactaggtttaaaataagtgtgcacttggacataaagactggagaaataaacactgaggactccaaaaggggggcaaggaggaagaggggcaggggttaaaaagctacctattgaatactatgttccctatttgggtgatgggttcgttagaagtccaaacctcagcagcacacaatatactcatgtaacaagcctgcacatgtaccccagaatctaaaataaaaataaaaagaaaaacaaagaatgtactctatacaaaagacagagcataaagggcaccgtacctcccaaaccaatgtcccaaatagacatttagtttaaaaatttctgttaaaaacagaattcactatttccttgccactgccaagtcacgccatggcagaggctcgagtgcatacaagcttcggttttacccttaatacaccatcatgaccaatggaggcattgctgctggaggtgtcatggccattaacactactttataagaggtgcggaagactgccctcactcatcatggcctagcatgtgcaatttgtgaagctgccaaagcgttagacaagcaccaagcccacttttgtctgcctgcacccaactgcaatgagcctatgtatgtcaagttggtggagtcccatggtgctgaacaccaactcaccctaattaaggttgatgacaacaagaaaccagaggaatgggtaggcctctgtaaaactgagagggaaacccccgaaaagtggttggctgcagttgtgcagtagttaaggactaggtcaaagaatcttaagtcaaggatgtcatcgaagagtatttcaaatgtaagaaatgaacaaataaaactttggcactcatgtttcttaagaaaaaacaccacaaagcagaattcataatataactatggttatagatatttattttttagggctcttacttgaaataattaagaaagtattgatacaaccttttgaagagggttttaaatttcatttattggatatatcttcctctaggtaataataagaatacacg

SEQ ID NO: 222341 - DNA, 2598 bp, Artificial Sequence
  derived and/or modified sequence
gcctctttcctgaaggttgctgggagcttctgaagctttgtgtcctgtgtggctcagatgagatagcaattccgcagagtcctggaagttaaagaaggctgagttaggattgtttcctcatggtcagggaaacagccttcacatttgtatattttatgcaatatttaaggcaggattcagggacttggtattctttgggatttgcaataagaagaatattcaatatttaggcttttctaaattgaaaaatcactgccacacgttctaatgtaattgtttggtttctctatttgcattttgcggggactgccttaaaactcatttatgttttatagccttctattatagttaccattgttacatgattttatgtatagaaattggctgatctagagctttcagaaatcatactaatatgcactataaattttaaaattacttaatgtagtaatttaatgtttgcagtatgcaagggaatgtattacgtactggaaggagagaggagacaaacaccagaccctgtactcaaggagtactggtagtatcatttatcatacaagacagataagataaggtccatatgagagctataaacagatgctgtgagttcagactaaggagaatcagttcttgctgtaggtaaggggaatgctgtgtttataaagcaaatgacatggcaactggatcttgaaggatgagttagttttcaaaaggtacatgggaaatactcctcagaaaaaagccgtctttgggcagtgtcggggtctgccatgtgttgcaccgctgctgaccacagtggaagaggctccacggggcatctctgctcgagtctggggacattttcctaagtggctcaatggctctctacttcgaattggacctgggaaattcgagtttgggaaggataagtacaatcattggtttgatgggatggcgctgcttcaccagttcagaatggcaaagggcacagtgacatacaggagcaagtttctacagagtgatacatataaggccaacagtgctaaaaaccgaattgtgatctcagaatttggcacactggctctcccggatccatgcaagaatgtttttgaacgtttcatgtccaggtttgagctgcctggtaaagctgcagccatgactgacaatactaatgtcaactatgtgcggtacaagggtgattactacctctgcactgagaccaactttatgaataaagtggacattgaaactctggaaaaaacagaaaaggtagattggagcaaatttattgctgtgaatggagcaactgcacatcctcattatgacctggatggaacagcatacaatatggggaactcctttgggccatatggtttctcctataaggttattcgggttcctccagagaaggtggaccttggggagacaatccatggagtccaggtgatatgttctattgcttctacagagaaagggaaaccttcttactaccatagctttggaatgacaaggaactatataattttcattgaacaacctctaaagatgaacctgtggaaaattgccacttctaaaattcggggaaaggccttttcagatgggataagctgggaaccccagtgtaatacgcggtttcatgtggtggaaaaacgcactggacagctccttccagggagatactacagcaaaccttttgttacatttcatcaaatcaatgcctttgaggaccagggctgtgttataattgatttgtgctgtcaagataatggaagaaccctagaagtttaccagttacagaatctcaggaaggctggggaagggcttgatcaggtccataattcagcagccaaatctttccctcgaaggtttgttttgcctttaaatgtcagtttgaatgcccctgagggagacaacctgagtccattgtcctatacttcagccagtgctgtgaaacaggctgatggaacgatctggtgctctcatgaaaatctacatcaggaggacctagaaaaggaaggaggcattgaatttcctcagatctactatgatcgattcagtggcaaaaagtatcatttcttttatggctgtggctttcggcatttagtgggggattctctgatcaaggttgatgtggtgaataagacactgaaggtttggagagaagatggcttttatccctcagaacctgtttttgttccagcaccaggaaccaatgaagaagatggtggggttattctttctgtggtgatcactcccaaccagaatgaaagcaattttatcctagttttggatgccaagaactttgaagagctgggccgagcagaggtacctgtgcagatgccttatgggttccatggtaccttcatacccatctgatgggacaaccacaaggtctggaaactaggtttaaaataagtgtgcacttggacataaagactggagaaataaacactgaggactccaaaaggggggcaaggaggaagaggggcaggggttaaaaagctacctattgaatactatgttccctatttgggtgatgggttcgttagaagtccaaacctcagcagcacacaatatactcatgtaacaagcctgcacatgtaccccagaatctaaaat

SEQ ID NO: 222342 - DNA, 1983 bp, Artificial Sequence
  derived and/or modified sequence
aaggagaatcagttcttgctgtaggtaaggggaatgctgtgtttataaagcaaatgacatggcaactggatcttgaaggatgagttagttttcaaaaggtacatgggaaatactcctcagaaaaaagccgtctttgggcagtgtcggggtctgccatgtgttgcaccgctgctgaccacagtggaagaggctccacggggcatctctgctcgagtctggggacattttcctaagtggctcaatggctctctacttcgaattggacctgggaaattcgagtttgggaaggataagtacaatcattggtttgatgggatggcgctgcttcaccagttcagaatggcaaagggcacagtgacatacaggagcaagtttctacagagtgatacatataaggccaacagtgctaaaaaccgaattgtgatctcagaatttggcacactggctctcccggatccatgcaagaatgtttttgaacgtttcatgtccaggtttgagctgcctggtaaagctgcagccatgactgacaatactaatgtcaactatgtgcggtacaagggtgattactacctctgcactgagaccaactttatgaataaagtggacattgaaactctggaaaaaacagaaaaggtagattggagcaaatttattgctgtgaatggagcaactgcacatcctcattatgacctggatggaacagcatacaatatggggaactcctttgggccatatggtttctcctataaggttattcgggttcctccagagaaggtggaccttggggagacaatccatggagtccaggtgatatgttctattgcttctacagagaaagggaaaccttcttactaccatagctttggaatgacaaggaactatataattttcattgaacaacctctaaagatgaacctgtggaaaattgccacttctaaaattcggggaaaggccttttcagatgggataagctgggaaccccagtgtaatacgcggtttcatgtggtggaaaaacgcactggacagctccttccagggagatactacagcaaaccttttgttacatttcatcaaatcaatgcctttgaggaccagggctgtgttataattgatttgtgctgtcaagataatggaagaaccctagaagtttaccagttacagaatctcaggaaggctggggaagggcttgatcaggtccataattcagcagccaaatctttccctcgaaggtttgttttgcctttaaatgtcagtttgaatgcccctgagggagacaacctgagtccattgtcctatacttcagccagtgctgtgaaacaggctgatggaacgatctggtgctctcatgaaaatctacatcaggaggacctagaaaaggaaggaggcattgaatttcctcagatctactatgatcgattcagtggcaaaaagtatcatttcttttatggctgtggctttcggcatttagtgggggattctctgatcaaggttgatgtggtttggagagaagatggcttttatccctcagaacctgtttttgttccagcaccaggaaccaatgaagaagatggtggggttattctttctgtggtgatcactcccaaccagaatgaaagcaattttatcctagttttggatgccaagaactttgaagagctgggccgagcagaggtacctgtgcagatgccttatgggttccatggtaccttcatacccatctgatgggacaaccacaaggtctggaaactaggtttaaaataagtgtgcacttggacataaagactggagaaataaacactgaggactccaaaaggggggcaaggaggaagaggggcaggggttaaaaagctacctattgaatactatgttccctatttgggtgatgggttcgttagaagtccaaacctcagcagcacacaatatactcatgtaacaagcctgcacatgtaccccagaatctaaaataaaaataaaaagaaaaac

SEQ ID NO: 222343 - DNA, 2493 bp, Artificial Sequence
  derived and/or modified sequence
gggaatgctgtgtttataaagcaaatgacatggcaactggatcttgaaggatgagttagttttcaaaaggtacatgggaaatactcctcagaaaaaagccgtctttgggcagtgtcggggtctgccatgtgttgcaccgctgctgaccacagtggaagaggctccacggggcatctctgctcgagtctggggacattttcctaagtggctcaatggctctctacttcgaattggacctgggaaattcgagtttgggaaggataagtacaatcattggtttgatgggatggcgctgcttcaccagttcagaatggcaaagggcacagtgacatacaggagcaagtttctacagagtgatacatataaggccaacagtgctaaaaaccgaattgtgatctcagaatttggcacactggctctcccggatccatgcaagaatgtttttgaacgtttcatgtccaggtttgagctgcctggtaaagctgcagccatgactgacaatactaatgtcaactatgtgcggtacaagggtgattactacctctgcactgagaccaactttatgaataaagtggacattgaaactctggaaaaaacagaaaaggtagattggagcaaatttattgctgtgaatggagcaactgcacatcctcattatgacctggatggaacagcatacaatatggggaactcctttgggccatatggtttctcctataaggttattcgggttcctccagagaaggtggaccttggggagacaatccatggagtccaggtgatatgttctattgcttctacagagaaagggaaaccttcttactaccatagctttggaatgacaaggaactatataattttcattgaacaacctctaaagatgaacctgtggaaaattgccacttctaaaattcggggaaaggccttttcagatgggataagctgggaaccccagtgtaatacgcggtttcatgtggtggaaaaacgcactggacagctccttccagggagatactacagcaaaccttttgttacatttcatcaaatcaatgcctttgaggaccagggctgtgttataattgatttgtgctgtcaagataatggaagaaccctagaagtttaccagttacagaatctcaggaaggctggggaagggcttgatcaggtccataattcagcagccaaatctttccctcgaaggtttgttttgcctttaaatgtcagtttgaatgcccctgagggagacaacctgagtccattgtcctatacttcagccagtgctgtgaaacaggctgatggaacgatctggtgctctcatgaaaatctacatcaggaggacctagaaaaggaaggaggcattgaatttcctcagatctactatgatcgattcagtggcaaaaagtatcatttcttttatggctgtggctttcggcatttagtgggggattctctgatcaaggttgatgtggtgaataagacactgaaggtttggagagaagatggcttttatccctcagaacctgtttttgttccagcaccaggaaccaatgaagaagatggtggggttattctttctgtggtgatcactcccaaccagaatgaaagcaattttatcctagttttggatgccaagaactttgaagagctgggccgagcagaggtacctgtgcagatgccttatgggttccatggtaccttcatacccatctgatgggacaaccacaaggaaacttttccaagcctgttattaatcagtgacttgtcctgcttttcatcatatacagtgatgatttttctcatatagagtggagctgtcctctccagtacctggaacaatgccagccacatagtagatgcccaataaatatttagtgaaagagtgaatggaagcaagaggtgacatgattctgggaactgtgtgtagtttggttactcttgtgagtagatgtgaggaaacaagatcctttcactctcaatgtgtctacactggcagaagaattgctaatatgtgtttaggggtgtctgtattcacactatgccaacccagagtaataaatgggtccatacatgcttgtggataagaatggctttagaatttcccttagtaaggatcattacacaacagtccaaaggactgttgtcacgtggtcctatttgtgctctcaaattcttgctctttaaaaatttttttttaaagaaacggtattaatcctaagcaaaaagaacaaagctggaggcatcacgctacctgacttcgaactatactacaagcctacagtaacaaaaacagcatggtatgggtaccaaaacagatatatacaccaatggaacacaacagaggcctcagaaataacaccacacatctacaaccatctgatcttagacaaacctgataaaaacaagaaatggggaaaggattccctattaaataaatggtgctgggaaaactggctagccatatgtagaaagctgaaactggatcccttccttaca

SEQ ID NO: 222344 - DNA, 1740 bp, Artificial Sequence
  derived and/or modified sequence
atgttcttcagagtgttcctgcacttcatcagaagccacagcgccaccgccgtggacttcctgcccgtgatggtgcacagactgcccgtgttcaagagatacatgggcaacaccccccagaagaaggccgtgttcggccagtgcagaggcctgccctgcgtggcccccctgctgaccaccgtggaggaggcccccagaggcatcagcgccagagtgtggggccacttccccaagtggctgaacggcagcctgctgagaatcggccccggcaagttcgagttcggcaaggacaagtacaaccactggttcgacggcatggccctgctgcaccagttcagaatggccaagggcaccgtgacctacagaagcaagttcctgcagagcgacacctacaaggccaacagcgccaagaacagaatcgtgatcagcgagttcggcaccctggccctgcccgacccctgcaagaacgtgttcgagagattcatgagcagattcgagctgcccggcaaggccgccgccatgaccgacaacaccaacgtgaactacgtgagatacaagggcgactactacctgtgcaccgagaccaacttcatgaacaaggtggacatcgagaccctggagaagaccgagaaggtggactggagcaagttcatcgccgtgaacggcgccaccgcccacccccactacgacctggacggcaccgcctacaacatgggcaacagcttcggcccctacggcttcagctacaaggtgatcagagtgccccccgagaaggtggacctgggcgagaccatccacggcgtgcaggtgatctgcagcatcgccagcaccgagaagggcaagcccagctactaccacagcttcggcatgaccagaaactacatcatcttcatcgagcagcccctgaagatgaacctgtggaagatcgccaccagcaagatcagaggcaaggccttcagcgacggcatcagctgggagccccagtgcaacaccagattccacgtggtggagaagagaaccggccagctgctgcccggcagatactacagcaagcccttcgtgaccttccaccagatcaacgccttcgaggaccagggctgcgtgatcatcgacctgtgctgccaggacaacggcagaaccctggaggtgtaccagctgcagaacctgagaaaggccggcgagggcctggaccaggtgcacaacagcgccgccaagagcttccccagaagattcgtgctgcccctgaacgtgagcctgaacgcccccgagggcgacaacctgagccccctgagctacaccagcgccagcgccgtgaagcaggccgacggcaccatctggtgcagccacgagaacctgcaccaggaggacctggagaaggagggcggcatcgagttcccccagatctactacgacagattcagcggcaagaagtaccacttcttctacggctgcggcttcagacacctggtgggcgacagcctgatcaaggtggacgtggtgaacaagaccctgaaggtgtggagagaggacggcttctaccccagcgagcccgtgttcgtgcccgcccccggcaccaacgaggaggacggcggcgtgatcctgagcgtggtgatcacccccaaccagaacgagagcaacttcatcctggtgctggacgccaagaacttcgaggagctgggcagagccgaggtgcccgtgcagatgccctacggcttccacggcaccttcatccccatctag

SEQ ID NO: 222345 - DNA, 1638 bp, Artificial Sequence
  derived and/or modified sequence
atgggcaacaccccccagaagaaggccgtgttcggccagtgcagaggcctgccctgcgtggcccccctgctgaccaccgtggaggaggcccccagaggcatcagcgccagagtgtggggccacttccccaagtggctgaacggcagcctgctgagaatcggccccggcaagttcgagttcggcaaggacaagtacaaccactggttcgacggcatggccctgctgcaccagttcagaatggccaagggcaccgtgacctacagaagcaagttcctgcagagcgacacctacaaggccaacagcgccaagaacagaatcgtgatcagcgagttcggcaccctggccctgcccgacccctgcaagaacgtgttcgagagattcatgagcagattcgagctgcccggcaaggccgccgccatgaccgacaacaccaacgtgaactacgtgagatacaagggcgactactacctgtgcaccgagaccaacttcatgaacaaggtggacatcgagaccctggagaagaccgagaaggtggactggagcaagttcatcgccgtgaacggcgccaccgcccacccccactacgacctggacggcaccgcctacaacatgggcaacagcttcggcccctacggcttcagctacaaggtgatcagagtgccccccgagaaggtggacctgggcgagaccatccacggcgtgcaggtgatctgcagcatcgccagcaccgagaagggcaagcccagctactaccacagcttcggcatgaccagaaactacatcatcttcatcgagcagcccctgaagatgaacctgtggaagatcgccaccagcaagatcagaggcaaggccttcagcgacggcatcagctgggagccccagtgcaacaccagattccacgtggtggagaagagaaccggccagctgctgcccggcagatactacagcaagcccttcgtgaccttccaccagatcaacgccttcgaggaccagggctgcgtgatcatcgacctgtgctgccaggacaacggcagaaccctggaggtgtaccagctgcagaacctgagaaaggccggcgagggcctggaccaggtgcacaacagcgccgccaagagcttccccagaagattcgtgctgcccctgaacgtgagcctgaacgcccccgagggcgacaacctgagccccctgagctacaccagcgccagcgccgtgaagcaggccgacggcaccatctggtgcagccacgagaacctgcaccaggaggacctggagaaggagggcggcatcgagttcccccagatctactacgacagattcagcggcaagaagtaccacttcttctacggctgcggcttcagacacctggtgggcgacagcctgatcaaggtggacgtggtgaacaagaccctgaaggtgtggagagaggacggcttctaccccagcgagcccgtgttcgtgcccgcccccggcaccaacgaggaggacggcggcgtgatcctgagcgtggtgatcacccccaaccagaacgagagcaacttcatcctggtgctggacgccaagaacttcgaggagctgggcagagccgaggtgcccgtgcagatgccctacggcttccacggcaccttcatccccatctag

SEQ ID NO: 222346 - protein, 450 aa, Artificial Sequence
  derived and/or modified sequence
MDARRVPQKDLRVKKNLKKFRYVKLISMETSSSSDDSCDSFASDNFANTKPKFRSDISEELANVFYEDSDNESFCGFSESEVQDVLDHCGFLQKPRPDVTNELAGIFHADSDDESFCGFSESEIQDGMRLQSVREGCRTRSQCRHSGPLRVAMKFPARSTRGATNKKAESRQPSENSVTDSNSDSEDESGMNFLEKRALNIKQNKAMLAKLMSELESFPGSFRGRHPLPGSDSQSRRPRRRTFPGVASRRNPERRARPLTRSRSRILGSLDALPMEEEEEEDKYMLVRKRKTVDGYMNEDDLPRSRRSRSSVTLPHIIRPVEEITEEELENVCSNSREKIYNRSLGSTCHQCRQKTIDTKTNCRNPDCWGVRGQFCGPCLRNRYGEEVRDALLDPNWHCPPCRGICNCSFCRQRDGRCATGVLVYLAKYHGFGNVHAYLKSLKQEFEMQA

SEQ ID NO: 222347 - DNA, 1353 bp, Artificial Sequence
  derived and/or modified sequence
atggacgcccggcgagttccacaaaaagacctgagagtgaaaaaaaatctgaaaaagtttcgttacgtgaagctcatttccatggagacctctagttcctctgacgacagctgtgactcattcgcgtctgacaacttcgccaatacaaaacccaaatttcgttcagatatatctgaagaactcgctaatgtgttttatgaagatagcgacaatgagagcttctgtgggttctcagagtccgaggttcaggatgtgcttgatcactgcggctttctgcagaagcccaggcccgacgtcacaaatgagctggcgggaatattccacgcggattccgacgacgagagtttctgcgggttttccgaaagcgagatccaggatgggatgaggttacaaagcgtaagagagggatgccgcaccagatcacagtgccggcattccggcccgctgcgtgtggcgatgaaattccctgcccgatcaactcgcggcgccaccaacaagaaggccgaaagtagacagccttctgagaactccgtgacagacagcaacagcgattccgaggacgaatccggcatgaacttcttagagaaacgtgcactaaatatcaaacagaataaagccatgctggctaaactgatgtcagaattagagagtttccccggatcctttagagggaggcaccctttgccagggtccgattcccaatcccgccggccccgccgaaggacctttcccggagtcgcgtcacggaggaaccctgaaagacgggcccggcccctgacacgctctcgttctaggattctgggatcattggatgccctcccgatggaggaagaggaagaggaggacaagtatatgctggtacgaaagagaaagacagttgatggctacatgaatgaagacgatcttccccggtctcgacggtcacggtcgagtgttacgctccctcacatcatccgtccggtggaggagatcacagaagaggaactggagaacgtatgcagtaactcacgcgagaagatctataaccgctcgctgggaagcacctgccatcaatgcagacaaaagaccattgatacgaagactaactgcagaaacccagactgttggggtgttcggggccaattttgtggaccctgcctccgtaaccggtatggcgaagaagtccgagatgcacttctagatccgaactggcactgcccgccttgtaggggtatctgcaattgcagtttttgtcgtcagcgcgacggcaggtgcgccaccggggtgcttgtgtacctggccaaatatcacggttttggaaacgttcacgcttacctgaagtccctgaagcaagaattcgaaatgcaggcttag

SEQ ID NO: 222348 - DNA, 1353 bp, Artificial Sequence
  derived and/or modified sequence
atggatgcccggcgggtgccccagaaggacctgcgggtgaagaagaacctgaagaagttccgctacgtgaagctgatctccatggagaccagcagcagcagtgatgacagctgtgacagctttgccagtgacaactttgccaacaccaagcccaagttcagaagtgacatcagcgaggagctggccaacgtgttctatgaagattctgacaatgaaagcttctgtggcttcagcgagagcgaggtgcaggatgtgctggaccactgcggcttcctgcagaagcccaggccagatgtgaccaatgagctggccggcatcttccacgccgacagtgatgatgagagcttctgtggcttcagcgagagcgagatccaggacggcatgaggctgcagagcgtgcgggagggctgcaggaccaggagccagtgccgccacagcggccccctgcgggtggccatgaagtttcctgcccggagcaccaggggggccaccaacaagaaggccgagagccggcagcccagtgaaaattctgtgacagacagcaacagcgacagtgaagatgaaagtggcatgaacttcctggagaagagggccctgaacatcaagcagaacaaggccatgctggccaagctgatgtctgagctggagagcttccctggcagcttccggggccgccaccccctgcccggcagtgacagccagagccggcggcccaggaggaggaccttccctggggtggccagcagaagaaatcctgagcggcgggcccggcccctgaccaggagccgcagccgcatcctgggcagcctggatgccctgcccatggaggaggaggaggaggaggacaagtacatgctggtgaggaagaggaagacagtggatggctacatgaatgaagatgacctgcccaggagccgccgcagccgcagctctgtgaccctgccccacatcatccggcctgtggaggagatcacagaggaggagctggagaatgtgtgcagcaacagccgggagaagatctacaacagaagcctgggcagcacctgccaccagtgccggcagaagaccatcgacaccaagaccaactgcaggaacccagactgctggggcgtgcggggccagttctgtggcccctgcctgaggaaccgctacggggaggaggtgagagatgccctgctggaccccaactggcactgccccccctgccggggcatctgcaactgcagcttctgccggcagagagatggccgctgtgccaccggggtgctggtgtacctggccaagtaccacggctttggaaatgtgcacgcctacctgaagagcctgaagcaggagtttgagatgcaggcctag

SEQ ID NO: 222349 - DNA, 1353 bp, Artificial Sequence
  derived and/or modified sequence
atggacgcccggcgggtgccccagaaggacctgcgggtgaagaagaacctgaaaaaattcaggtatgtgaaactaatttctatggagacatctagtagcagtgatgacagctgcgactccttcgctagcgacaacttcgccaatactaaaccgaaattccggtccgacatttctgaagaactggcaaatgtgttttatgaagatagtgataacgagtctttctgtggcttctctgagtccgaagtccaggacgtgctcgaccattgcgggttcctacagaagccccggccagacgtcaccaacgagctggcaggaatctttcacgccgactctgacgatgagagtttttgtgggttcagcgaatccgaaatccaggatggaatgcggctgcagagcgtgcgggaaggttgtcgaacaagatcccagtgtagacactcagggcccctaagagtcgccatgaaattccccgcgcggtctactcgcggcgccaccaacaagaaggccgagtcacggcagccgtctgagaactctgtgacggactcaaattccgactccgaagatgagtcaggcatgaactttctcgagaagcgggcattaaatattaaacaaaataaggcgatgctagctaagctgatgtccgaacttgagagctttccaggttcatttcgagggagacacccactgccaggcagtgactcacagagtcgtaggcctaggagacgtacgttcccaggcgttgcctcacgcaggaatcccgagaggcgcgcacggccactgacaaggagccgatcgcggatcttgggaagcctcgacgctctccctatggaggaggaagaggaggaagataaatacatgttggtcagaaaaagaaagaccgtagacgggtatatgaatgaggacgatctcccaagaagccgtcgctctcgaagctccgttaccttaccccacattatacgaccagttgaggaaataactgaggaggaactagagaacgtgtgcagcaatagtagagaaaaaatttacaatcggtccttgggttctacttgccatcaatgtaggcagaaaactatcgatacgaagacgaattgccgcaacccagattgttggggtgttaggggccagttctgcggtccttgcctgcgtaataggtacggggaggaggttcgagatgccctgttggacccgaactggcactgccccccttgccgtggaatctgcaattgttctttctgcagacagcgcgacggtcgttgtgccacaggggtgctggtttatcttgcgaagtatcacggcttcgggaacgtgcatgcgtatctgaaaagcctgaaacaggaatttgaaatgcaggcttag

SEQ ID NO: 222350 - DNA, 1353 bp, Artificial Sequence
  derived and/or modified sequence
atggacgcaagaagggtgccccaaaaggacctcagagtcaaaaagaaccttaagaagttccgttacgtgaagttgataagtatggaaacctcgtcgtcctctgatgacagttgtgattcgttcgcttctgataactttgctaatacgaagccaaaatttcgtagtgacatcagcgaggagctggccaacgtcttctacgaagactccgataatgagagtttctgcgggtttagtgagtcggaggtgcaagatgttctcgaccattgtggatttcttcaaaagccaaggcccgacgtgaccaatgagctcgcgggtatctttcacgcggacagcgacgacgagagcttttgcggttttagtgagtcagagatacaggatgggatgagactgcagtccgtgcgtgagggctgcagaacacggtcacagtgtaggcacagcgggccactccgcgttgcaatgaaattccctgccagatcaaccaggggtgccaccaataagaaggccgagagccgccaaccttctgaaaatagcgttactgactcgaacagtgactccgaagatgaatcaggcatgaactttctcgaaaagagggccctcaacatcaaacagaacaaagcaatgctagctaagctgatgtccgagctcgaatcgtttccaggcagcttccggggacggcatcctctccccggtagcgacagccagagccggagaccacgacgcaggacttttcccggtgttgcatctcggaggaatccggaacggagggccagacccctgaccagaagcaggagccggattttagggtcgctggacgctcttcccatggaagaagaagaagaagaggataaatatatgctcgtcagaaagcgtaaaaccgtagatgggtacatgaatgaggatgacctgcctcgctctcgacggtcgaggtccagcgtgactttacctcatattatccgtcccgtggaagagattacagaagaggagcttgagaacgtatgtagcaatagtcgggagaagatctataaccgcagcctgggctccacctgccatcagtgtcgccaaaaaaccatcgatactaagactaactgtaggaatcctgactgttggggggtccgcggacagttttgcgggccatgtctgagaaacaggtatggagaagaggtcagagacgcgctgctggaccctaactggcattgtcccccttgtcgcggaatatgtaattgttcattttgccgacaacgggacggcagatgtgctacaggagttctggtctaccttgcgaagtatcacggtttcgggaatgtccatgcttaccttaagtctctgaaacaggagttcgagatgcaagcttag

SEQ ID NO: 222351 - DNA, 2789 bp, Artificial Sequence
  derived and/or modified sequence
ctgccagccgcgctgctgctgctcctcctgctgtgggaccgctgaccgcgcggctgctccgctctccccgctccaagcgccgatctgggcacccgccaccagcatggacgctcgccgcgtgccgcagaaagatctcagagtaaagaagaacttaaagaaattcagatatgtgaagttgatttccatggaaacctcgtcatcctctgatgacagttgtgacagctttgcttctgataattttgcaaacacgaaacctaaattcaggtcagatatcagtgaagaactggcaaatgttttttatgaggactctgataatgaatctttctgcggcttttcagaaagtgaggtgcaagatgtattagaccattgtggatttttacagaaaccaaggccagatgtcactaacgaactggccggtatttttcatgccgactctgacgatgaatcattttgcggtttctcagagagtgagatacaagatggaatgaggctgcagtcagttcgggaaggctgtaggacccgcagccagtgcaggcactctggacctctcagggtggcgatgaagtttccagcgcggagtaccaggggagcaaccaacaaaaaagcagagtcccgccagccctcagagaattctgtgactgattccaactccgattcagaagatgaaagtggaatgaattttttggagaaaagggctttaaatataaagcaaaacaaagcaatgcttgcaaaactcatgtctgaattagaaagcttccctggctcgttccgtggaagacatcccctcccaggctccgactcacaatcaaggagaccgcgaaggcgtacattcccgggtgttgcttccaggagaaaccctgaacggagagctcgtcctcttaccaggtcaaggtcccggatcctcgggtcccttgacgctctacccatggaggaggaggaggaagaggataagtacatgttggtgagaaagaggaagaccgtggatggctacatgaatgaagatgacctgcccagaagccgtcgctccagatcatccgtgacccttccgcatataattcgcccagtggaagaaattacagaggaggagttggagaacgtctgcagcaattctcgagagaagatatataaccgttcactgggctctacttgtcatcaatgccgtcagaagactattgataccaaaacaaactgcagaaacccagactgctggggcgttcgaggccagttctgtggcccctgccttcgaaaccgttatggtgaagaggtcagggatgctctgctggatccgaactggcattgcccgccttgtcgaggaatctgcaactgcagtttctgccggcagcgagatggacggtgtgcgactggggtccttgtgtatttagccaaatatcatggctttgggaatgtgcatgcctacttgaaaagcctgaaacaggaatttgaaatgcaagcataatatctggaaaatttgctgcctgccttctacttctcaaatctttcttgtaaaagtttccaattttttcactgaaacctgagttaaaaatcttgatgatcagcctgtttcataagaaactccaatcaagttaatcttagcagacatgtgtttctggagcatcacagaaggtatattgctagttacactttgccctcctgcagtttcttctctgctcccaacccccatctcacagcatccccctctatttccaatgctcctctccaaccgcttagtttctgaatttcttttaaattacagttttatgaaagcatattttatttacttggtgttgaaatagccctcataaaacctaagcacttggaaacacaataatagtattaactaactagatctattgaatttcagagaagagccttctaacttgtttacacaaaaacgagtatgatttagcattcatactagttgaaatttttaatagaatcaaggcacaaaagtcttaaaaccatgtggaaaaattaggtaattattgcagattgatgtctctcaatcccatgtattgcgcttatgttacaagttgttgtcacagttgagacttaatttctcctaatttcttctgcccgaagggtaagtggtgcgtccagcttacacaatcataattcaaaggttggtgggcaatgtaatacttaattaaaataatgatggaagagctatctggagattatgagtaagctgatttgaattttcagtataaaactttagtataattgtagtttgcaaagtttatttcagttcacatgtaaggtattgcaaataaattcttggacaattttgtatggaaacttgatattaaaaactagtctgtggttctttgcagtttcttgtaaatttataaaccaggcacaaggttcaagtttagattttaagcacttttataacaatgataagtgcctttttggagatgtaacttttagcagtttgttaacctgacatctctgccagtctagtttctgggcaggtttcctgtgtcagtattccccctcctctttgcattaatcaaggtatttggtagaggtggaatctaagtgtttgtatgtccaatttacttgcatatgtaaaccattgctgtgccattcaatgtttgatgcataattggaccttgaatcgataagtgtaaatacagcttttgatctgtaatgcttttatacaaaagtttattttaataataaaatgtttgttctaacttgtctgcttttttaaaaataatcttactgtacttaattctaattttttcctcatatttaaataaaaggccatttccaccttttctaaaaaa

SEQ ID NO: 222352 - DNA, 1353 bp, Artificial Sequence
  derived and/or modified sequence
atggacgccagaagagtgccccagaaggacctgagagtgaagaagaacctgaagaagttcagatacgtgaagctgatcagcatggagaccagcagcagcagcgacgacagctgcgacagcttcgccagcgacaacttcgccaacaccaagcccaagttcagaagcgacatcagcgaggagctggccaacgtgttctacgaggacagcgacaacgagagcttctgcggcttcagcgagagcgaggtgcaggacgtgctggaccactgcggcttcctgcagaagcccagacccgacgtgaccaacgagctggccggcatcttccacgccgacagcgacgacgagagcttctgcggcttcagcgagagcgagatccaggacggcatgagactgcagagcgtgagagagggctgcagaaccagaagccagtgcagacacagcggccccctgagagtggccatgaagttccccgccagaagcaccagaggcgccaccaacaagaaggccgagagcagacagcccagcgagaacagcgtgaccgacagcaacagcgacagcgaggacgagagcggcatgaacttcctggagaagagagccctgaacatcaagcagaacaaggccatgctggccaagctgatgagcgagctggagagcttccccggcagcttcagaggcagacaccccctgcccggcagcgacagccagagcagaagacccagaagaagaaccttccccggcgtggccagcagaagaaaccccgagagaagagccagacccctgaccagaagcagaagcagaatcctgggcagcctggacgccctgcccatggaggaggaggaggaggaggacaagtacatgctggtgagaaagagaaagaccgtggacggctacatgaacgaggacgacctgcccagaagcagaagaagcagaagcagcgtgaccctgccccacatcatcagacccgtggaggagatcaccgaggaggagctggagaacgtgtgcagcaacagcagagagaagatctacaacagaagcctgggcagcacctgccaccagtgcagacagaagaccatcgacaccaagaccaactgcagaaaccccgactgctggggcgtgagaggccagttctgcggcccctgcctgagaaacagatacggcgaggaggtgagagacgccctgctggaccccaactggcactgccccccctgcagaggcatctgcaactgcagcttctgcagacagagagacggcagatgcgccaccggcgtgctggtgtacctggccaagtaccacggcttcggcaacgtgcacgcctacctgaagagcctgaagcaggagttcgagatgcaggcctag

SEQ ID NO: 222353 - protein, 232 aa, Artificial Sequence
  derived and/or modified sequence
MATAESRALQFAEGAAFPAYRAPHAGGALLPPPSPAAALLPAPPAGPGPATFAGFLGRDPGPAPPPPASLGSPAPPKGAAAPSASQRRKRTSFSAEQLQLLELVFRRTRYPDIHLRERLAALTLLPESRIQVWFQNRRAKSRRQSGKSFQPLARPEIILNHCAPGTETKCLKPQLPLEVDVNCLPEPNGVGGGISDSSSQGQNFETCSPLSEDIGSKLDSWEEHIFSAFGNF

SEQ ID NO: 222354 - DNA, 699 bp, Artificial Sequence
  derived and/or modified sequence
atggccacagccgagtcccgtgcgctccagtttgccgagggcgccgcgtttccagcgtaccgggccccccacgccggcggggcgctcctgccgcccccgagccctgcggcagccctgctccctgcgccgcccgcgggccccggcccagcgacctttgcgggcttcctcggccgggaccccgggccggccccgccgccccccgccagcctgggctcgcctgcgccccccaaaggcgcggccgccccgtcggcgtcgcagcgccgcaagcgcacgtctttcagcgccgaacagctgcagctgctggagctcgtcttccgccggacccggtaccccgacatccacttgcgcgagcgcctggccgcgctcaccctgctccccgagtccaggatccaggtatggttccagaacaggcgtgccaagtctcggcgtcagagtgggaaatccttccaacctttggctaggccggagattatcctcaaccactgtgctcctggaactgaaacgaaatgtctgaagccccagctgcctcttgaggtagatgtgaactgcctgcccgaaccaaacggggttggagggggcatctctgactctagctcccaaggtcagaattttgaaacctgttcccctctctctgaagacattggttcaaagctggactcatgggaggaacacatcttttctgcctttggtaacttttga

SEQ ID NO: 222355 - DNA, 699 bp, Artificial Sequence
  derived and/or modified sequence
atggctacggcggagtcacgggctttgcagtttgctgaaggggcggccttccctgcttatagagctccccatgctggtggcgccctgctgccacccccttcccccgcagccgccctgctgcctgctccacccgccgggcctggaccagcaacttttgcagggtttctgggtcgcgacccgggaccagcaccacctccccccgcctccctggggagccctgcgccaccaaagggggccgcagcaccctcagcctcacagagacgcaaacggaccagtttttccgctgaacaactgcagttgttagaactggtcttccgcaggactcgttacccagatatccacctccgggagaggttggccgctctgacactgttacccgagtctcgcatccaggtctggtttcaaaatagaagagctaagtcaaggaggcagtcaggcaagagctttcaacctctagcccgccctgaaatcatcctaaatcactgcgcaccgggaactgagacgaagtgcctgaagccccagctccccctggaggtggatgtaaactgcctgcctgagccgaacggggttggaggtggcatcagcgatagctcttcacaggggcagaattttgagacatgttctcccctaagtgaggatatcgggagcaagcttgacagttgggaggagcatatcttctccgcctttggcaacttctag

SEQ ID NO: 222356 - DNA, 699 bp, Artificial Sequence
  derived and/or modified sequence
atggccacagctgagagccgggccctgcagtttgctgagggcgccgccttccctgcctaccgggcccctcatgctggaggagccctgctgcccccacccagccctgctgctgccctgctgcctgcccctcctgctggccctggccctgccacctttgctggcttcctgggccgggaccccggccctgcccctcctcctccagccagcctgggcagccctgccccacccaagggagctgctgcccccagcgccagccagaggaggaagaggaccagcttctctgctgagcagctgcagctgctggagctggtgttccggaggacccgctacccagacatccacctgcgggagcggctggccgccctgaccctgctgcctgagagccgcatccaggtgtggttccagaacagaagagccaagagccggcggcagagcggcaagagcttccagcccctggcccggcctgagatcatcctgaaccactgtgcccctggaacagagaccaagtgcctgaagccccagctgcccctggaggtggatgtgaactgcctgcctgagcccaacggggtgggcggcggcatcagtgacagcagcagccagggccagaactttgagacctgcagccccctgtctgaggacatcggcagcaagctggacagctgggaggagcacatcttcagcgcctttggaaacttctag

SEQ ID NO: 222357 - DNA, 1971 bp, Artificial Sequence
  derived and/or modified sequence
atggccacagccgagtcccgtgcgctccagtttgccgagggcgccgcgtttccagcgtaccgggccccccacgccggcggggcgctcctgccgcccccgagccctgcggcagccctgctccctgcgccgcccgcgggccccggcccagcgacctttgcgggcttcctcggccgggaccccgggccggccccgccgccccccgccagcctgggctcgcctgcgccccccaaaggcgcggccgccccgtcggcgtcgcagcgccgcaagcgcacgtctttcagcgccgaacagctgcagctgctggagctcgtcttccgccggacccggtaccccgacatccacttgcgcgagcgcctggccgcgctcaccctgctccccgagtccaggatccaggtatggttccagaacaggcgtgccaagtctcggcgtcagagtgggaaatccttccaacctttggctaggccggagattatcctcaaccactgtgctcctggaactgaaacgaaatgtctgaagccccagctgcctcttgaggtagatgtgaactgcctgcccgaaccaaacggggttggagggggcatctctgactctagctcccaaggtcagaattttgaaacctgttcccctctctctgaagacattggttcaaagctggactcatgggaggaacacatcttttctgcctttggtaacttttgaggattctgggagaattcgggataagctctgaggagccatgactgacagcctgggagagacacatcagcatactgtcctttctgacttccatgctaaggacatgtccttgttaaccttgatgatggttttgacagcacctctcacatttgaaggtaccccgccactttgtcaatgacgttttaagcccacactcccaccccagagttcccgcattcgtttttacctgtgttctctccaagcctgcacattccattggtctgcatccctatgccttcttgccaggcctgtttttagtttttggactggttgttcagaactcattattttcttcacaagaatgcctcagcttgactcagtttccccttgtgtttgacagctgccattttctcctggtccctccaaggcttataatcttaaagtcactctaccccgtctcttcaaccctcatcctaggtttattactttttaaaattgggcctgtcatcttcacgttcaatcatagctccaatgactctgcatgcagattatttcgacagcccccttgcctctagcttctcaactacttaaaaaaaattaccctctgtgggccaggtgcagtggctcactcctgcaatctcagcactttgggaggccgagtgggtggatcacctgaagtcaggagttcaagaccagcctggccaatatggcgaaaccccatctctgctaaaaatataaaacttagctgggcacggtgacgggagcctgtagtcccagctactcaggaggctgaggcaggagaatcacttgagcctgggaggtggaggttgcagtgatctaagatcgtgccactgcacttcagcctgggagacagagggaggctctcaaaaaaaaaaaaaaaaaaaaaaaaaattactctatggttctgtggtagcctccagttgctaccaaattataaaaagctttcagttaccctcccagataactgatatcatccttagcctgcaggacagctatgcaaatctgaaggtcaactatccacaatatatgctttggtcttaaagtcactcctttcagttttgaaccaaattcataccttttgctttcaaaacactcgaggactccccacctgccttctgaagtctgaaattttctctaagtaatcctgattttgcacctgttacttcgatcactccattacccttagcacttgttattgtacttcctgtgcaagttttgtggattattaaatgtctttcacaaatgttccaatgtaatttctatttaaatgaattc

SEQ ID NO: 222358 - DNA, 699 bp, Artificial Sequence
  derived and/or modified sequence
atggccaccgccgagagccgggccctgcagttcgccgagggcgccgcttttcccgcctaccgtgccccgcatgccggaggcgccctgctcccccccccaagccccgctgccgcactcttgcccgctccgccggcaggtccggggcccgcaaccttcgctggtttccttgggagggaccctggccctgcaccgcctccaccggcctccctgggctcccccgctccgcccaaaggggccgcggccccttcagcgagtcagaggagaaagcgtacatcttttagcgcggagcagctgcagttgctcgagttggttttcagaagaaccaggtatcctgacatacatctcagggagagactggcagccctcaccctacttcccgagagtcggatccaggtatggtttcagaacagaagggccaagtctagacggcaatcaggcaaaagtttccaacctctggcacgccctgaaataattttgaaccattgtgcccctggtacagaaaccaagtgcctcaagcctcagctcccgctggaagtcgatgtcaactgcttgcctgaaccaaacggcgttggcggaggaatttccgactcatcctctcaagggcagaacttcgagacatgttcccccctgagcgaggatattggctcaaagctcgactcttgggaggaacatattttctcagcttttggaaacttttag

SEQ ID NO: 222359 - DNA, 699 bp, Artificial Sequence
  derived and/or modified sequence
atggcaactgcagagagccgggcactgcagttcgccgagggggcagcgtttcctgcttaccgagctccacacgctggaggggctctactgcctcccccttcaccagccgcagccttgcttcctgctccccctgcgggtcccggtcctgccacctttgctggctttctggggcgtgatcccggacctgctccccctcccccagcatccttaggttcgccggctccccctaagggggcagctgcacccagcgcctcccagagaaggaagaggacaagtttttccgccgaacaactccagctgctggaactagtcttcagacgcactcgctaccctgacatacacctccgcgagaggctggctgcacttactttattgcccgagagcaggattcaggtctggtttcagaatcggagagcgaagtcacgcaggcagagcggaaagagctttcagcccttggccagaccagagattatcttgaatcactgcgcccctggaaccgagacaaaatgtcttaagccccagcttcctctggaggtcgacgtcaattgcttgcctgagcctaacggtgtcggtggtggcatctcggattcatcatcacaggggcagaatttcgagacatgttctccactaagtgaagacatcggatctaaattagatagttgggaggaacatatattctcagctttcggtaacttttag

SEQ ID NO: 222360 - DNA, 699 bp, Artificial Sequence
  derived and/or modified sequence
atggccaccgccgagagcagagccctgcagttcgccgagggcgccgccttccccgcctacagagccccccacgccggcggcgccctgctgcccccccccagccccgccgccgccctgctgcccgccccccccgccggccccggccccgccaccttcgccggcttcctgggcagagaccccggccccgccccccccccccccgccagcctgggcagccccgccccccccaagggcgccgccgcccccagcgccagccagagaagaaagagaaccagcttcagcgccgagcagctgcagctgctggagctggtgttcagaagaaccagataccccgacatccacctgagagagagactggccgccctgaccctgctgcccgagagcagaatccaggtgtggttccagaacagaagagccaagagcagaagacagagcggcaagagcttccagcccctggccagacccgagatcatcctgaaccactgcgcccccggcaccgagaccaagtgcctgaagccccagctgcccctggaggtggacgtgaactgcctgcccgagcccaacggcgtgggcggcggcatcagcgacagcagcagccagggccagaacttcgagacctgcagccccctgagcgaggacatcggcagcaagctggacagctgggaggagcacatcttcagcgccttcggcaacttctag

SEQ ID NO: 222361 - DNA, 1068 bp, Artificial Sequence
  derived and/or modified sequence
atggaggagggcgagagaagccccctgctgagccaggagaccgccggccagaagcccctgagcgtgcacagaccccccaccagcggctgcctgggccccgtgcccagagaggaccaggccgaggcctggggctgcagctgctgcccccccgagaccaagcaccaggccctgagcggcacccccaagaagggccccgcccccagcctgagccccggcagcagctgcgtgaagtacctgatcttcctgagcaacttccccttcagcctgctgggcctgctggccctggccatcggcctgtggggcctggccgtgaagggcagcctgggcagcgacctgggcggccccctgcccgccgaccccatgctgggcctggccctgggcggcctggtggtgagcgccgtgagcctggccggctacctgggcgccctgtgcgagaacacctgcctgctgagaggcttcagcggcggcatcctggccttcctggtgctggaggccgtggccggcgccctggtggtggccctgtggggccccctgcaggacagcctggagcacaccctgagagtggccatcgcccactaccaggacgaccccgacctgagattcctgctggaccaggtgcagctgggcctgagatgctgcggcgccgccagctaccaggactggcagcagaacctgtacttcaactgcagcagccccggcgtgcaggcctgcagcctgcccgccagctgctgcatcgaccccagagaggacggcgccagcgtgaacgaccagtgcggcttcggcgtgctgagactggacgccgacgccgcccagagagtggtgtacctggagggctgcggcccccccctgagaagatggctgagagccaacctggccgccagcggcggctacgccatcgccgtggtgctgctgcagggcgccgagctgctgctggccgccagactgctgggcgccctggccgccagaagaggcgccgcctacggccccggcgccagaggcgaggacagagccggcccccagagccccagccccggcgccccccccgccgccaagcccgccagaggctag

SEQ ID NO: 222362 - DNA, 1068 bp, Artificial Sequence
  derived and/or modified sequence
atggaagagggagagaggtccccactgctgtcacaggaaaccgctggccagaaacctttgtcagttcatcggcctcctaccagtggatgcctggggcccgtgccacgtgaggaccaggctgaagcctgggggtgttcatgctgtcctcctgaaacaaaacatcaggccttgtccggtacccccaagaagggaccagccccatccctcagcccgggctcatcatgtgtgaaatatctcatctttctgagcaactttccgtttagcctgctaggcctcctggcgttagccattggcctgtggggtttagctgtgaaggggtccctgggcagcgaccttggaggacccttacctgccgaccctatgctcggattagcactgggtggtctcgtcgtaagtgccgtgtccttggctggatatttgggtgctctatgtgagaacacatgtctgttacgcgggttctccggaggaatccttgcattcctggttctagaagcagtcgctggggcactcgtggttgctctctggggacccctgcaggatagcctcgagcacacgcttagggtggccatcgcccactaccaggacgatccagatcttagatttctgcttgaccaggtccagctgggattgcgatgttgcggagccgcctcataccaggattggcaacagaacctctacttcaactgttcgtctccaggcgtgcaggcctgctctttgccagcttcctgctgtatcgaccctcgggaggatggagcctctgttaatgatcagtgtggcttcggtgttttgcggctcgacgctgatgctgctcagagggtcgtttatctcgaggggtgcggccctccactgcgtcgctggctgagagctaatctggccgcctcgggtggatacgccattgccgtggtgctcctccagggagccgagcttctgttagctgctcgtcttttaggtgccctggcagcaagaagaggcgccgcttatggaccaggtgcgagaggcgaagatcgcgccggacctcagagtccttctccgggagcaccccctgccgctaaacccgcccgcggctag

SEQ ID NO: 222363 - DNA, 1068 bp, Artificial Sequence
  derived and/or modified sequence
atggaggagggggagaggagccccctgctgagccaggagacagctggccagaagcccctgtctgtgcacaggcctcccaccagcggctgcctgggccctgtgccccgggaggaccaggccgaggcctggggctgcagctgctgccccccagagaccaagcaccaggccctgagcggcacccccaagaagggccctgcccccagcctgagccctggcagcagctgtgtgaagtacctgatcttcctgagcaacttccccttcagcctgctgggcctgctggccctggccatcggcctgtggggcctggccgtgaagggcagcctgggcagtgacctgggcggccccctgcctgctgaccccatgctgggcctggccctgggcggcctggtggtgtctgctgtgtccctggccggctacctgggcgccctgtgtgagaacacctgcctgctgcggggcttcagcggcggcatcctggccttcctggtgctggaggccgtggccggggccctggtggtggccctgtggggccccctgcaggacagcctggagcacaccctgcgggtggccatcgcccactaccaggatgatcctgacctgcgcttcctgctggaccaggtgcagctgggcctgcgctgctgcggggccgccagctaccaggactggcagcagaacctgtacttcaactgcagcagccctggggtgcaggcctgcagcctgcctgccagctgctgcatcgaccccagagaagatggagcctctgtgaatgaccagtgtggcttcggcgtgctgcggctggatgctgatgctgcccagagggtggtgtacctggagggctgcggcccccccctgcggcgctggctgcgggccaacctggccgccagcggcggctacgccatcgctgtggtgctgctgcagggcgctgagctgctgctggccgcccggctgctgggcgccctggccgccaggagaggagctgcctacggccctggggcccggggggaggacagagctggcccccagagccccagccctggggcccctcctgctgccaagccagcccggggctag

SEQ ID NO: 222364 - DNA, 1068 bp, Artificial Sequence
  derived and/or modified sequence
atggaggagggcgagcggagccccctgctgagccaggagaccgccgggcaaaagcctttgtccgttcaccgacctcctacatctggttgccttggaccagtgccgagggaagaccaagctgaagcctggggttgttcctgctgtcctccagaaaccaaacaccaggctctgagcggaacaccaaagaaggggcctgcaccctcactctccccaggaagttcctgcgtgaagtaccttatatttttgtccaattttccgttctctctacttgggctgcttgcactcgccataggactgtggggcctcgctgtcaagggctcccttggctctgacctcgggggtcctttacccgccgatcccatgctgggtctggccctcggggggctggtggtgtctgcagttagcctggctgggtatctgggtgccttgtgcgaaaatacatgccttttacgtggcttcagtgggggcattctcgccttcctggtcctcgaggccgtggcaggagcacttgtcgtagccctgtggggtcctctgcaggacagcctggagcacacacttcgggtggcaatcgcgcactaccaggatgatcccgatttgcgttttctcttggatcaggtccagctcggcctcaggtgctgtggcgctgcatcttaccaggattggcaacagaacctctactttaactgctccagcccgggggttcaagcttgtagtttacccgcctcctgttgtatcgaccctagagaggatggcgcttctgtcaacgatcagtgtgggtttggggtgctgaggctggacgccgatgctgctcagcgggtggtgtatctggaaggctgtggaccgccgctgcgcaggtggctgcgggccaacctggccgctagtgggggatatgccatcgcggtagtcctgttgcagggcgctgaactgctcctggccgccaggttgctgggggcactggcggcgcgaagaggcgcggcgtatgggcccggggctcgcggggaggatagggccggcccacagtcccccagccccggagcaccccctgccgccaaaccagcccgaggttag

SEQ ID NO: 222365 - DNA, 1068 bp, Artificial Sequence
  derived and/or modified sequence
atggaagagggagaacgctccccactactgagtcaagagactgcgggacagaagccactgagcgtccaccggccacccaccagcggctgtttaggtcctgtgcccagggaggaccaagccgaggcctggggttgctcctgctgccctccagaaacaaagcatcaggctttgtctgggacacccaagaaagggccagctccctctctttcacccggaagctcttgcgttaagtatttgatcttccttagcaattttccctttagcttgcttggcctccttgcccttgcaatcggactgtggggccttgccgtgaaagggagtctgggctcggatctgggcggtccactgccagctgatcccatgcttggccttgcgctcggcggactggtcgtctccgccgttagtctcgctgggtatctaggggctctgtgtgagaatacgtgcctactgcgcggtttcagcggaggcatcttagcttttttagttcttgaggccgtggccggtgctctggtggtggctctctggggccctctacaggactccttagagcataccttgcgggtcgctatcgcgcactatcaggacgacccggacctgagatttctcctggaccaggtgcagctggggctgcgctgctgcggtgctgccagctaccaggactggcagcagaatctgtactttaactgttcttcccccggtgtgcaggcatgctctttacctgcatcatgctgcatcgatccacgcgaagacggagccagcgtgaacgatcagtgtggctttggggtcctgcgactggacgctgacgcagcgcagcgagtcgtctacctcgaaggctgtggcccacctctgcgaagatggctcagagccaacttggccgcttccggtgggtacgccattgctgtcgtgctgctgcaaggagcagagctcttgcttgcggctcggctcctgggagccctcgcagctaggcggggagctgcatatggacccggtgcccgaggcgaggatagggctggtcctcagtctccatcaccaggcgcacctccagccgctaagccggctagaggctag

SEQ ID NO: 222366 - DNA, 279 bp, Artificial Sequence
  derived and/or modified sequence
atgaccaagccccaggccgagagcggggaggccgcccggcaccccatcttccggcctgcccggcgggtgtttggcatcaagatgaccaccctgcagccccgcatcaaggccccccaggagctgactgtgctgcaggagaggagccggcccaccagcaagaagatggctgtgtgcttccacggcagcagcctgcggtctgaggccaccccccgctacagcctggaggaggaggccagaaatggccgctggcagcaggccctgtcctggtggcccctgtag

SEQ ID NO: 222367 - protein, 875 aa, Artificial Sequence
  derived and/or modified sequence
MNFQAGGGQSPQQQQQLAGGPPQQFALSNSAAIRAEIQRFESVHPNIYAIYDLIERIEDLALQNQIREHVISIEDSFVNSQEWTLSRSVPELKVGIVGNLSSGKSALVHRYLTGTYVQEESPEGGRFKKEIVVDGQSYLLLIRDEGGPPELQFAAWVDAVVFVFSLEDEISFQTVYNYFLRLCSFRNASEVPMVLVGTQDAISAANPRVIDDSRARKLSTDLKRCTYYETCATYGLNVERVFQDVAQKVVALRKKQQLAIGPCKSLPNSPSHSAVSAASIPAVHINQATNGGGSAFSDYSSSVPSTPSISQRELRIETIAASSTPTPIRKQSKRRSNIFTSRKGADLDREKKAAECKVDSIGSGRAIPIKQGILLKRSGKSLNKEWKKKYVTLCDNGLLTYHPSLHDYMQNIHGKEIDLLRTTVKVPGKRLPRATPATAPGTSPRANGLSVERSNTQLGGGTGAPHSASSASLHSERPLSSSAWAGPRPEGLHQRSCSVSSADQWSEATTSLPPGMQHPASGPAEVLSSSPKLDPPPSPHSNRKKHRRKKSTGTPRPDGPSSATEEAEESFEFVVVSLTGQTWHFEASTAEERELWVQSVQAQILASLQGCRSAKDKTRLGNQNAALAVQAVRTVRGNSFCIDCDAPNPDWASLNLGALMCIECSGIHRHLGAHLSRVRSLDLDDWPPELLAVMTAMGNALANSVWEGALGGYSKPGPDACREEKERWIRAKYEQKLFLAPLPSSDVPLGQQLLRAVVEDDLRLLVMLLAHGSKEEVNETYGDGDGRTALHLSSAMANVVFTQLLIWYGVDVRSRDARGLTPLAYARRAGSQECADILIQHGCPGEGCGLAPTPNREPANGTNPSAELHRSPSLL

SEQ ID NO: 222368 - protein, 410 aa, Artificial Sequence
  derived and/or modified sequence
MQNIHGKEIDLLRTTVKVPGKRLPRATPATAPGTSPRANGLSVERSNTQLGGGTASGPAEVLSSSPKLDPPPSPHSNRKKHRRKKSTGTPRPDGPSSATEEAEESFEFVVVSLTGQTWHFEASTAEERELWVQSVQAQILASLQGCRSAKDKTRLGNQNAALAVQAVRTVRGNSFCIDCDAPNPDWASLNLGALMCIECSGIHRHLGAHLSRVRSLDLDDWPPELLAVMTAMGNALANSVWEGALGGYSKPGPDACREEKERWIRAKYEQKLFLAPLPSSDVPLGQQLLRAVVEDDLRLLVMLLAHGSKEEVNETYGDGDGRTALHLSSAMANVVFTQLLIWYGVDVRSRDARGLTPLAYARRAGSQECADILIQHGCPGEGCGLAPTPNREPANGTNPSAELHRSPSLL

SEQ ID NO: 222369 - protein, 911 aa, Artificial Sequence
  derived and/or modified sequence
MNFQAGGGQSPQQQQSLAAPGGGGAAAQQLVCGGQFGGAGPGAGGGGGPSQQLAGGPPQQFALSNSAAIRAEIQRFESVHPNIYAIYDLIERIEDLALQNQIREHVISIEDSFVNSQEWTLSRSVPELKVGIVGNLSSGKSALVHRYLTGTYVQEESPEGGRFKKEIVVDGQSYLLLIRDEGGPPELQFAAWVDAVVFVFSLEDEISFQTVYNYFLRLCSFRNASEVPMVLVGTQDAISAANPRVIDDSRARKLSTDLKRCTYYETCATYGLNVERVFQDVAQKVVALRKKQQLAIGPCKSLPNSPSHSAVSAASIPAVHINQATNGGGSAFSDYSSSVPSTPSISQRELRIETIAASSTPTPIRKQSKRRSNIFTSRKGADLDREKKAAECKVDSIGSGRAIPIKQGILLKRSGKSLNKEWKKKYVTLCDNGLLTYHPSLHDYMQNIHGKEIDLLRTTVKVPGKRLPRATPATAPGTSPRANGLSVERSNTQLGGGTGAPHSASSASLHSERPLSSSAWAGPRPEGLHQRSCSVSSADQWSEATTSLPPGMQHPASGPAEVLSSSPKLDPPPSPHSNRKKHRRKKSTGTPRPDGPSSATEEAEESFEFVVVSLTGQTWHFEASTAEERELWVQSVQAQILASLQGCRSAKDKTRLGNQNAALAVQAVRTVRGNSFCIDCDAPNPDWASLNLGALMCIECSGIHRHLGAHLSRVRSLDLDDWPPELLAVMTAMGNALANSVWEGALGGYSKPGPDACREEKERWIRAKYEQKLFLAPLPSSDVPLGQQLLRAVVEDDLRLLVMLLAHGSKEEVNETYGDGDGRTALHLSSAMANVVFTQLLIWYGVDVRSRDARGLTPLAYARRAGSQECADILIQHGCPGEGCGLAPTPNREPANGTNPSAELHRSPSLL

SEQ ID NO: 222370 - DNA, 2628 bp, Artificial Sequence
  derived and/or modified sequence
atgaacttccaggccggcggcggccagagcccccagcagcagcagcagctggccggcggccccccccagcagttcgccctgagcaacagcgccgccatcagagccgagatccagagattcgagagcgtgcaccccaacatctacgccatctacgacctgatcgagagaatcgaggacctggccctgcagaaccagatcagagagcacgtgatcagcatcgaggacagcttcgtgaacagccaggagtggaccctgagcagaagcgtgcccgagctgaaggtgggcatcgtgggcaacctgagcagcggcaagagcgccctggtgcacagatacctgaccggcacctacgtgcaggaggagagccccgagggcggcagattcaagaaggagatcgtggtggacggccagagctacctgctgctgatcagagacgagggcggcccccccgagctgcagttcgccgcctgggtggacgccgtggtgttcgtgttcagcctggaggacgagatcagcttccagaccgtgtacaactacttcctgagactgtgcagcttcagaaacgccagcgaggtgcccatggtgctggtgggcacccaggacgccatcagcgccgccaaccccagagtgatcgacgacagcagagccagaaagctgagcaccgacctgaagagatgcacctactacgagacctgcgccacctacggcctgaacgtggagagagtgttccaggacgtggcccagaaggtggtggccctgagaaagaagcagcagctggccatcggcccctgcaagagcctgcccaacagccccagccacagcgccgtgagcgccgccagcatccccgccgtgcacatcaaccaggccaccaacggcggcggcagcgccttcagcgactacagcagcagcgtgcccagcacccccagcatcagccagagagagctgagaatcgagaccatcgccgccagcagcacccccacccccatcagaaagcagagcaagagaagaagcaacatcttcaccagcagaaagggcgccgacctggacagagagaagaaggccgccgagtgcaaggtggacagcatcggcagcggcagagccatccccatcaagcagggcatcctgctgaagagaagcggcaagagcctgaacaaggagtggaagaagaagtacgtgaccctgtgcgacaacggcctgctgacctaccaccccagcctgcacgactacatgcagaacatccacggcaaggagatcgacctgctgagaaccaccgtgaaggtgcccggcaagagactgcccagagccacccccgccaccgcccccggcaccagccccagagccaacggcctgagcgtggagagaagcaacacccagctgggcggcggcaccggcgccccccacagcgccagcagcgccagcctgcacagcgagagacccctgagcagcagcgcctgggccggccccagacccgagggcctgcaccagagaagctgcagcgtgagcagcgccgaccagtggagcgaggccaccaccagcctgccccccggcatgcagcaccccgccagcggccccgccgaggtgctgagcagcagccccaagctggaccccccccccagcccccacagcaacagaaagaagcacagaagaaagaagagcaccggcacccccagacccgacggccccagcagcgccaccgaggaggccgaggagagcttcgagttcgtggtggtgagcctgaccggccagacctggcacttcgaggccagcaccgccgaggagagagagctgtgggtgcagagcgtgcaggcccagatcctggccagcctgcagggctgcagaagcgccaaggacaagaccagactgggcaaccagaacgccgccctggccgtgcaggccgtgagaaccgtgagaggcaacagcttctgcatcgactgcgacgcccccaaccccgactgggccagcctgaacctgggcgccctgatgtgcatcgagtgcagcggcatccacagacacctgggcgcccacctgagcagagtgagaagcctggacctggacgactggccccccgagctgctggccgtgatgaccgccatgggcaacgccctggccaacagcgtgtgggagggcgccctgggcggctacagcaagcccggccccgacgcctgcagagaggagaaggagagatggatcagagccaagtacgagcagaagctgttcctggcccccctgcccagcagcgacgtgcccctgggccagcagctgctgagagccgtggtggaggacgacctgagactgctggtgatgctgctggcccacggcagcaaggaggaggtgaacgagacctacggcgacggcgacggcagaaccgccctgcacctgagcagcgccatggccaacgtggtgttcacccagctgctgatctggtacggcgtggacgtgagaagcagagacgccagaggcctgacccccctggcctacgccagaagagccggcagccaggagtgcgccgacatcctgatccagcacggctgccccggcgagggctgcggcctggcccccacccccaacagagagcccgccaacggcaccaaccccagcgccgagctgcacagaagccccagcctgctgtag

SEQ ID NO: 222371 - DNA, 3121 bp, Artificial Sequence
  derived and/or modified sequence
atgaacttccaggcgggcggggggcagagcccgcagcagcagcagcagctggccggcgggcccccccagcagttcgcgctctccaactccgcggccatccgggccgagatccagcgcttcgagtccgtgcatcccaatatctacgccatctacgacctgatcgagcgcatcgaggatttggcgctgcagaaccagatccgggagcacgtcatctccatcgaggactcgtttgtgaacagccaggagtggacgctgagccgctccgtaccggagcttaaagtgggcatagtggggaacctgtctagcgggaagtcagccctggtgcaccgctatctgacggggacctatgtccaggaggagtcccctgaaggggggcggtttaagaaggagattgtggtggatggccagagttacctgctgctgatccgagatgaaggaggcccccctgagctccagtttgctgcctgggtggatgcagtggtgtttgtgttcagcctggaggatgaaatcagtttccagacggtgtacaactacttcctgcgtctctgcagcttccgcaacgccagcgaggtgcccatggtgcttgtgggcacgcaggatgccatcagcgctgcgaatccccgggttatcgacgacagcagagcccgcaagctctccacagatctgaagcggtgcacctactatgagacgtgcgcgacctacgggctcaatgtggagcgtgtcttccaggacgtggcccagaaggtagtggccttgcgaaagaagcagcaactggccatcgggccctgcaagtcactgcccaactcgcccagccactcggccgtgtccgccgcctccatcccggccgtgcacatcaaccaggccacgaatggcggcggcagcgccttcagcgactactcgtcctcagtcccctccacccccagcatcagccagcgggagctgcgcatcgagaccatcgctgcctcctccacccccacacccatccgaaagcagtccaagcggcgctccaacatcttcacgtctcggaagggtgctgacctggaccgggagaagaaggctgccgagtgcaaggtggacagcatcgggagcggccgcgccatccccatcaagcaggggatcctgctaaagcggagcggcaagtccctgaacaaggagtggaagaagaagtatgtgacgctctgtgacaacgggctgctcacctatcaccccagcctgcatgattacatgcagaacatccacggcaaggagattgacctgctgcggacaacggtgaaagtgccagggaagcgcctgccccgagccacacctgccacagccccgggcaccagcccccgtgccaacgggctgtccgtggagcggagtaacacacagctgggtgggggcacaggtgccccccactcggccagcagcgcatccctgcactctgagcgccccctcagcagctcggcctgggctggcccgcgccctgaggggctgcaccagcgctcctgctccgtttccagcgccgaccagtggagtgaggccaccacttccctgcccccaggcatgcagcaccctgccagtggcccagctgaggtactcagttccagccccaagctggatcctcccccatctccccactccaaccggaagaagcaccggaggaaaaagagcaccgggaccccccgaccagacggccccagcagtgctactgaagaggcagaggagtcgtttgaatttgtggtggtgtccctcactgggcagacgtggcacttcgaggcttcaacggcggaggagcgggagctgtgggttcagagtgtgcaggcccagatccttgccagcctgcaaggctgccgcagtgccaaggacaagactcgactggggaaccagaacgcagctctggctgtgcaggccgtccgcaccgtccgcggcaacagcttttgtatcgactgcgatgcacccaatccagactgggccagcctgaacctgggtgccctgatgtgcattgagtgctcaggcatccaccgacacctgggggctcacctgtcccgggtgcgctcccttgacctcgatgactggccgcctgagctgctggctgtcatgactgccatgggcaatgccctcgccaacagcgtctgggagggggccttgggtggctactccaagccagggcctgatgcctgcagagaggagaaggaacgctggatacgggccaagtatgaacagaagctcttcctggccccactgccaagctcagatgtgccactggggcagcagctgctccgggccgtggtggaagatgacctgcggctgttggtgatgctcctggcacatggctccaaagaggaggtgaatgagacctatggggacggggacgggcggacggctctacatctctccagtgccatggccaacgttgtcttcacgcagctgctcatctggtacggggtggacgtgaggagccgggacgcccggggcctgactccactggcatatgctcgccgggccggcagccaggagtgtgcagacatcttgatccagcatggctgccctggggagggctgtggcttagcgcctacccccaacagagagcctgccaatggcaccaacccctctgctgagctgcaccgtagtcctagcctcctataaggcccaggaagagggcagaggggccagaaggactccatggcccaaagaccctcctccctgcaggcactgtgggaacagacacagagatggagaagcagggacatgctgagaggacgaagccaaggaaattagggaggagagtcaaagggatcaaggagagttggggatttgagctgcagcagagagggatgagggatttagccctctgccctaaggtgccattgaaaagggacaggacccttcggaggtgcctgtgaggagaggggagcaggacctctccctcctccagatccctgcctcctagtgccagcccctcacacgccttcatcctgaaacaggaagaggacggcaccaagttgggggtgctggatgaaagagacgaggggtgatctgtgagtcccatgtaaactttgtacattggaatatttatgtttgtgtacatatttgatgtgtgtgtgtatgatgagccaataaaccagactgtgtgcgtggc

SEQ ID NO: 222372 - DNA, 2736 bp, Artificial Sequence
  derived and/or modified sequence
atgaacttccaggccggcggcggccagagcccccagcagcagcagagcctggccgcccccggcggcggcggcgccgccgcccagcagctggtgtgcggcggccagttcggcggcgccggccccggcgccggcggcggcggcggccccagccagcagctggccggcggccccccccagcagttcgccctgagcaacagcgccgccatcagagccgagatccagagattcgagagcgtgcaccccaacatctacgccatctacgacctgatcgagagaatcgaggacctggccctgcagaaccagatcagagagcacgtgatcagcatcgaggacagcttcgtgaacagccaggagtggaccctgagcagaagcgtgcccgagctgaaggtgggcatcgtgggcaacctgagcagcggcaagagcgccctggtgcacagatacctgaccggcacctacgtgcaggaggagagccccgagggcggcagattcaagaaggagatcgtggtggacggccagagctacctgctgctgatcagagacgagggcggcccccccgagctgcagttcgccgcctgggtggacgccgtggtgttcgtgttcagcctggaggacgagatcagcttccagaccgtgtacaactacttcctgagactgtgcagcttcagaaacgccagcgaggtgcccatggtgctggtgggcacccaggacgccatcagcgccgccaaccccagagtgatcgacgacagcagagccagaaagctgagcaccgacctgaagagatgcacctactacgagacctgcgccacctacggcctgaacgtggagagagtgttccaggacgtggcccagaaggtggtggccctgagaaagaagcagcagctggccatcggcccctgcaagagcctgcccaacagccccagccacagcgccgtgagcgccgccagcatccccgccgtgcacatcaaccaggccaccaacggcggcggcagcgccttcagcgactacagcagcagcgtgcccagcacccccagcatcagccagagagagctgagaatcgagaccatcgccgccagcagcacccccacccccatcagaaagcagagcaagagaagaagcaacatcttcaccagcagaaagggcgccgacctggacagagagaagaaggccgccgagtgcaaggtggacagcatcggcagcggcagagccatccccatcaagcagggcatcctgctgaagagaagcggcaagagcctgaacaaggagtggaagaagaagtacgtgaccctgtgcgacaacggcctgctgacctaccaccccagcctgcacgactacatgcagaacatccacggcaaggagatcgacctgctgagaaccaccgtgaaggtgcccggcaagagactgcccagagccacccccgccaccgcccccggcaccagccccagagccaacggcctgagcgtggagagaagcaacacccagctgggcggcggcaccggcgccccccacagcgccagcagcgccagcctgcacagcgagagacccctgagcagcagcgcctgggccggccccagacccgagggcctgcaccagagaagctgcagcgtgagcagcgccgaccagtggagcgaggccaccaccagcctgccccccggcatgcagcaccccgccagcggccccgccgaggtgctgagcagcagccccaagctggaccccccccccagcccccacagcaacagaaagaagcacagaagaaagaagagcaccggcacccccagacccgacggccccagcagcgccaccgaggaggccgaggagagcttcgagttcgtggtggtgagcctgaccggccagacctggcacttcgaggccagcaccgccgaggagagagagctgtgggtgcagagcgtgcaggcccagatcctggccagcctgcagggctgcagaagcgccaaggacaagaccagactgggcaaccagaacgccgccctggccgtgcaggccgtgagaaccgtgagaggcaacagcttctgcatcgactgcgacgcccccaaccccgactgggccagcctgaacctgggcgccctgatgtgcatcgagtgcagcggcatccacagacacctgggcgcccacctgagcagagtgagaagcctggacctggacgactggccccccgagctgctggccgtgatgaccgccatgggcaacgccctggccaacagcgtgtgggagggcgccctgggcggctacagcaagcccggccccgacgcctgcagagaggagaaggagagatggatcagagccaagtacgagcagaagctgttcctggcccccctgcccagcagcgacgtgcccctgggccagcagctgctgagagccgtggtggaggacgacctgagactgctggtgatgctgctggcccacggcagcaaggaggaggtgaacgagacctacggcgacggcgacggcagaaccgccctgcacctgagcagcgccatggccaacgtggtgttcacccagctgctgatctggtacggcgtggacgtgagaagcagagacgccagaggcctgacccccctggcctacgccagaagagccggcagccaggagtgcgccgacatcctgatccagcacggctgccccggcgagggctgcggcctggcccccacccccaacagagagcccgccaacggcaccaaccccagcgccgagctgcacagaagccccagcctgctgtag

SEQ ID NO: 222373 - DNA, 2628 bp, Artificial Sequence
  derived and/or modified sequence
atgaacttccaggccgggggaggacagtctccacagcagcaacagcagcttgcggggggccccccgcaacagtttgcgttgagtaactccgccgcaatcagagcagaaattcagcggttcgaatcagtgcaccctaatatttacgcaatttacgatctaattgagcgaattgaggaccttgcactgcagaatcagatcagagaacacgtgatcagcatcgaggacagctttgtgaacagccaagagtggaccttgtcacgctcagtgcctgagctgaaggtgggaatcgttggaaacttgagttctggaaagtcagccctagtgcatcgctatttgacagggacctatgtgcaggaggaaagccccgagggtgggcgattcaaaaaggagatcgtggtggacggtcagtcctacctgcttctcattcgtgatgagggtggcccaccagagctgcagtttgcagcatgggtagatgccgtggtctttgtgtttagtcttgaggacgagatctccttccaaactgtctacaattactttttaagattgtgctcattcagaaatgcctctgaagtgccaatggttctagtggggacccaagatgccatttcagcagctaacccccgggtaatcgacgacagtagggctcgaaagctaagtacagatctcaaacgctgcacttactacgaaacctgcgccacctacggactgaacgtggaacgtgtcttccaggacgttgcgcaaaaggtggtcgccctaagaaaaaagcagcagctcgcaattggcccctgcaaaagcctgcctaactctccttctcactccgctgtatccgcagcctcgatccccgcagtgcatatcaaccaggcaaccaacggtggcggctcagcattttccgattacagctcatccgttcccagtaccccatcaatctcacagcgagaactccgcatcgagacgatcgcagcctctagcactcccacccccatcaggaagcaaagtaaacggcggagcaacatcttcacatctagaaagggggctgacttggatcgagaaaaaaaagccgccgagtgcaaagtcgattctattgggtccggccgcgctattcccatcaagcagggaatcctcctgaagaggtccggcaagtccctaaacaaagaatggaagaagaaatacgtgaccctgtgtgacaacggactgctgacctaccaccccagcctccatgattacatgcagaatattcacggaaaagaaatcgacctacttagaacaaccgttaaggtgccaggaaaaaggcttccacgcgcaacgccagcaacagcgcctggcacgtccccacgcgcaaacggactttctgtggaacgatccaatacccagttggggggcgggacaggcgcgcctcacagtgctagttccgcctccctgcacagcgaaaggcccctttccagtagcgcttgggctggcccaaggcctgaggggttacaccaaagaagctgttccgtgtcaagcgcagatcagtggagcgaagccactacgagcctgcctccggggatgcaacatccggcaagcggcccagcagaggtcctgtcttccagtcctaagctggaccccccaccatcaccccatagtaacaggaagaaacatagaagaaaaaagagcacaggcacccccagacccgatggcccgagctccgcaacagaggaagccgaagaaagctttgaattcgtggtggtaagcctgactggacaaacctggcacttcgaggctagcaccgctgaggagcgggagctttgggttcagagtgttcaggctcagatcttggccagcctgcagggctgtcgctcagctaaggacaaaacccgcctgggcaatcagaatgccgctctggcagttcaagctgtgcgtacagttagaggaaactctttttgcatcgactgcgatgcgcctaacccagattgggcttccctcaatttaggcgcgttgatgtgcatcgagtgcagcggtattcaccgtcatctgggtgcacacctctcccgggtccgcagtttagacctggatgactggcctcctgagctcctggcagtaatgaccgccatggggaacgccctcgccaactcagtctgggaaggagcgctgggggggtatagtaagccaggcccagacgcatgtagggaggagaaggagcgctggattcgtgcaaagtacgagcagaagctattccttgcccccctcccatcatctgatgtgcctctgggacagcagctgttgagagctgtcgtcgaggacgatcttaggctgcttgttatgctgcttgcacacggaagcaaggaggaagttaatgaaacgtacggggatggagacggacgcactgccttgcacctgtcttctgccatggctaacgtggtctttacccagctgttgatttggtacggcgtggatgtccgtagtcgcgatgcacgcggcctaactccactggcctacgcccggcgggcaggctctcaggagtgtgctgacatcctcattcagcacggctgtcctggtgagggctgcggactcgcacccacgcccaacagggaacccgctaatggcacaaatcccagtgctgagttgcatcgcagtccctccctcctgtag

SEQ ID NO: 222374 - DNA, 2736 bp, Artificial Sequence
  derived and/or modified sequence
atgaacttccaagctggaggcggccagtctccacagcagcagcaaagtcttgctgcccctggtgggggtggggccgccgctcaacagctcgtctgcgggggacaatttgggggggccggacctggggccggaggcggaggggggccgtcccagcaactggctggggggcccccgcagcagtttgctctgagtaactccgctgcaatccgcgctgaaatccagcgatttgagagtgtgcacccaaatatatacgcaatctacgacctgattgagagaatagaggatctggccctccaaaatcaaataagagagcatgtgatcagcattgaggatagtttcgtaaatagccaggaatggacgttatcccgatcagttcctgagctgaaggtcggcattgttggtaacctgtcaagcggcaaatccgcgctggtccataggtacttgaccggcacatatgtgcaagaggagtctcccgagggcggacgcttcaagaaggaaatcgtcgttgacggccaatcatatctgcttctgatcagagatgagggaggaccacctgaactgcagtttgctgcctgggtggatgccgtggtgttcgtgttcagcctagaggatgagatttcttttcagacagtgtataattactttctgcgcctgtgttcattccgcaatgccagcgaagtgccgatggtgcttgtcggaacccaggacgcaattagtgcagccaatcctcgtgttatagacgacagcagagcccggaaactgtcaacagatctcaaacggtgcacttattacgaaacctgtgctacatacggactgaacgttgagcgcgttttccaggacgtggcccagaaagtggttgccctgagaaagaagcaacaattggccatcggcccatgtaagtctctcccaaacagtcctagccactctgccgtgagtgccgctagcataccagccgtgcacatcaaccaggctacaaatgggggggggtcagccttctccgactactcaagctccgttccatccaccccaagcatcagtcagcgggagctgcggatagaaaccattgcggcttcctccactcctacccctataaggaagcagagtaaacgtaggagtaacatatttacatcgaggaaaggcgctgatcttgatagagagaagaaagccgctgaatgtaaagtggacagcatcggaagtggccgcgccattcctattaagcagggaattctccttaaaaggagtggaaagagcctgaataaagagtggaaaaagaaatacgtgacactttgtgataatggcctattaacatatcatccatctctgcacgattacatgcaaaacattcatgggaaggaaattgatctgttgcggacgacagtgaaggtacctggaaaaagactaccccgtgcgacgccagcaaccgctcctggaaccagcccaagagctaatggtttgagcgttgaacgaagcaatactcagctgggaggggggactggagctccacactcagccagctctgccagcctgcatagtgaacgtccactgagtagctctgcgtgggctggacccaggcctgagggcctccatcaacgcagttgtagcgtgtctagcgcagaccagtggtccgaggccactacatcgctccccccgggcatgcagcaccctgcctctggaccagccgaagttctgagtagttcacccaaactggatcctcctccctctccccatagcaacaggaagaagcacaggagaaaaaagtctacaggaaccccccgcccggacgggcctagtagtgctaccgaggaggctgaggaatcattcgagtttgttgtggtctcattaacaggacagacatggcatttcgaggcaagtactgccgaagaacgggagctctgggtgcagtcggtgcaggctcagatactggccagtctgcagggctgccggtcagctaaagacaaaactagacttggcaaccaaaacgcagccctggcagtgcaggccgtcaggaccgtgcgaggaaattctttctgcatagactgtgatgccccaaatcccgattgggcatccctgaacttgggtgctcttatgtgcatagagtgtagcggtattcaccgacacctgggagcccacctgtccagagtaaggtctctcgacctggacgactggccaccggaactcctagctgtcatgacggcgatgggtaatgccttagcaaactctgtatgggaaggcgctcttggtgggtactcgaagccgggacccgatgcatgcagggaggaaaaagaacgttggatccgggcgaagtacgagcagaagctgttcctggccccgctacccagcagtgatgtcccactcggtcagcagttactgcgcgcagtggtcgaagacgatctccgattactggtcatgcttctagctcatggaagtaaagaagaggtgaacgaaacgtacggtgacggagacggccgcaccgctcttcacctaagcagtgctatggctaacgtggtctttacacagctgctcatttggtacggagttgacgtcaggtcccgcgatgccagggggcttaccccactggcctacgcacgccgggcggggagccaagagtgtgcagatatattaattcagcatggttgtcctggcgaaggctgcggcctcgcccctactcctaatagggaacctgctaacggaacaaatccaagcgcagagctgcatagatccccatctttgctgtag

SEQ ID NO: 222375 - DNA, 2628 bp, Artificial Sequence
  derived and/or modified sequence
atgaacttccaggccggcggcggccagagcccccagcagcagcagcagctggccggcggccccccccagcagtttgccctgagcaacagcgctgccatccgggcagagatccagagatttgagagcgtgcaccccaacatctatgccatctatgacctgattgaaagaattgaggacctggccctgcagaaccagatccgggagcacgtgatcagcattgaggacagctttgtgaacagccaggagtggaccctgagccgctctgtgcctgagctgaaggtgggcatcgtgggcaacctgagcagcggcaagagcgccctggtgcaccgctacctgaccggcacctacgtgcaggaggagagccctgagggcggccgcttcaagaaggagatcgtggtggatggccagagctacctgctgctgatcagagatgagggcggccccccagagctgcagtttgctgcctgggtggatgctgtggtgtttgtgttcagcctggaggatgagatctccttccagacagtgtacaactacttcctgcggctgtgcagcttcagaaatgccagcgaggtgcccatggtgctggtgggcacccaggatgccatctctgctgccaacccccgggtgattgatgacagccgggccaggaagctgagcacagacctgaagcgctgcacctactatgagacctgtgccacctacggcctgaatgtggagagggtcttccaggatgtggcccagaaggtggtggccctgaggaagaagcagcagctggccatcggcccctgcaagagcctgcccaacagccccagccacagcgctgtgtctgctgccagcatcccagctgtgcacatcaaccaggccaccaacggcggcggcagcgccttcagtgactacagcagctctgtgcccagcacccccagcatcagccagcgggagctgcgcatcgagaccatcgccgccagcagcacccccacccccatcaggaagcagagcaagaggaggagcaacatcttcaccagcaggaaaggagctgacctggaccgggagaagaaggctgctgagtgcaaggtggacagcatcggcagcggccgggccatccccatcaagcagggcatcctgctgaagaggtctgggaagagcctgaacaaggagtggaagaagaagtatgtgaccctgtgtgacaatggcctgctgacctaccaccccagcctgcatgactacatgcagaacatccacggcaaggagattgacctgctgcggaccaccgtgaaggtgcctgggaagaggctgccccgggccaccccagccacagcccctggcaccagcccccgggccaacggcctgtctgtggagaggagcaacacccagctgggcggcggcaccggggccccccacagcgccagcagcgccagcctgcacagcgagcggcccctgagcagcagcgcctgggccggccccaggcctgagggcctgcaccagaggagctgcagcgtgtcctctgctgaccagtggagcgaggccaccaccagcctgcccccaggcatgcagcacccagccagcggccctgctgaggtgctgagcagcagccccaagctggaccccccacccagcccccacagcaacaggaagaagcacaggaggaagaagagcacaggcacccccaggccagatggccccagcagcgccacagaggaggccgaggagagctttgaatttgtggtggtgtccctgaccggccagacctggcactttgaggccagcacagctgaggagcgggagctgtgggtgcagagcgtgcaggcccagatcctggccagcctgcagggctgccgcagcgccaaggacaagacccggctgggcaaccagaatgctgccctggccgtgcaggccgtgaggacagtgcggggcaacagcttctgcatcgactgtgatgcccccaacccagactgggccagcctgaacctgggcgccctgatgtgcattgaatgttctggcatccaccgccacctgggcgcccacctgagccgggtgcgcagcctggacctggatgactggcccccagagctgctggccgtgatgacagccatgggaaatgccctggccaacagcgtgtgggagggcgccctgggcggctacagcaagccaggcccagatgcctgccgggaggagaaggagcgctggatccgggccaagtatgagcagaagctgttcctggcccccctgcccagcagtgatgtgcccctgggccagcagctgctgcgggctgtggtggaggatgacctgcggctgctggtgatgctgctggcccacggcagcaaggaggaggtgaatgagacctatggagatggagatggccgcacagccctgcacctgagcagcgccatggccaacgtggtgttcacccagctgctgatctggtacggcgtggatgtgcgcagcagagatgcccggggcctgacccccctggcctatgccaggagagctggcagccaggagtgtgccgacatcctgatccagcacggctgccctggagagggctgcggcctggcccccacccccaaccgggagcccgccaacggcaccaaccccagcgctgagctgcacaggagccccagcctgctgtag

SEQ ID NO: 222376 - DNA, 2736 bp, Artificial Sequence
  derived and/or modified sequence
atgaacttccaggccggcggcggccagagcccccagcagcagcagagcctggccgcccctgggggcggcggggccgccgcccagcagctggtgtgtggcggccagtttggaggagctggccctggagctgggggcggcggcggccccagccagcagctggccggcggccccccccagcagtttgccctgagcaacagcgctgccatccgggcagagatccagagatttgagagcgtgcaccccaacatctatgccatctatgacctgattgaaagaattgaggacctggccctgcagaaccagatccgggagcacgtgatcagcattgaggacagctttgtgaacagccaggagtggaccctgagccgctctgtgcctgagctgaaggtgggcatcgtgggcaacctgagcagcggcaagagcgccctggtgcaccgctacctgaccggcacctacgtgcaggaggagagccctgagggcggccgcttcaagaaggagatcgtggtggatggccagagctacctgctgctgatcagagatgagggcggccccccagagctgcagtttgctgcctgggtggatgctgtggtgtttgtgttcagcctggaggatgagatctccttccagacagtgtacaactacttcctgcggctgtgcagcttcagaaatgccagcgaggtgcccatggtgctggtgggcacccaggatgccatctctgctgccaacccccgggtgattgatgacagccgggccaggaagctgagcacagacctgaagcgctgcacctactatgagacctgtgccacctacggcctgaatgtggagagggtcttccaggatgtggcccagaaggtggtggccctgaggaagaagcagcagctggccatcggcccctgcaagagcctgcccaacagccccagccacagcgctgtgtctgctgccagcatcccagctgtgcacatcaaccaggccaccaacggcggcggcagcgccttcagtgactacagcagctctgtgcccagcacccccagcatcagccagcgggagctgcgcatcgagaccatcgccgccagcagcacccccacccccatcaggaagcagagcaagaggaggagcaacatcttcaccagcaggaaaggagctgacctggaccgggagaagaaggctgctgagtgcaaggtggacagcatcggcagcggccgggccatccccatcaagcagggcatcctgctgaagaggtctgggaagagcctgaacaaggagtggaagaagaagtatgtgaccctgtgtgacaatggcctgctgacctaccaccccagcctgcatgactacatgcagaacatccacggcaaggagattgacctgctgcggaccaccgtgaaggtgcctgggaagaggctgccccgggccaccccagccacagcccctggcaccagcccccgggccaacggcctgtctgtggagaggagcaacacccagctgggcggcggcaccggggccccccacagcgccagcagcgccagcctgcacagcgagcggcccctgagcagcagcgcctgggccggccccaggcctgagggcctgcaccagaggagctgcagcgtgtcctctgctgaccagtggagcgaggccaccaccagcctgcccccaggcatgcagcacccagccagcggccctgctgaggtgctgagcagcagccccaagctggaccccccacccagcccccacagcaacaggaagaagcacaggaggaagaagagcacaggcacccccaggccagatggccccagcagcgccacagaggaggccgaggagagctttgaatttgtggtggtgtccctgaccggccagacctggcactttgaggccagcacagctgaggagcgggagctgtgggtgcagagcgtgcaggcccagatcctggccagcctgcagggctgccgcagcgccaaggacaagacccggctgggcaaccagaatgctgccctggccgtgcaggccgtgaggacagtgcggggcaacagcttctgcatcgactgtgatgcccccaacccagactgggccagcctgaacctgggcgccctgatgtgcattgaatgttctggcatccaccgccacctgggcgcccacctgagccgggtgcgcagcctggacctggatgactggcccccagagctgctggccgtgatgacagccatgggaaatgccctggccaacagcgtgtgggagggcgccctgggcggctacagcaagccaggcccagatgcctgccgggaggagaaggagcgctggatccgggccaagtatgagcagaagctgttcctggcccccctgcccagcagtgatgtgcccctgggccagcagctgctgcgggctgtggtggaggatgacctgcggctgctggtgatgctgctggcccacggcagcaaggaggaggtgaatgagacctatggagatggagatggccgcacagccctgcacctgagcagcgccatggccaacgtggtgttcacccagctgctgatctggtacggcgtggatgtgcgcagcagagatgcccggggcctgacccccctggcctatgccaggagagctggcagccaggagtgtgccgacatcctgatccagcacggctgccctggagagggctgcggcctggcccccacccccaaccgggagcccgccaacggcaccaaccccagcgctgagctgcacaggagccccagcctgctgtag

SEQ ID NO: 222377 - DNA, 2628 bp, Artificial Sequence
  derived and/or modified sequence
atgaacttccaggccggcggcggccagagcccccagcagcagcagcaacttgcaggggggcctcctcagcagttcgccctgtccaactccgcagccatccgcgcagaaattcaaagatttgagagcgtgcaccctaatatctatgctatctatgacctcatagaaaggatcgaggatctcgccctccagaaccagatcagagagcacgtgatctcaatagaggactcgttcgtcaactctcaagagtggacactgtctaggtccgtgcctgagctcaaggtgggtattgtaggcaacctgagttccggcaagtcggccctagtacatagatacttgacaggcacttacgtgcaggaggaatctcccgagggaggaaggttcaaaaaagagatcgtcgtcgatggacaatcctacctcttgttgatacgggacgaaggcggcccacctgagctccagttcgcggcgtgggtggatgccgtggtattcgtgtttagcctagaagacgaaataagttttcagaccgtttacaactattttctccggttatgctctttccggaatgcatcggaggtgcccatggtgctggttggcactcaggatgccatttccgcggctaatcctcgcgtgattgatgatagtagggcccggaagttatcaactgacttgaaaagatgcacctattacgaaacatgtgccacttacggactcaacgtcgagagagtcttccaggatgtggcacagaaagtggtggctctgaggaagaaacagcagctcgctatcggtccatgcaaatctctcccaaatagcccttcccatagtgccgtctctgccgctagcattcccgcggtccacattaatcaagccaccaacgggggaggttctgccttctctgattattcttcttcggtacccagcaccccgtccatctcccagcgcgaacttaggattgaaaccatcgcagcttcatctactccgacacctatcagaaaacaatctaaaaggcggtcaaatatctttacatctaggaagggagctgacctggaccgggaaaaaaaggccgccgaatgcaaggtagacagcatcgggtccggaagagccattcccatcaaacaggggatactgctcaagcgatctggcaagagcctgaacaaagagtggaagaagaaatacgtcactttgtgcgataacgggctactaacatatcatcccagccttcatgattatatgcagaatattcacggcaaagagattgatctgttacgcaccaccgtcaaggttcctgggaagcgtttgcctagggcaacacccgccaccgcccccggtacatcccccagagcaaatgggctttctgtcgaaagatccaatacccagctgggcggcggaactggggcacctcacagtgcctcttctgcgagtctccactcagaacgaccgcttagctcatcggcgtgggccggcccgcgaccagagggcttgcatcagcggtcctgttctgtttcaagcgcagaccagtggagcgaagccacaacctctctccctcctggaatgcagcacccagcctcaggcccagcggaggtgctctcctcttctcctaagctcgaccctccgccaagcccacatagcaaccggaagaaacataggagaaagaaatccactggcactccacgccctgatgggccgtcctccgctaccgaagaggctgaagagagctttgagtttgtggtggtgagcctcaccggccagacctggcactttgaggcctctaccgccgaagagcgagagctttgggtgcagtcagttcaagcacaaattctcgcctccctgcaaggatgcaggtctgccaaagataagactcggctgggtaaccaaaatgccgctctggccgttcaggccgtgcggacagtccggggaaactctttttgcatagattgtgatgcacccaatcccgactgggcatccttgaacctgggtgctctcatgtgtatcgagtgcagtggcatccatagacacctgggggcacacctgagtcgcgtgcgcagtctggacctcgatgactggcccccagagcttctggcagttatgactgccatgggcaatgcccttgccaactcagtgtgggaaggcgccctgggaggctattctaaaccaggccccgatgcttgtcgggaagagaaagaaaggtggatacgggcaaagtacgaacagaagcttttcctcgcacccctgccttcttccgatgtgcctctcgggcagcagctgttacgagccgtagtagaggatgatctgaggctgctggtgatgctgctagcacatggcagtaaagaggaagttaatgaaacctatggcgacggagatggacgaaccgcgttgcacctctcatccgccatggctaacgtcgtgtttactcagctgctcatctggtatggcgtggacgtgaggtccagagacgcccggggactgacacctctggcctatgcaagacgtgccggctcgcaagaatgtgcagacatcctcattcagcacggatgtcctggtgaaggctgcggtctggccccgacaccaaatcgagaacccgctaatggaacaaatcctagtgccgagctacataggtcccctagtctactgtag

SEQ ID NO: 222378 - DNA, 3061 bp, Artificial Sequence
  derived and/or modified sequence
gccatgaacttccaggcgggcggggggcagagcccgcagcagcagcagagcctggcggctccggggggcggcggcgctgccgcgcagcagctcgtctgcggcgggcagttcggcggcgcggggcccggggccgggggcggcggcggcccctcgcagcagctggccggcgggcccccccagcagttcgcgctctccaactccgcggccatccgggccgagatccagcgcttcgagtccgtgcatcccaatatctacgccatctacgacctgatcgagcgcatcgaggatttggcgctgcagaaccagatccgggagcacgtcatctccatcgaggactcgtttgtgaacagccaggagtggacgctgagccgctccgtaccggagcttaaagtgggcatagtggggaacctgtctagcgggaagtcagccctggtgcaccgctatctgacggggacctatgtccaggaggagtcccctgaaggggggcggtttaagaaggagattgtggtggatggccagagttacctgctgctgatccgagatgaaggaggcccccctgagctccagtttgctgcctgggtggatgcagtggtgtttgtgttcagcctggaggatgaaatcagtttccagacggtgtacaactacttcctgcgtctctgcagcttccgcaacgccagcgaggtgcccatggtgcttgtgggcacgcaggatgccatcagcgctgcgaatccccgggttatcgacgacagcagagcccgcaagctctccacagatctgaagcggtgcacctactatgagacgtgcgcgacctacgggctcaatgtggagcgtgtcttccaggacgtggcccagaaggtagtggccttgcgaaagaagcagcaactggccatcgggccctgcaagtcactgcccaactcgcccagccactcggccgtgtccgccgcctccatcccggccgtgcacatcaaccaggccacgaatggcggcggcagcgccttcagcgactactcgtcctcagtcccctccacccccagcatcagccagcgggagctgcgcatcgagaccatcgctgcctcctccacccccacacccatccgaaagcagtccaagcggcgctccaacatcttcacgtctcggaagggtgctgacctggaccgggagaagaaggctgccgagtgcaaggtggacagcatcgggagcggccgcgccatccccatcaagcaggggatcctgctaaagcggagcggcaagtccctgaacaaggagtggaagaagaagtatgtgacgctctgtgacaacgggctgctcacctatcaccccagcctgcatgattacatgcagaacatccacggcaaggagattgacctgctgcggacaacggtgaaagtgccagggaagcgcctgccccgagccacacctgccacagccccgggcaccagcccccgtgccaacgggctgtccgtggagcggagtaacacacagctgggtgggggcacagccagtggcccagctgaggtactcagttccagccccaagctggatcctcccccatctccccactccaaccggaagaagcaccggaggaaaaagagcaccgggaccccccgaccagacggccccagcagtgctactgaagaggcagaggagtcgtttgaatttgtggtggtgtccctcactgggcagacgtggcacttcgaggcttcaacggcggaggagcgggagctgtgggttcagagtgtgcaggcccagatccttgccagcctgcaaggctgccgcagtgccaaggacaagactcgactggggaaccagaacgcagctctggctgtgcaggccgtccgcaccgtccgcggcaacagcttttgtatcgactgcgatgcacccaatccagactgggccagcctgaacctgggtgccctgatgtgcattgagtgctcaggcatccaccgacacctgggggctcacctgtcccgggtgcgctcccttgacctcgatgactggccgcctgagctgctggctgtcatgactgccatgggcaatgccctcgccaacagcgtctgggagggggccttgggtggctactccaagccagggcctgatgcctgcagagaggagaaggaacgctggatacgggccaagtatgaacagaagctcttcctggccccactgccaagctcagatgtgccactggggcagcagctgctccgggccgtggtggaagatgacctgcggctgttggtgatgctcctggcacatggctccaaagaggaggtgaatgagacctatggggacggggacgggcggacggctctacatctctccagtgccatggccaacgttgtcttcacgcagctgctcatctggtacggggtggacgtgaggagccgggacgcccggggcctgactccactggcatatgctcgccgggccggcagccaggagtgtgcagacatcttgatccagcatggctgccctggggagggctgtggcttagcgcctacccccaacagagagcctgccaatggcaccaacccctctgctgagctgcaccgtagtcctagcctcctataaggcccaggaagagggcagaggggccagaaggactccatggcccaaagaccctcctccctgcaggcactgtgggaacagacacagagatggagaagcagggacatgctgagaggacgaagccaaggaaattagggaggagagtcaaagggatcaaggagagttggggatttgagctgcagcagagagggatgagggatttagccctctgccctaaggtgccattgaaaagggacaggacccttcggaggtgcctgtgaggagaggggagcaggacctctccctcctccagatccctgcctcctagtgccagcccctcacacgccttcatcctgaaacaggaagaggacggcaccaagttgggggtgctggatgaaagagacgaggggtgatctgtgagtcccatgtaaactttgtacattggaatatttatgtttgtgtacatatttgatgtgtgtgtgtatgatgagccaataaaccagactgtgtgcgtggc

SEQ ID NO: 222379 - DNA, 3225 bp, Artificial Sequence
  derived and/or modified sequence
atgaacttccaggcgggcggggggcagagcccgcagcagcagcagagcctggcggctccggggggcggcggcgctgccgcgcagcagctcgtctgcggcgggcagttcggcggcgcggggcccggggccgggggcggcggcggcccctcgcagcagctggccggcgggcccccccagcagttcgcgctctccaactccgcggccatccgggccgagatccagcgcttcgagtccgtgcatcccaatatctacgccatctacgacctgatcgagcgcatcgaggatttggcgctgcagaaccagatccgggagcacgtcatctccatcgaggactcgtttgtgaacagccaggagtggacgctgagccgctccgtaccggagcttaaagtgggcatagtggggaacctgtctagcgggaagtcagccctggtgcaccgctatctgacggggacctatgtccaggaggagtcccctgaaggggggcggtttaagaaggagattgtggtggatggccagagttacctgctgctgatccgagatgaaggaggcccccctgagctccagtttgctgcctgggtggatgcagtggtgtttgtgttcagcctggaggatgaaatcagtttccagacggtgtacaactacttcctgcgtctctgcagcttccgcaacgccagcgaggtgcccatggtgcttgtgggcacgcaggatgccatcagcgctgcgaatccccgggttatcgacgacagcagagcccgcaagctctccacagatctgaagcggtgcacctactatgagacgtgcgcgacctacgggctcaatgtggagcgtgtcttccaggacgtggcccagaaggtagtggccttgcgaaagaagcagcaactggccatcgggccctgcaagtcactgcccaactcgcccagccactcggccgtgtccgccgcctccatcccggccgtgcacatcaaccaggccacgaatggcggcggcagcgccttcagcgactactcgtcctcagtcccctccacccccagcatcagccagcgggagctgcgcatcgagaccatcgctgcctcctccacccccacacccatccgaaagcagtccaagcggcgctccaacatcttcacgtctcggaagggtgctgacctggaccgggagaagaaggctgccgagtgcaaggtggacagcatcgggagcggccgcgccatccccatcaagcaggggatcctgctaaagcggagcggcaagtccctgaacaaggagtggaagaagaagtatgtgacgctctgtgacaacgggctgctcacctatcaccccagcctgcatgattacatgcagaacatccacggcaaggagattgacctgctgcggacaacggtgaaagtgccagggaagcgcctgccccgagccacacctgccacagccccgggcaccagcccccgtgccaacgggctgtccgtggagcggagtaacacacagctgggtgggggcacaggtgccccccactcggccagcagcgcatccctgcactctgagcgccccctcagcagctcggcctgggctggcccgcgccctgaggggctgcaccagcgctcctgctccgtttccagcgccgaccagtggagtgaggccaccacttccctgcccccaggcatgcagcaccctgccagtggcccagctgaggtactcagttccagccccaagctggatcctcccccatctccccactccaaccggaagaagcaccggaggaaaaagagcaccgggaccccccgaccagacggccccagcagtgctactgaagaggcagaggagtcgtttgaatttgtggtggtgtccctcactgggcagacgtggcacttcgaggcttcaacggcggaggagcgggagctgtgggttcagagtgtgcaggcccagatccttgccagcctgcaaggctgccgcagtgccaaggacaagactcgactggggaaccagaacgcagctctggctgtgcaggccgtccgcaccgtccgcggcaacagcttttgtatcgactgcgatgcacccaatccagactgggccagcctgaacctgggtgccctgatgtgcattgagtgctcaggcatccaccgacacctgggggctcacctgtcccgggtgcgctcccttgacctcgatgactggccgcctgagctgctggctgtcatgactgccatgggcaatgccctcgccaacagcgtctgggagggggccttgggtggctactccaagccagggcctgatgcctgcagagaggagaaggaacgctggatacgggccaagtatgaacagaagctcttcctggccccactgccaagctcagatgtgccactggggcagcagctgctccgggccgtggtggaagatgacctgcggctgttggtgatgctcctggcacatggctccaaagaggaggtgaatgagacctatggggacggggacgggcggacggctctacatctctccagtgccatggccaacgttgtcttcacgcagctgctcatctggtacggggtggacgtgaggagccgggacgcccggggcctgactccactggcatatgctcgccgggccggcagccaggagtgtgcagacatcttgatccagcatggctgccctggggagggctgtggcttagcgcctacccccaacagagagcctgccaatggcaccaacccctctgctgagctgcaccgtagtcctagcctcctataaggcccaggaagagggcagaggggccagaaggactccatggcccaaagaccctcctccctgcaggcactgtgggaacagacacagagatggagaagcagggacatgctgagaggacgaagccaaggaaattagggaggagagtcaaagggatcaaggagagttggggatttgagctgcagcagagagggatgagggatttagccctctgccctaaggtgccattgaaaagggacaggacccttcggaggtgcctgtgaggagaggggagcaggacctctccctcctccagatccctgcctcctagtgccagcccctcacacgccttcatcctgaaacaggaagaggacggcaccaagttgggggtgctggatgaaagagacgaggggtgatctgtgagtcccatgtaaactttgtacattggaatatttatgtttgtgtacatatttgatgtgtgtgtgtatgatgagccaataaaccagactgtgtgcg

SEQ ID NO: 222380 - DNA, 2736 bp, Artificial Sequence
  derived and/or modified sequence
atgaacttccaggccggcggcggccagagcccccagcagcagcagtctctagccgcccccggcggcgggggagctgcagctcagcagctggtctgcggtggtcagtttggtggcgctggtcccggtgccggcgggggaggaggcccatcccagcaacttgccggcggacccccgcagcagtttgccctatctaattccgccgccatccgggctgaaatccagcgctttgaatctgtgcatcccaacatctacgctatttatgacctaatagaacggattgaagacttagctctgcaaaaccagattcgtgagcatgtcatcagcatcgaagattctttcgtgaacagccaggagtggaccttgtcccggtccgtacctgagctcaaagtgggaatcgttggaaacctgagcagcggcaagtctgcccttgtgcaccgatatctgacagggacttacgttcaggaggaaagtcctgaaggaggcaggttcaaaaaggagattgtcgtcgacggtcagtcctatctgcttctaataagggatgaggggggacctccagagctacagttcgctgcgtgggtggacgcagtggtcttcgtcttctcacttgaggatgaaatctccttccagacagtctacaactacttcctgcggttatgttcctttcgaaacgcatccgaagtcccgatggtgttagtgggcacccaggatgccattagtgctgctaaccctagagtcatcgacgacagcagggccagaaagctttccaccgacctgaaacgctgtacctactatgaaacatgtgccacatacggcctgaatgtggaaagggtcttccaagacgtggcacaaaaggtggtagccctgagaaagaagcagcaactggcaatcgggccttgtaaatctctgcctaactcaccaagccactccgccgttagtgctgccagcattcccgccgttcatattaaccaggccaccaacggtggcggctcagccttcagtgattacagctccagcgttccctctacgccgtccatttctcagagggaattacggatcgaaaccattgcggccagtagtacgccaaccccaatcagaaagcagagcaaacgtcggagcaacattttcacaagcagaaagggagctgacttggatcgagaaaaaaaagccgctgagtgcaaggttgactctattggttctggcagggccatccctatcaagcaaggtatcctgctaaagcgctcaggtaaatccctaaacaaagagtggaaaaagaaatacgtgacactgtgtgataacgggctcctgacctatcatcccagcctgcacgactatatgcagaacatacatggaaaggagattgatctattgcgtacgacagtgaaagttccaggcaagcgtcttcctcgggcgaccccggccacagcacctggtacatcccctcgggctaacggcttgagcgtcgagcgcagtaatactcagctggggggcggcacgggagctccgcatagcgcgtcatctgcgtccctacacagcgaaagacccctgagctcaagtgcttgggcaggcccgagaccggaaggccttcaccaaagaagctgctctgtgagcagcgccgatcagtggtccgaagctaccacttctttgcccccgggcatgcagcaccctgccagtggtcccgctgaagtgctgtcttcaagtccaaagctggaccctcctccttcccctcacagcaatcggaagaagcaccgccgaaagaaaagcaccggaacacccaggcccgacgggccctcttctgctactgaagaagctgaggaatccttcgaattcgtggttgtgtctctgactggccagacctggcatttcgaggcttctaccgcagaggagagggaactgtgggtacagagtgtacaggctcaaattctggcatctcttcaaggatgccgctctgcaaaagacaagactcggcttggcaatcagaacgccgccctagccgttcaggctgtccgaacggtgcgcggtaactctttttgcatagattgcgatgcacccaaccccgattgggcttccctgaatctaggagcccttatgtgtatcgagtgtagcggcatccacaggcacctgggagcacatctgtcccgggttcgttccctggatctggacgattggcctcccgagctgttggccgtgatgactgcgatgggcaacgccctcgccaatagtgtatgggagggcgcgctggggggatacagcaagccaggaccagatgcatgccgagaggagaaggagcggtggatccgagccaaatacgaacaaaagctgtttctggctcctttgccttccagtgacgtacctctggggcagcagctgctgcgtgcggtggtagaggacgacctgaggctgcttgttatgctgctggctcatggctccaaggaggaagtgaatgaaacctatggagatggcgatgggaggactgccctgcatctgtcaagtgcgatggctaatgtggtatttacccagctcctgatttggtatggggtagatgttagatctcgagatgctaggggactaactcccctggcctatgcacgtagggccggatctcaagagtgcgccgacatcctgatccagcatggctgccccggcgagggttgtgggctcgcccctacgccaaatcgggagcctgccaacgggaccaacccctcagcggagttgcatcggtccccctcgctgctgtag

SEQ ID NO: 222381 - DNA, 2628 bp, Artificial Sequence
  derived and/or modified sequence
atgaacttccaggcaggcggaggccaatccccacagcagcagcagcagctggctggtggacccccacagcagttcgcccttagcaattctgccgctattagagcagagatccagcgatttgagtctgtgcaccctaatatctatgctatctacgacttgattgagcgcatcgaagatttggccttacaaaatcaaattagagagcacgtgatcagtatcgaggactcctttgtgaattctcaggaatggacactcagtagatccgtgccggagctcaaggtgggcatagtaggaaacctatcatctgggaagtcggcactggtacaccgatacttgacagggacttacgtacaggaggagagccctgaaggcggacggttcaagaaggaaatagtagtcgatggtcagagctacctgttgctcatcagagacgaaggtggtccccctgagctgcaattcgccgcttgggtggatgccgtggttttcgtgttttccttggaggacgagatctcattccaaacagtatacaactatttcctcaggctgtgttcattccggaatgccagcgaggtgccaatggtcctcgtcggcactcaagatgctatcagtgcagctaacccaagggtaatcgatgacagcagggccagaaagctctccacagacttgaaacggtgcacctattatgaaacctgcgccacctacgggctcaatgtggagagagtgttccaggatgtggcccagaaggtggtcgctttgagaaaaaaacaacagctcgccattggcccttgtaaatcacttcccaactctccctcacattctgctgtatctgctgcttccattccagctgttcatataaatcaggccaccaacgggggaggctccgccttctcagattattcttcaagcgttccaagcactccctctattagccagcgggagctacgtatcgaaacaatcgcagcttcctccacgcccacccctattaggaaacagagcaagagacggtccaacatcttcacctcgcgaaagggcgcagatctcgaccgggaaaagaaagccgcagaatgtaaggtggattcaattggttccggcagagctataccaatcaagcagggaattctgttaaagagaagcggcaaaagcttaaataaggagtggaagaaaaagtatgtgacgttgtgtgacaatggcctgctgacgtatcacccatcattgcacgactatatgcagaacattcacggtaaagaaatcgatttgcttagaacaactgttaaggttccagggaagagacttcccagagccactcccgcaactgcccctggcacatcccctagagccaatgggctttccgtcgaacgcagcaatacgcagttaggagggggaacaggcgcaccccactcggcatcctcagcttcccttcacagcgagcgacctctaagttccagcgcatgggcaggtccccgacctgaaggcttacatcaacgttcctgttccgtgtctagcgcggaccagtggtcagaagctacaacctccctccccccaggaatgcagcatccagcaagcggtcccgcagaagtgcttagctcttctcctaaactggatccaccacctagtccacattccaataggaagaaacacaggcgaaaaaagagcacgggcacgcctcggcctgatggtccttcttctgccaccgaagaggctgaggaaagttttgagttcgtcgtggtaagtcttactggacaaacttggcactttgaggcttcgacggctgaggagcgcgagctctgggtgcagtccgtacaggctcaaatcctggcgagcctgcagggctgccgatctgctaaggataaaacccggctaggaaaccagaatgccgcactggcagtgcaggccgttaggactgtacgcggaaatagtttttgtattgactgcgacgctcctaatccagattgggcatcactcaatctaggggcattgatgtgcattgaatgctcagggattcaccgccacctgggagctcaccttagcagagtccgctccctggatttagacgattggccgccagaattattggccgtcatgaccgcgatgggcaatgccctggctaattctgtctgggagggcgctctggggggttattcaaaacctggaccggacgcttgtcgggaagagaaagagagatggattcgggcaaaatatgagcagaagctgtttctcgctcccctgccctcttcggacgtcccactcggacagcagctcctcagagctgtagtcgaagacgatctccggctactggttatgctgctcgctcatgggagcaaggaggaggtaaacgagacatatggggatggagacggcagaaccgcactgcacctgagctcagccatggcaaatgttgtgttcacccagctgcttatctggtacggcgttgatgtcagatcccgagacgcacgcggactgacccccctggcatatgcgcgtcgtgcaggcagccaagaatgcgccgatatcttgatccagcatggctgtcctggcgaaggatgcggactggcccctacccccaaccgtgaacctgcgaacggtaccaatcctagtgctgagctccataggtcgccaagccttctctag

SEQ ID NO: 222382 - DNA, 2736 bp, Artificial Sequence
  derived and/or modified sequence
atgaactttcaagcaggaggcggtcaatctcctcagcagcagcagagcctcgccgctcctggaggcggaggtgcagctgcccagcagctggtttgtgggggacagttcggaggcgctggccctggggctggaggcggaggtgggccttctcagcaactggcagggggacctcctcagcagttcgccctcagtaacagtgccgctatccgagccgaaatccagagatttgaatccgtgcatcctaacatttacgccatctacgacctaattgagcggatcgaagatcttgccctgcagaatcagatcagggagcatgttatcagcatcgaagatagcttcgttaattcgcaagaatggactctctccagaagtgtgcccgagttaaaagttggcatcgtgggaaacctgagctccggtaagtctgcgctggttcaccgctaccttacaggcacatacgtgcaggaagagagccccgaaggcggtcgcttcaaaaaggagattgttgtggacggtcaatcttatttgctgctcatcagagatgaaggtggcccaccagagcttcaattcgctgcatgggtcgacgcagtagtctttgtgttcagccttgaggatgaaatcagcttccagactgtgtacaattactttcttaggctctgttccttcaggaatgcaagcgaggtgcccatggtactggttggcactcaagatgccatatcagccgcaaatcccagagtgatcgatgattccagagctaggaagttaagcacggatctaaaaagatgcacttactatgagacctgtgctacttacggccttaatgtggagcgcgtgttccaggatgtagcccaaaaggtggtggccctacgcaaaaagcaacagttagctattggcccttgcaagtctctgcccaattccccgtcacacagcgccgtgtctgccgcttccatcccggcagtgcatatcaaccaggcaacaaatgggggaggttccgcattcagtgactattcgagctccgtcccctctacaccatccatatctcagcgggaacttcgcattgaaaccattgccgctagtagtacgcccacccccattcgtaagcagagtaagagacgctcaaacatttttacaagtagaaaaggcgctgacctggatagagaaaagaaggctgctgagtgcaaggtagatagcatcggcagcgggagagctattccaataaaacagggcatcctactgaagcgcagtggaaaaagtctgaacaaagaatggaagaaaaaatatgtaacactctgcgataatggtttgctcacctatcacccctccttacacgactatatgcaaaacatccacggtaaggagattgatcttttaaggaccacagtgaaggtgcccggtaagaggttacctcgcgcaacgcccgctacagctccaggcacaagtcccagagctaacggattgtccgtcgaaagatccaacactcagttgggcggaggtacgggagcaccgcacagcgcttcaagtgctagcctgcactccgagcgcccactgtccagtagcgcctgggctgggccacggccagagggccttcaccagaggtcttgctctgtgtcctctgcagatcagtggtcagaggcaacgacctccttgccccctggcatgcaacatcccgcatccggacccgctgaggtcctaagctcctctccaaagcttgacccccctccatctcctcatagcaatagaaagaaacataggcgcaagaagtcaacagggactcctcgacccgatggaccctccagtgcaacagaagaggcggaagagtctttcgaattcgtggtagtgtccctgaccggtcagacgtggcactttgaggcttcgacagccgaagaaagggagctgtgggtccagtccgtgcaagcccaaattctggcctcattgcagggttgtcgcagcgcaaaagataagaccaggctagggaatcagaacgccgctctggcggtgcaggctgtgcgtaccgttcggggaaactctttttgtatcgactgtgacgcaccaaaccccgattgggcttctctgaacctgggagctcttatgtgtattgagtgcagcggaattcaccgccacttgggcgctcatttgagcagggtgcggtctctggacttggacgactggcctcctgagctgcttgcagtgatgactgcaatgggaaacgctctggccaacagtgtttgggagggtgcactagggggttactcaaagcccggaccggatgcctgccgcgaggagaaagagcgatggatccgcgcaaaatacgaacagaagttatttctggctcccctccccagttcggacgtgcctttagggcagcagctgttgcgtgcagtggttgaggacgacttgagactgttggtgatgttgcttgcgcacggtagcaaagaggaggtgaacgagacttacggagacggcgatggccgaactgctctacatttgtcatcagctatggcaaacgtggtgttcactcagctgctgatttggtacggagtggacgtgcgcagccgggatgccaggggcctaacgcccctggcatacgccaggcgcgctggcagccaggaatgcgccgatatcctgatccaacacggctgtcctggcgaggggtgcggactcgcccctacacccaatcgagagccggcaaacggaactaatccttccgccgaactgcaccgcagtccctccttgttgtag

SEQ ID NO: 222383 - protein, 301 aa, Artificial Sequence
  derived and/or modified sequence
MKSGPGIQAAIDLTAGAAGGTACVLTGQPFDTIKVKMQTFPDLYKGLTDCFLKTYAQVGLRGFYKGTGPALMAYVAENSVLFMCYGFCQQFVRKVAGMDKQAKLSDLQTAAAGSFASAFAALALCPTELVKCRLQTMYEMEMSGKIAKSHNTIWSVVKGILKKDGPLGFYHGLSSTLLQEVPGYFFFFGGYELSRSFFASGRSKDELGPVHLMLSGGVAGICLWLVVFPVDCIKSRIQVLSMYGKQAGFIGTLLSVVRNEGIVALYSGLKATMIRAIPANGALFVAYEYSRKMMMKQLEAY

SEQ ID NO: 222384 - DNA, 906 bp, Artificial Sequence
  derived and/or modified sequence
atgaaatccgggcccggcatccaggccgcaatcgatctaactgctggcgcagctggaggaaccgcatgcgttctgacaggtcagcccttcgatacaatcaaggtaaaaatgcagacgtttcctgacctgtacaagggactgaccgactgtttccttaagacatacgctcaggtcgggctgagaggcttctacaagggcacagggccagcactaatggcctacgtcgccgagaactcagttctgtttatgtgctacggcttctgtcagcagtttgtacggaaagtggctggaatggataaacaagccaaattaagcgacttacagacagccgcagctgggtcatttgccagcgcatttgctgctctggccctgtgtccgacagagctcgttaagtgtcggctgcaaactatgtatgagatggaaatgagtggcaaaatcgctaagagccataacactatttggtccgtggtgaaggggatactgaaaaaggatggcccgctggggttctaccatggcctgtccagtacccttctgcaagaggtccccgggtacttcttttttttcggcggctacgaactgagcagaagtttcttcgcctccggccgcagcaaggacgaactgggcccagttcacctgatgctgtccggaggcgtggcagggatttgtctttggctggtggtgtttcccgttgactgcatcaagtccagaatccaggtcctgtctatgtacgggaagcaagctggattcataggcaccctcctctccgtagtgaggaacgagggcatcgtggccctctactctggcctgaaagccacaatgattcgcgctattccagcaaatggagctctgttcgtggcctatgagtacagccgcaagatgatgatgaagcagttggaagcctactag

SEQ ID NO: 222385 - DNA, 906 bp, Artificial Sequence
  derived and/or modified sequence
atgaagagcggccctggcatccaggccgccatcgacctgacagctggagctgctgggggcacagcctgtgtgctgaccggccagccctttgacaccatcaaggtgaagatgcagaccttcccagacctgtacaagggcctgacagactgcttcctgaagacctacgcccaggtgggcctgcggggcttctacaagggcactggacctgccctgatggcctacgtggctgaaaattctgtgctcttcatgtgctacggcttctgccagcagtttgtgaggaaggtggccggcatggacaagcaggccaagctgagtgacctgcagacagctgctgctggcagctttgccagcgcctttgctgccctggccctgtgccccacagagctggtgaagtgccgcctgcagaccatgtatgagatggagatgtctgggaagatcgccaagagccacaacaccatctggagcgtggtgaagggcatcctgaagaaggatggccccctgggcttctaccacggcctgagcagcaccctgctgcaggaggtgcccggctacttcttcttcttcggcggctatgagctgagccgctccttctttgccagcggccgcagcaaggatgagctgggccctgtgcacctgatgctgtctggaggagtggccggcatctgcctgtggctggtggtgtttcctgtggactgcatcaagagccgcatccaggtgctgtccatgtatggcaagcaggccggcttcatcggcaccctgctgtctgtggtgagaaatgaaggcatcgtggccctgtacagcggcctgaaggccaccatgatccgggccatcccagccaacggggccctgtttgtggcctatgagtacagcaggaagatgatgatgaagcagctggaggcctactag

SEQ ID NO: 222386 - DNA, 906 bp, Artificial Sequence
  derived and/or modified sequence
atgaagagcggccccggcatccaggccgccatcgacctgaccgccggagcggcgggtggtaccgcctgtgtcttaacaggccaaccatttgacactatcaaagtgaagatgcaaaccttcccggatctgtacaagggactgacagattgttttctgaagacctacgcgcaggtggggctaagaggcttttataaaggcaccgggccagctctgatggcctacgtggctgaaaactctgtgctattcatgtgttacggtttctgtcagcagtttgtacgcaaggttgccgggatggacaagcaagccaagttatctgatttgcagaccgccgcagccggcagttttgcttccgcttttgccgcgctggcgctgtgccccacagagctcgtaaaatgtcgtctacagacaatgtacgagatggagatgtcaggaaagattgctaagtcccacaacaccatttggtctgtggtgaaaggaattctgaaaaaggatggccctttgggattttaccacggactgtcatccaccctcttacaggaagtacccgggtacttcttctttttcggaggatacgaactctcccggagctttttcgcttcaggaagatctaaagacgagctgggccctgtgcatctcatgttatccggcggcgtggctgggatctgtctgtggctggtcgttttcccggtggactgcattaagtccaggattcaagtgttgagcatgtatggaaagcaggcaggcttcattgggactcttttgtccgtcgtaagaaacgaggggatcgtagctctgtactctggtctaaaagccaccatgattagggcgatccccgctaacggtgcacttttcgtggcatatgaatacagccggaagatgatgatgaaacagctggaagcttattag

SEQ ID NO: 222387 - DNA, 906 bp, Artificial Sequence
  derived and/or modified sequence
atgaagtccgggcctggaatccaggccgcaattgatctgactgccggagctgccggtggcaccgcctgcgtgttgacagggcagccatttgatactattaaggtcaaaatgcaaacattccctgatttgtacaagggactcacggactgtttcctcaagacttacgctcaggtgggcctacggggtttctacaagggtacaggcccagcgctaatggcttatgtggccgagaatagtgtactgttcatgtgctatggcttttgccagcagttcgtaaggaaagtggctggcatggacaaacaggcgaaactgagtgatctccagacggcggcagccggtagcttcgcttccgcttttgccgcactcgcattgtgccccaccgaacttgtcaagtgccgactacagaccatgtatgaaatggaaatgtccggcaagatcgccaaaagccataacacaatttggagcgttgtgaagggcattctcaaaaaagacggtccattgggcttctatcatggcttgagctctacactgctgcaggaagtgcctggttactttttcttctttgggggatatgagcttagtcgctccttctttgcctcggggcgaagcaaggacgaactcggcccagtccacctgatgctgtccggtggagtagcgggtatttgcctttggcttgtggtgtttcccgtcgactgtattaaaagtaggatccaggtactgtccatgtatggcaagcaggctgggtttattggcaccttactgtcagtagtccgtaatgaaggaatcgtggccttgtacagtgggttaaaagcaacaatgattcgggcaatacccgcaaatggcgctttgttcgtggcctatgaatacagtcgaaaaatgatgatgaagcagcttgaagcctactag

SEQ ID NO: 222388 - DNA, 1417 bp, Artificial Sequence
  derived and/or modified sequence
cggagcgtagggttgagcggcttcccccgcactggggtgagagcccagaacaggcggtagagccaccccaccacccccaactccattccccgcgctcgctgcggctggacgtgaaaagccggtctcacgctctggggagttagtcgccttccactgggaccctcagacgagtgagcgaacatgaagtccggtcctggcatccaagccgccatcgacctcacagcgggggccgcaggggggacagcgtgtgtactgactgggcagcccttcgacacaataaaagtgaagatgcagacgttccctgacctgtacaagggcctcaccgactgcttcctgaagacatacgcccaagtgggtctccggggcttctacaagggcaccggcccggcacttatggcctacgtcgccgaaaactcggtcctcttcatgtgctacgggttctgccagcagtttgtcaggaaagtggctggaatggacaagcaggcaaagctgagtgatctccagactgcagccgcggggtccttcgcctctgcatttgctgcactggctctctgccccactgagcttgtgaagtgccggctacagaccatgtatgaaatggagatgtcagggaagatagcaaaaagccataatacaatttggtctgtcgtgaagggtatccttaaaaaggatggccccttgggcttctaccatggactctcgagtactctacttcaagaagtaccgggttatttctttttctttggtggctatgaactgagccgatcgttttttgcgtcagggagatcaaaagatgaactaggccctgtccatttgatgttaagtggtggagttgctggaatttgcctgtggcttgtcgtgttcccagtggattgtattaaatccagaattcaagttctttccatgtatgggaaacaggcaggatttattggtaccctcttaagtgttgtgagaaatgaaggaatagtagccttatattctggactgaaagctactatgattcgagcaatccctgccaatggggcactgtttgtggcctacgaatacagcaggaagatgatgatgaaacagttggaagcatactgaagtgtcttggtgaacctggatccgagtccatgagtttgaggactacagttcatcacagggttcagcagagtacaagaccactgtctaattttgacttcatgggaattttggttttatcttcccttcttctaccctaaatcttaactttatggaagggcctctattttacatcatataatttctgcccataattgtattgaaataggaaagttgctgctcttgcacttgctggaatgtacagggtgggctggttggccctatgtacctaatctgaaaaactaaatatcgttctgtcagggcctttgcataaagccatttgtgtgtacatgca

SEQ ID NO: 222389 - DNA, 906 bp, Artificial Sequence
  derived and/or modified sequence
atgaagagcggccccggcatccaggccgccatcgacctgaccgccggcgccgccggcggcaccgcctgcgtgctgaccggccagcccttcgacaccatcaaggtgaagatgcagaccttccccgacctgtacaagggcctgaccgactgcttcctgaagacctacgcccaggtgggcctgagaggcttctacaagggcaccggccccgccctgatggcctacgtggccgagaacagcgtgctgttcatgtgctacggcttctgccagcagttcgtgagaaaggtggccggcatggacaagcaggccaagctgagcgacctgcagaccgccgccgccggcagcttcgccagcgccttcgccgccctggccctgtgccccaccgagctggtgaagtgcagactgcagaccatgtacgagatggagatgagcggcaagatcgccaagagccacaacaccatctggagcgtggtgaagggcatcctgaagaaggacggccccctgggcttctaccacggcctgagcagcaccctgctgcaggaggtgcccggctacttcttcttcttcggcggctacgagctgagcagaagcttcttcgccagcggcagaagcaaggacgagctgggccccgtgcacctgatgctgagcggcggcgtggccggcatctgcctgtggctggtggtgttccccgtggactgcatcaagagcagaatccaggtgctgagcatgtacggcaagcaggccggcttcatcggcaccctgctgagcgtggtgagaaacgagggcatcgtggccctgtacagcggcctgaaggccaccatgatcagagccatccccgccaacggcgccctgttcgtggcctacgagtacagcagaaagatgatgatgaagcagctggaggcctactag

SEQ ID NO: 222390 - protein, 290 aa, Artificial Sequence
  derived and/or modified sequence
MRRPAAVPLLLLLCFGSQRAKAATACGRPRMLNRMVGGQDTQEGEWPWQVSIQRNGSHFCGGSLIAEQWVLTAAHCFRNTSETSLYQVLLGARQLVQPGPHAMYARVRQVESNPLYQGTASSADVALVELEAPVPFTNYILPVCLPDPSVIFETGMNCWVTGWGSPSEEDLLPEPRILQKLAVPIIDTPKCNLLYSKDTEFGYQPKTIKNDMLCAGFEEGKKDACKGDSGGPLVCLVGQSWLQAGVISWGEGCARQNRPGVYIRVTAHHNWIHRIIPKLQFQPARLGGQK

SEQ ID NO: 222391 - protein, 254 aa, Artificial Sequence
  derived and/or modified sequence
MTLEDIVQREVWGTVVARGAPAPPGPVPTRGAASRRLSVSPASTSETSLYQVLLGARQLVQPGPHAMYARVRQVESNPLYQGTASSADVALVELEAPVPFTNYILPVCLPDPSVIFETGMNCWVTGWGSPSEEDLLPEPRILQKLAVPIIDTPKCNLLYSKDTEFGYQPKTIKNDMLCAGFEEGKKDACKGDSGGPLVCLVGQSWLQAGVISWGEGCARQNRPGVYIRVTAHHNWIHRIIPKLQFQPARLGGQK

SEQ ID NO: 222392 - DNA, 765 bp, Artificial Sequence
  derived and/or modified sequence
atgaccctggaggacatcgtgcagcgggaggtgtggggcaccgtggtggcgcgtggagcccccgcaccccctggtccggtgcctactcgcggggcggcttcaagaagactgtccgtgtcccccgcttctacctcagagacgtccctctaccaggtccttttaggggcaaggcaattagtgcagccaggccctcacgcaatgtacgcaagagtgagacaggtagagagtaacccgctgtatcagggtactgcctcttctgcggatgtggctttggtcgagcttgaggcgcccgtacccttcactaactatatattaccggtctgtctacctgacccatctgttatttttgaaaccgggatgaactgctgggtgacaggctggggtagcccgtcagaggaggacctccttcccgaaccccgaatcctgcagaaacttgccgtcccgatcatcgacacgccaaaatgcaacttattatattcgaaggacaccgaattcgggtatcagcccaaaacaatcaagaacgacatgctgtgtgcaggctttgaagaaggaaagaaagatgcgtgtaagggtgatagtggggggccgctggtgtgccttgtgggacagtcctggctgcaggcaggggtgatcagctggggggaaggctgcgcccgacagaacaggccgggcgtgtatatccgcgtcacagcccaccacaattggatacatagaatcattcctaaactgcaatttcaacctgcccgtctgggtggccaaaaatag

SEQ ID NO: 222393 - DNA, 873 bp, Artificial Sequence
  derived and/or modified sequence
atgcggcgtccggcagcagtgcctctattgctgttgttatgtttcggatcacagcgggctaaggcagccacagcatgtgggaggccacggatgctgaatcggatggtcggcggacaggatacccaagaaggtgaatggccttggcaggtctcgattcagcgcaacggctcccacttttgcggcggttcactaatcgcggagcaatgggtcttaacagccgctcactgcttcagaaatacctctgaaacaagtttataccaagtgctcttgggagcgcgtcagctcgtgcagcccggacctcacgctatgtatgcccgagtgaggcaggtggagtctaaccctctgtatcaaggcaccgccagttccgcggacgtcgctctggtggagctcgaggccccagtcccatttaccaactatattctgcccgtgtgcttgccggacccaagcgtcattttcgagacaggcatgaactgctgggttacagggtgggggagcccttctgaagaggacttactccctgaaccacggatcttgcagaagctggccgtcccgataatcgataccccaaagtgcaatctcctgtattccaaagatacggagttcggatatcaacccaagaccattaaaaacgacatgctgtgcgccggattcgaggagggcaagaaagatgcttgcaagggggatagcggcggacctctggtgtgtttggttggtcaatcctggttacaggcaggcgtcatctcatggggcgaaggttgtgcccgtcaaaaccgccctggagtatatatcagagttacagctcatcataactggattcatcgcatcatccccaagttgcaatttcaacctgccaggcttgggggtcaaaaatag

SEQ ID NO: 222394 - DNA, 765 bp, Artificial Sequence
  derived and/or modified sequence
atgacattagaggatatcgtacaacgcgaggtctgggggaccgtagtcgccaggggcgctcccgctccgccaggtcccgtgccaacacgtggggctgcctctcgcagattaagcgtaagtccagcctcgaccagtgagacttctctgtaccaggttctgctcggagccagacagctggttcagccgggtccccatgccatgtatgcccgagtgcgccaggtcgagtccaatcccctctatcagggcacagcaagctcagctgacgtagcactagtcgaactcgaggcacccgtgcctttcactaattacatcctgccggtatgcctccccgacccgagcgtgatttttgaaacaggcatgaactgctgggttacaggatggggcagcccgtcagaagaggaccttctccctgagccccgaattctacagaaactcgcagtgccaatcattgacactccaaaatgcaatctactgtacagtaaagatacggagttcgggtatcaaccgaaaactatcaagaatgatatgctttgtgcagggtttgaggagggaaaaaaggatgcttgcaagggtgactccggcggtcctttggtttgtctggttgggcagagctggctccaagcgggagtgatcagttggggtgaaggttgcgccaggcagaatcgtcctggcgtttacattcgtgtcacggcccaccacaattggattcatagaatcattcccaagttgcaatttcagccggctaggctgggaggccagaaatag

SEQ ID NO: 222395 - DNA, 873 bp, Artificial Sequence
  derived and/or modified sequence
atgaggagacctgcagccgtgccactgctgctcttactatgtttcggatctcagcgggctaaagcagcaacagcttgtggccgtcctcgtatgctgaataggatggtgggtggtcaggacactcaagagggagaatggccttggcaggtctcaatacaacggaacgggtcccatttttgtggtggctccttgatcgccgaacagtgggttctaaccgccgcccactgctttaggaacacctccgagacatctctctaccaggttcttctgggagcaagacagcttgttcagcctggacctcacgccatgtacgcgcgggtacggcaggtagaatcaaatcccttatatcaagggacggctagttccgctgacgtcgcactcgtcgagctcgaggcacctgttcccttcaccaattacattctccccgtctgcctccccgatccttccgtaatcttcgagacaggcatgaattgctgggttaccggctggggatctccctcggaagaggatttgctccccgaaccccggatcctccagaagctggccgtacccataatcgatacccccaagtgcaacctgctttattcgaaggataccgaatttggctatcagcctaagacgattaaaaacgatatgctttgtgcaggttttgaggagggaaaaaaggatgcttgcaaaggtgactcgggaggaccattagtgtgcttagttggacaaagttggctccaggcaggagtgataagttggggagagggctgcgccaggcagaacagaccgggagtctacattcgcgtaacagcccatcacaactggatccatcgcatcatcccgaagctccagttccaaccagccagattagggggacaaaaatag

SEQ ID NO: 222396 - DNA, 765 bp, Artificial Sequence
  derived and/or modified sequence
atgaccttggaagacatagtgcaacgcgaggtttggggcaccgtcgtagcccggggcgcccccgctcctccagggcctgtaccaactaggggcgccgcaagccgcagactctctgtgtcccctgcctccacatctgaaacatcactttatcaggtgctgctgggagccagacagctggtgcagcccggccctcatgcaatgtacgcacgagtgagacaagttgaaagtaatccactctatcagggtaccgcctcaagtgccgacgtcgctctggtggaactggaagcgcccgtaccatttaccaattatatccttccagtgtgtctccccgacccatccgttattttcgagacagggatgaattgttgggtgacaggatggggctccccaagtgaagaggatctgctgcccgagcccaggatccttcaaaaactcgccgttccaattattgacacgccaaagtgcaatctcctctattccaaggacactgagttcgggtatcagccgaagaccatcaagaatgatatgctgtgtgcaggctttgaagaaggtaagaaggacgcttgtaagggagattctggcggccccttggtgtgtcttgtcggccagtcctggctgcaggctggggtcatttcttggggggaggggtgcgctaggcagaatcggccaggcgtatatatcagggtgaccgcacatcataactggattcatcgtattatccccaaactgcagtttcagccagctcgactggggggccagaaatag

SEQ ID NO: 222397 - DNA, 873 bp, Artificial Sequence
  derived and/or modified sequence
atgcgtaggccagccgccgtgcccctcctactcctgttatgttttggatcacaacgcgctaaagcggcaaccgcttgtgggcgcccccggatgctcaacaggatggtaggcggccaagatacccaggaaggtgagtggccatggcaagtaagcattcaaaggaatggctcacacttctgtggaggcagtctcattgccgagcagtgggtcctgacagctgcacactgcttccggaatacatcagaaacctctctttatcaggtgttgcttggcgctcgtcaactagttcagccgggcccccatgcgatgtatgccagagttagacaggtggaaagcaatccactgtaccagggtaccgcttcatcagcagacgtggcccttgtcgagttagaggctcccgttccattcacaaattacatcctgcccgtgtgtctacctgatccttccgtgattttcgaaaccggtatgaattgttgggtgacaggatggggtagcccctctgaagaagacttgctgccagaaccccggatcttacagaagctggctgtgcccataattgacacccccaagtgcaaccttctgtactctaaggataccgagtttggctatcagcctaagacgattaaaaacgatatgctttgtgcaggttttgaggagggaaaaaaggatgcttgcaaaggtgactcgggaggaccattagtgtgcttagttggacaaagttggctccaggcaggagtgataagttggggagagggctgcgccaggcagaacagaccgggagtctacattcgcgtaacagcccatcacaactggatccatcgcatcatcccgaagctccagttccaaccagccagattagggggacaaaaatag

SEQ ID NO: 222398 - DNA, 765 bp, Artificial Sequence
  derived and/or modified sequence
atgacactagaagacatcgtgcagagggaagtgtggggtacggttgtcgctcgcggagcccctgcccccccaggtcctgtgccaacaagaggagctgccagtcggcggctgagcgtgtccccagcgtctacttcagagaccagtctgtaccaggtgctcttgggcgctcgtcagttagtgcagcccggtcctcacgccatgtatgcaagagtgcgacaggtagagtctaacccactttatcaagggacagctagtagtgcagatgttgccctggtagagctggaggcccccgtcccgtttaccaattatatcctgcccgtgtgcctgccagacccaagtgttattttcgagacaggtatgaactgttgggtgacaggctggggttcaccaagtgaggaagacctgcttcccgagcctcgtatacttcaaaagttagccgtgcctattatagataccccaaaatgcaacctattgtatagcaaagacactgaatttggttatcagcccaagacaattaaaaacgacatgctatgtgcaggtttcgaggaggggaaaaaggatgcgtgtaagggcgattcaggcggtccactcgtctgtttggtcgggcaatcttggctgcaagccggggttatttcgtggggagaaggctgtgcacggcaaaatcgccccggtgtatatatccgcgtgacagcccaccataattggattcatcgcatcattcctaaattgcagtttcaacctgccagactaggtggacagaaatag

SEQ ID NO: 222399 - DNA, 2067 bp, Artificial Sequence
  derived and/or modified sequence
taggtccaactccagggctaacttccagttgcaaccgctgctcccgcccgcgggaggtgcctcgcaccgccccccgaccccctccatcccctccacccactcacccactccctgtgggtccctgcagaagcggcccggcaggctctgcccaccggcccctcctggcctttccccatcccgcacacacctcagctccaggacactcttcccgggaggaactctgctcacaaagcccaaggaccagacagaacggcccttcctcccctcacccacctgaaccaccccagaaagccctgagcagaggccaggccacccagccctctgccatgtatgaaccacctggtcccacaccttccgggtgtcccaggccccctcacctcacacctcaacaccgcagctctaattattttaaaccccacatctttttcttttttttcttcttgatctttaaaagaatatcatgacaaaaaaaaccccacatcttaaattcagatactcacggccaggcacggtggctcacacccgtaatcccagcactttgggaggccaaggcgggcagatcagttgagcccaggagttcaagaccagcccgggcaacacagcaagaccctgtctctactaaaaataaaaaaaaattaaaaaacaaaaaacaaacaaacaaaaaaaccccaggtgcagtggtgcctgtggtcccaagtactcaggaagctgaggcgagaggatggcttgagcccaggagttggaggctgcagtgagctacagttgcactgctgcactccagcctgggtgacagaatgagaactctgtctctaggggaaaaaaaaaatcggaaactcgggctgagagagggcaggtcacctgccagaggcccgcaggtggggctggccctgctgcacctggagggtggttctctccgagccagcctttcaggtaggcactgtgactgtccccacagcacaggtgagaaagctgcatcacagagaacttgttaagtgacttgcccaaggccacacagcggccaggggtggaggtggaaatctgagtcgggcggtctggcttcaatgtcaacacgcatcaccgctgcacctggctgtcctagagatgactctcgaagacattgtgcagagagaggtgtggggcacggtggtggccagaggagccccagcccctcccgggcctgtccccacacgaggggccgcctcacgccgcctctctgtttctcccgccagcacctctgagacgtccctgtaccaggtcctgctgggggcaaggcagctagtgcagccgggaccacacgctatgtatgcccgggtgaggcaggtggagagcaaccccctgtaccagggcacggcctccagcgctgacgtggccctggtggagctggaggcaccagtgcccttcaccaattacatcctccccgtgtgcctgcctgacccctcggtgatctttgagacgggcatgaactgctgggtcactggctggggcagccccagtgaggaagacctcctgcccgaaccgcggatcctgcagaaactcgctgtgcccatcatcgacacacccaagtgcaacctgctctacagcaaagacaccgagtttggctaccaacccaaaaccatcaagaatgacatgctgtgcgccggcttcgaggagggcaagaaggatgcctgcaagggcgactcgggcggccccctggtgtgcctcgtgggtcagtcgtggctgcaggcgggggtgatcagctggggtgagggctgtgcccgccagaaccgcccaggtgtctacatccgtgtcaccgcccaccacaactggatccatcggatcatccccaaactgcagttccagccagcgaggttgggcggccagaagtgagacccccggggccaggagccccttgagcagagctctgcacccagcctgcccgcccacaccatcctgctggtcctcccagcgctgctgttgcacctgtgagccccaccagactcatttgtaaatagcgctccttcctcccctctcaaatacccttattttatttatgtttctcccaataaaaacccagcctgtgtgccagct

SEQ ID NO: 222400 - DNA, 873 bp, Artificial Sequence
  derived and/or modified sequence
atgagaagacccgccgccgtgcccctgctgctgctgctgtgcttcggcagccagagagccaaggccgccaccgcctgcggcagacccagaatgctgaacagaatggtgggcggccaggacacccaggagggcgagtggccctggcaggtgagcatccagagaaacggcagccacttctgcggcggcagcctgatcgccgagcagtgggtgctgaccgccgcccactgcttcagaaacaccagcgagaccagcctgtaccaggtgctgctgggcgccagacagctggtgcagcccggcccccacgccatgtacgccagagtgagacaggtggagagcaaccccctgtaccagggcaccgccagcagcgccgacgtggccctggtggagctggaggcccccgtgcccttcaccaactacatcctgcccgtgtgcctgcccgaccccagcgtgatcttcgagaccggcatgaactgctgggtgaccggctggggcagccccagcgaggaggacctgctgcccgagcccagaatcctgcagaagctggccgtgcccatcatcgacacccccaagtgcaacctgctgtacagcaaggacaccgagttcggctaccagcccaagaccatcaagaacgacatgctgtgcgccggcttcgaggagggcaagaaggacgcctgcaagggcgacagcggcggccccctggtgtgcctggtgggccagagctggctgcaggccggcgtgatcagctggggcgagggctgcgccagacagaacagacccggcgtgtacatcagagtgaccgcccaccacaactggatccacagaatcatccccaagctgcagttccagcccgccagactgggcggccagaagtag

SEQ ID NO: 222401 - DNA, 1130 bp, Artificial Sequence
  derived and/or modified sequence
ccaacgcttctgccaccgccgaccacggccctgcgccccagccaggcctgaggacatgaggcggccggcggcggtgccgctcctgctgctgctgtgttttgggtctcagagggccaaggcagcaacagcctgtggtcgccccaggatgctgaaccgaatggtgggcgggcaggacacgcaggagggcgagtggccctggcaagtcagcatccagcgcaacggaagccacttctgcgggggcagcctcatcgcggagcagtgggtcctgacggctgcgcactgcttccgcaacacctctgagacgtccctgtaccaggtcctgctgggggcaaggcagctagtgcagccgggaccacacgctatgtatgcccgggtgaggcaggtggagagcaaccccctgtaccagggcacggcctccagcgctgacgtggccctggtggagctggaggcaccagtgcccttcaccaattacatcctccccgtgtgcctgcctgacccctcggtgatctttgagacgggcatgaactgctgggtcactggctggggcagccccagtgaggaagacctcctgcccgaaccgcggatcctgcagaaactcgctgtgcccatcatcgacacacccaagtgcaacctgctctacagcaaagacaccgagtttggctaccaacccaaaaccatcaagaatgacatgctgtgcgccggcttcgaggagggcaagaaggatgcctgcaagggcgactcgggcggccccctggtgtgcctcgtgggtcagtcgtggctgcaggcgggggtgatcagctggggtgagggctgtgcccgccagaaccgcccaggtgtctacatccgtgtcaccgcccaccacaactggatccatcggatcatccccaaactgcagttccagccagcgaggttgggcggccagaagtgagacccccggggccaggagccccttgagcagagctctgcacccagcctgcccgcccacaccatcctgctggtcctcccagcgctgctgttgcacctgtgagccccaccagactcatttgtaaatagcgctccttcctcccctctcaaatacccttattttatttatgtttctcccaataaaaacccagcctgtgtgccagctg

SEQ ID NO: 222402 - DNA, 765 bp, Artificial Sequence
  derived and/or modified sequence
atgaccctggaggacatcgtgcagagagaggtgtggggcaccgtggtggccagaggcgcccccgccccccccggccccgtgcccaccagaggcgccgccagcagaagactgagcgtgagccccgccagcaccagcgagaccagcctgtaccaggtgctgctgggcgccagacagctggtgcagcccggcccccacgccatgtacgccagagtgagacaggtggagagcaaccccctgtaccagggcaccgccagcagcgccgacgtggccctggtggagctggaggcccccgtgcccttcaccaactacatcctgcccgtgtgcctgcccgaccccagcgtgatcttcgagaccggcatgaactgctgggtgaccggctggggcagccccagcgaggaggacctgctgcccgagcccagaatcctgcagaagctggccgtgcccatcatcgacacccccaagtgcaacctgctgtacagcaaggacaccgagttcggctaccagcccaagaccatcaagaacgacatgctgtgcgccggcttcgaggagggcaagaaggacgcctgcaagggcgacagcggcggccccctggtgtgcctggtgggccagagctggctgcaggccggcgtgatcagctggggcgagggctgcgccagacagaacagacccggcgtgtacatcagagtgaccgcccaccacaactggatccacagaatcatccccaagctgcagttccagcccgccagactgggcggccagaagtag

SEQ ID NO: 222403 - DNA, 873 bp, Artificial Sequence
  derived and/or modified sequence
atgcggcgccccgccgctgtgcctctcctgctgctgctgtgctttggctctcagcgcgcaaaggctgccacagcatgcggccggcccagaatgctgaaccgcatggtgggcggccaagacacccaggagggcgagtggccctggcaggtgagcatccagcgcaacggctcccacttttgtgggggctcgttgatcgctgagcagtgggttctgaccgcagcccactgctttcggaataccagcgaaacttctttatatcaagtgctgctgggcgcacgacagcttgtgcagcccggtccccacgccatgtacgctcgcgtcagacaggtcgaatcgaatcctctgtatcaggggactgctagtagcgctgatgtggccttggtggagctggaagcccctgttccctttacgaattatattctgccggtatgtctaccagatcccagtgtgatcttcgagactggcatgaattgctgggttaccgggtggggctcacctagcgaggaggacctgttgcctgaaccgcgtatactgcagaagctcgcagtgcccattatcgataccccaaaatgtaatctgctttacagtaaggacaccgaatttggttaccaacccaagactataaagaacgatatgctgtgcgccgggtttgaggagggcaagaaggatgcttgtaagggtgactctggagggcccctggtgtgcctcgtgggacagtcttggctgcaggccggcgtgataagttggggcgagggatgcgcgcggcagaataggccgggcgtgtatatacgggtgacagctcatcacaactggattcatcggataattccaaagctgcagttccagcccgccaggctggggggtcagaaatag

SEQ ID NO: 222404 - DNA, 765 bp, Artificial Sequence
  derived and/or modified sequence
atgacgctagaagacattgtgcagagggaagtgtggggaaccgttgttgcccggggggctcccgcaccaccagggcccgtcccgactcgtggagctgcctcccggagattgtcagtgtcaccagcctccacctcagagacaagcctgtatcaggttctcctgggcgcacgacagcttgttcagcctgggccccacgccatgtatgccagagtacggcaggtggaatctaaccccctttaccagggcaccgcatcgtccgcagacgtggcgctcgtggaactagaggctcctgtcccgtttacaaactatattctgccggtgtgtctgcccgatcctagcgtaatctttgagacgggtatgaattgttgggtgactgggtggggcagcccttccgaagaggacctcctgcccgaacccagaatactgcagaaacttgcggtacccattatcgatacacctaagtgcaatctcctctactctaaagatacagagttcggctaccaacctaagactatcaaaaatgatatgctgtgtgccgggttcgaggagggaaagaaagacgcctgcaagggagatagcgggggtccacttgtgtgcctggttggacagtcctggctgcaggccggagttatctcctggggagagggatgtgcccgacagaacaggcctggagtttacattcgggtgaccgcccaccacaactggatacaccgcatcataccaaaactccagtttcagcccgcccgactgggcgggcagaagtag

SEQ ID NO: 222405 - DNA, 873 bp, Artificial Sequence
  derived and/or modified sequence
atgaggaggcctgctgctgtgcccctgctgctgctgctgtgcttcggcagccagagggccaaggccgccacagcctgtggccggcccaggatgctgaacaggatggtgggcggccaggacacccaggagggggagtggccctggcaggtgtccatccagagaaatggcagccacttctgtggcggcagcctgattgctgagcagtgggtgctgacagctgcccactgcttcaggaacaccagcgagaccagcctgtaccaggtgctgctgggcgcccggcagctggtgcagcccggcccccacgccatgtatgcccgggtgcggcaggtggagagcaaccccctgtaccagggcacagccagcagcgcagatgtggccctggtggagctggaggcccctgtgcccttcaccaactacatcctgcctgtgtgcctgcctgaccccagcgtcatctttgagaccggcatgaactgctgggtgacaggctggggcagccccagcgaggaggacctgctgcctgagccccgcatcctgcagaagctggccgtgcccatcatcgacacccccaagtgcaacctgctgtacagcaaggacacagaatttggctaccagcccaagaccatcaagaatgacatgctgtgtgccggctttgaggagggcaagaaggatgcctgcaagggggacagcggcggccccctggtgtgcctggtgggccagagctggctgcaggccggggtcatctcctggggcgagggctgtgcccggcagaacagacctggggtgtacatccgggtgacagcccaccacaactggatccaccgcatcatccccaagctgcagttccagcctgcccggctgggcggccagaagtag

SEQ ID NO: 222406 - DNA, 765 bp, Artificial Sequence
  derived and/or modified sequence
atgaccctggaggacatcgtgcagcgggaggtgtggggcaccgtggtggcccggggggccccagcccctcctggccctgtgcccaccaggggggccgccagccggcggctgtctgtgtccccagccagcaccagcgagaccagcctgtaccaggtgctgctgggcgcccggcagctggtgcagcccggcccccacgccatgtatgcccgggtgcggcaggtggagagcaaccccctgtaccagggcacagccagcagcgcagatgtggccctggtggagctggaggcccctgtgcccttcaccaactacatcctgcctgtgtgcctgcctgaccccagcgtcatctttgagaccggcatgaactgctgggtgacaggctggggcagccccagcgaggaggacctgctgcctgagccccgcatcctgcagaagctggccgtgcccatcatcgacacccccaagtgcaacctgctgtacagcaaggacacagaatttggctaccagcccaagaccatcaagaatgacatgctgtgtgccggctttgaggagggcaagaaggatgcctgcaagggggacagcggcggccccctggtgtgcctggtgggccagagctggctgcaggccggggtcatctcctggggcgagggctgtgcccggcagaacagacctggggtgtacatccgggtgacagcccaccacaactggatccaccgcatcatccccaagctgcagttccagcctgcccggctgggcggccagaagtag

SEQ ID NO: 222407 - DNA, 873 bp, Artificial Sequence
  derived and/or modified sequence
atgcggcggcccgccgccgtgcccctgctgctgctgctgtgcttcggcagccagcgggccaaggctgctaccgcctgtggaagaccccgcatgctgaacaggatggttgggggccaggatactcaggagggtgagtggccttggcaagtctccatccaaagaaacggctctcacttctgcggaggcagccttatcgctgagcagtgggtcctgaccgcagcacactgttttaggaatacctctgagacttccctataccaggttttgctcggagcccggcagctggtgcagcctggaccccacgcaatgtatgccagggttcggcaggtggaaagtaacccactgtatcagggaaccgcctcatccgccgacgtggccctggttgagctggaagcaccagtcccattcactaactacatcctacccgtgtgcctgcccgatccctctgttattttcgagaccggcatgaactgttgggtgactggctggggcagtccgagcgaggaggatttgctgccggaacccaggattctgcagaagctggcagtccctattattgatactccaaagtgtaacttgctgtatagtaaggacaccgagttcggttaccagcctaaaacaattaaaaacgatatgttgtgtgccggctttgaagagggcaaaaaagacgcttgtaaaggcgactcgggggggccactcgtttgcctcgtgggccagtcatggctgcaggcgggcgttatatcctggggggagggctgcgcgagacagaacagaccgggggtctacattcgggtgacggcgcaccataactggattcaccggatcatcccgaagcttcagtttcagccagctagattgggcgggcagaagtag

SEQ ID NO: 222408 - RNA, 873 nt, Artificial Sequence
  derived and/or modified sequence
augaggagaccugcagccgugccacugcugcucuuacuauguuucggaucucagcgggcuaaagcagcaacagcuuguggccguccucguaugcugaauaggaugguggguggucaggacacucaagagggagaauggccuuggcaggucucaauacaacggaacgggucccauuuuugugguggcuccuugaucgccgaacaguggguucuaaccgccgcccacugcuuuaggaacaccuccgagacaucucucuaccagguucuucugggagcaagacagcuuguucagccuggaccucacgccauguacgcgcggguacggcagguagaaucaaaucccuuauaucaagggacggcuaguuccgcugacgucgcacucgucgagcucgaggcaccuguucccuucaccaauuacauucuccccgucugccuccccgauccuuccguaaucuucgagacaggcaugaauugcuggguuaccggcuggggaucucccucggaagaggauuugcuccccgaaccccggauccuccagaagcuggccguacccauaaucgauacccccaagugcaaccugcuuuauucgaaggauaccgaauuuggcuaucagccuaagacgauuaaaaacgauaugcuuugugcagguuuugaggagggaaaaaaggaugcuugcaaaggugacucgggaggaccauuagugugcuuaguuggacaaaguuggcuccaggcaggagugauaaguuggggagagggcugcgccaggcagaacagaccgggagucuacauucgcguaacagcccaucacaacuggauccaucgcaucaucccgaagcuccaguuccaaccagccagauuagggggacaaaaauag

SEQ ID NO: 222409 - RNA, 765 nt, Artificial Sequence
  derived and/or modified sequence
augaccuuggaagacauagugcaacgcgagguuuggggcaccgucguagcccggggcgcccccgcuccuccagggccuguaccaacuaggggcgccgcaagccgcagacucucuguguccccugccuccacaucugaaacaucacuuuaucaggugcugcugggagccagacagcuggugcagcccggcccucaugcaauguacgcacgagugagacaaguugaaaguaauccacucuaucaggguaccgccucaagugccgacgucgcucugguggaacuggaagcgcccguaccauuuaccaauuauauccuuccagugugucuccccgacccauccguuauuuucgagacagggaugaauuguugggugacaggauggggcuccccaagugaagaggaucugcugcccgagcccaggauccuucaaaaacucgccguuccaauuauugacacgccaaagugcaaucuccucuauuccaaggacacugaguucggguaucagccgaagaccaucaagaaugauaugcugugugcaggcuuugaagaagguaagaaggacgcuuguaagggagauucuggcggccccuuggugugucuugucggccaguccuggcugcaggcuggggucauuucuuggggggaggggugcgcuaggcagaaucggccaggcguauauaucagggugaccgcacaucauaacuggauucaucguauuauccccaaacugcaguuucagccagcucgacuggggggccagaaauag

SEQ ID NO: 222410 - RNA, 873 nt, Artificial Sequence
  derived and/or modified sequence
augcguaggccagccgccgugccccuccuacuccuguuauguuuuggaucacaacgcgcuaaagcggcaaccgcuugugggcgcccccggaugcucaacaggaugguaggcggccaagauacccaggaaggugaguggccauggcaaguaagcauucaaaggaauggcucacacuucuguggaggcagucucauugccgagcaguggguccugacagcugcacacugcuuccggaauacaucagaaaccucucuuuaucagguguugcuuggcgcucgucaacuaguucagccgggcccccaugcgauguaugccagaguuagacagguggaaagcaauccacuguaccaggguaccgcuucaucagcagacguggcccuugucgaguuagaggcucccguuccauucacaaauuacauccugcccgugugucuaccugauccuuccgugauuuucgaaaccgguaugaauuguugggugacaggaugggguagccccucugaagaagacuugcugccagaaccccggaucuuacagaagcuggcugugcccauaauugacacccccaagugcaaccuucuguacucuaaggauaccgaguuuggcuaucagccuaagacgauuaaaaacgauaugcuuugugcagguuuugaggagggaaaaaaggaugcuugcaaaggugacucgggaggaccauuagugugcuuaguuggacaaaguuggcuccaggcaggagugauaaguuggggagagggcugcgccaggcagaacagaccgggagucuacauucgcguaacagcccaucacaacuggauccaucgcaucaucccgaagcuccaguuccaaccagccagauuagggggacaaaaauag

SEQ ID NO: 222411 - RNA, 765 nt, Artificial Sequence
  derived and/or modified sequence
augacacuagaagacaucgugcagagggaagugugggguacgguugucgcucgcggagccccugcccccccagguccugugccaacaagaggagcugccagucggcggcugagcguguccccagcgucuacuucagagaccagucuguaccaggugcucuugggcgcucgucaguuagugcagcccgguccucacgccauguaugcaagagugcgacagguagagucuaacccacuuuaucaagggacagcuaguagugcagauguugcccugguagagcuggaggcccccgucccguuuaccaauuauauccugcccgugugccugccagacccaaguguuauuuucgagacagguaugaacuguugggugacaggcugggguucaccaagugaggaagaccugcuucccgagccucguauacuucaaaaguuagccgugccuauuauagauaccccaaaaugcaaccuauuguauagcaaagacacugaauuugguuaucagcccaagacaauuaaaaacgacaugcuaugugcagguuucgaggaggggaaaaaggaugcguguaagggcgauucaggcgguccacucgucuguuuggucgggcaaucuuggcugcaagccgggguuauuucguggggagaaggcugugcacggcaaaaucgccccgguguauauauccgcgugacagcccaccauaauuggauucaucgcaucauuccuaaauugcaguuucaaccugccagacuagguggacagaaauag

SEQ ID NO: 222412 - protein, 223 aa, Artificial Sequence
  derived and/or modified sequence
MKFVPCLLLVTLSCLGTLGQAPRQKQGSTGEEFHFQTGGRDSCTMRPSSLGQGAGEVWLRVDCRNTDQTYWCEYRGQPSMCQAFAADPKPYWNQALQELRRLHHACQGAPVLRPSVCREAGPQAHMQQVTSSLKGSPEPNQQPEAGTPSLRPKATVKLTEATQLGKDSMEELGKAKPTTRPTAKPTQPGPRPGGNEEAKKKAWEHCWKPFQALCAFLISFFRG

SEQ ID NO: 222413 - DNA, 672 bp, Artificial Sequence
  derived and/or modified sequence
atgaaattcgtcccctgtctgttactggtgacccttagttgtctggggaccttaggccaagcccctcgtcagaagcagggaagtacaggcgaggagttccatttccaaacaggcggacgcgattcgtgtaccatgagaccatcctcgttagggcagggcgctggggaggtgtggttgagagtcgactgccggaataccgaccaaacttactggtgcgaataccgcggacagccgtccatgtgccaggccttcgctgcagatccaaagccctattggaatcaggctctccaagagctgagacgactgcaccacgcctgccagggcgcaccagtgctccgtccgtcggtgtgcagggaagccggaccacaggcacatatgcagcaggtgacaagctccctcaaaggttctcccgagccaaatcagcaacctgaggccggtaccccatctctgaggcctaaagctaccgtcaagttgaccgaggcaacccagttaggtaaggactccatggaagagctcggtaaagctaagcccacaaccaggccaactgctaagcctacccaacctgggccacgcccaggaggcaacgaggaggccaaaaagaaggcatgggaacactgctggaagcccttccaggcattatgcgcgtttctgatctcgttcttcagaggttag

SEQ ID NO: 222414 - DNA, 672 bp, Artificial Sequence
  derived and/or modified sequence
atgaaattcgtcccttgcctcctcctagtcacactttcttgcttaggaacgttgggacaggcaccacgccagaaacagggttccacaggtgaggaattccactttcagaccggggggcgagactcttgtactatgagaccctccagtttggggcagggagcgggcgaggtgtggctgcgagtagactgtagaaacacagaccagacatattggtgtgagtaccgtggacagccctctatgtgccaggcatttgccgcggaccctaagccatattggaaccaggcgctgcaggagctgaggcgtctccaccatgcatgccaaggggccccagtgttgaggccctcagtttgtcgcgaggccgggcctcaagcccatatgcagcaagtcacaagctctctgaaagggagcccagagcctaaccagcagcctgaggccggtacgccttctcttcggccaaaagcgacggtaaaactgacagaagccacacagctgggaaaagactctatggaagaactaggcaaagcaaaaccaaccacgagacccaccgcaaagccaacacagcccggtccccgtccaggcgggaacgaagaagctaaaaagaaagcgtgggaacactgctggaagccgttccaagccctctgcgcttttctgatctccttttttaggggctag

SEQ ID NO: 222415 - DNA, 672 bp, Artificial Sequence
  derived and/or modified sequence
atgaagtttgtaccctgtctccttctagtcactctgagctgtctgggtacactggggcaggccccaagacaaaaacagggtagtacaggcgaggaatttcactttcagacaggcggtcgagactcctgcaccatgaggccttcttccctggggcagggagcaggggaagtgtggctgagagttgattgccggaacaccgaccagacatattggtgcgagtaccgcggccaacccagcatgtgccaggccttcgcagcagacccaaagccctattggaaccaggctctccaggaattacgtagattgcaccacgcatgtcagggcgcccccgtcttgaggccatccgtttgcagagaagctggccctcaggcacacatgcagcaggtaacaagctctcttaagggttcccccgaacctaaccaacagccagaagcaggtactccctccctacgacccaaggccaccgttaaattgaccgaggcaacccaactggggaaggacagtatggaagaacttggaaaggccaagccaacaacacggcccaccgctaaacctacgcagcccggccctaggcctggcggaaatgaggaggctaagaagaaggcctgggaacattgctggaaaccatttcaggccctgtgtgcatttttgatttcttttttccgtgggtag

SEQ ID NO: 222416 - DNA, 1168 bp, Artificial Sequence
  derived and/or modified sequence
cttgcagagaaagagtcttttgtgcagcaccctttaaagggtgactcgtcccacttgtgttctctctcctggtgcagagttgcaagcaagtttatcggagtatcgccatgaagttcgtcccctgcctcctgctggtgaccttgtcctgcctggggactttgggtcaggccccgaggcaaaagcaaggaagcactggggaggaattccatttccagactggagggagagattcctgcactatgcgtcccagcagcttggggcaaggtgctggagaagtctggcttcgtgtcgactgccgcaacacagaccagacctactggtgtgagtacagggggcagcccagcatgtgccaggctttcgctgctgaccccaaaccttactggaatcaagccctgcaggagctgaggcgccttcaccatgcgtgccagggggccccggtgcttaggccatccgtgtgcagggaggctggaccccaggcccatatgcagcaggtgacttccagcctcaagggcagcccagagcccaaccagcagcctgaggctgggacgccatctctgaggcccaaggccacagtgaaactcacagaagcaacacagctgggaaaggactcgatggaagagctgggaaaagccaaacccaccacccgacccacagccaaacctacccagcctggacccaggcccggagggaatgaggaagcaaagaagaaggcctgggaacattgttggaaacccttccaggccctgtgcgcctttctcatcagcttcttccgagggtgacaggtgaaagacccctacagatctgacctctccctgacagacaaccatctctttttatattatgccgctttcaatccaacgttctcacactggaagaagagagtttctaatcagatgcaacggcccaaattcttgatctgcagcttctctgaagtttggaaaagaaaccttcctttctggagtttgcagagttcagcaatatgatagggaacaggtgctgatgggcccaagagtgacaagcatacacaactacttattatctgtagaagttttgctttgttgatctgagccttctatgaaagtttaaatatgtaacgcattcatgaatttccagtgttcagtaaatagcagctatgtgtgtgcaaaataaaagaatgatttcagaaata

SEQ ID NO: 222417 - DNA, 672 bp, Artificial Sequence
  derived and/or modified sequence
atgaagttcgtgccctgcctgctgctggtgaccctgagctgcctgggcaccctgggccaggcccccagacagaagcagggcagcaccggcgaggagttccacttccagaccggcggcagagacagctgcaccatgagacccagcagcctgggccagggcgccggcgaggtgtggctgagagtggactgcagaaacaccgaccagacctactggtgcgagtacagaggccagcccagcatgtgccaggccttcgccgccgaccccaagccctactggaaccaggccctgcaggagctgagaagactgcaccacgcctgccagggcgcccccgtgctgagacccagcgtgtgcagagaggccggcccccaggcccacatgcagcaggtgaccagcagcctgaagggcagccccgagcccaaccagcagcccgaggccggcacccccagcctgagacccaaggccaccgtgaagctgaccgaggccacccagctgggcaaggacagcatggaggagctgggcaaggccaagcccaccaccagacccaccgccaagcccacccagcccggccccagacccggcggcaacgaggaggccaagaagaaggcctgggagcactgctggaagcccttccaggccctgtgcgccttcctgatcagcttcttcagaggctag

SEQ ID NO: 222418 - DNA, 672 bp, Artificial Sequence
  derived and/or modified sequence
atgaagtttgtcccatgcctgttactggtcactctgtcttgcttgggaacacttgggcaggcaccccggcagaagcagggcagtactggcgaggagttccacttccagaccggcggccgggatagttgtacaatgcggccgtcatcgctgggacagggcgccggggaggtgtggttgagggtggattgccggaacacagaccagacatattggtgcgaatatagggggcaaccctcgatgtgccaggcctttgctgctgacccaaagccttactggaatcaggccctgcaggaactccgacgtttacaccacgcatgccaaggggccccagtcctgaggccttcagtgtgtagggaggctggcccacaggcccatatgcagcaggttactagtagtctgaaaggctctccagagccaaaccagcagcccgaggccggcacccccagtctgcgcccaaaggctactgtcaagttaaccgaagcaacacagctcggtaaggatagcatggaggagctaggaaaggccaaaccaactacgcggccgaccgccaagcctacacaacccggcccccggcccggtggcaacgaggaggcgaagaagaaggcctgggaacactgttggaagccattccaggctctgtgcgcctttctcatctcttttttccgcgggtag

SEQ ID NO: 222419 - DNA, 672 bp, Artificial Sequence
  derived and/or modified sequence
atgaagtttgtgccctgcctgctgctggtgaccctgagctgcctgggcaccctgggccaggccccccggcagaagcagggcagcactggagaggagttccacttccagacaggaggccgggacagctgcaccatgaggcccagcagcctgggccagggcgctggggaggtgtggctgcgggtggactgcaggaacacagaccagacctactggtgtgagtaccggggccagcccagcatgtgccaggcctttgctgctgaccccaagccctactggaaccaggccctgcaggagctgcggcggctgcaccacgcctgccagggcgcccctgtgctgcggcccagcgtgtgccgggaggccggcccccaggcccacatgcagcaggtgaccagcagcctgaagggcagccctgagcccaaccagcagcctgaggccggcacccccagcctgcggcccaaggccaccgtgaagctgacagaggccacccagctgggcaaggacagcatggaggagctgggcaaggccaagcccaccacccggcccacagccaagcccacccagcccggccccaggcctggaggaaatgaggaggccaagaagaaggcctgggagcactgctggaagcccttccaggccctgtgtgccttcctgatctccttcttccggggctag

SEQ ID NO: 222420 - DNA, 672 bp, Artificial Sequence
  derived and/or modified sequence
atgaagttcgtgccctgcctgctgctggtgaccctgagctgcctgggaacactgggccaggctccacgtcagaaacagggctccactggcgaggaattccattttcagaccggaggacgtgactcctgtacgatgcggccatcttctctcggtcagggagcaggagaagtgtggttacgcgtggattgcagaaacacagatcaaacctactggtgtgaataccggggccaaccatccatgtgccaggcctttgccgcagaccccaaaccatactggaatcaagccctccaggagttgcgcagactgcaccatgcctgccagggagcacctgtgttaaggcccagcgtgtgccgggaggctgggcctcaggcccacatgcagcaggtaaccagcagtctcaaaggttctcctgagcccaatcagcagccggaggcaggcaccccctcccttcgtcctaaagcaactgtaaaactgactgaggcaacgcagctgggtaaagacagtatggaggaactagggaaggcaaagccaacaacccggcccaccgcaaagccaacacagccaggccccagacccggtgggaacgaagaggctaaaaagaaggcttgggagcactgttggaagccattccaggcattgtgcgcctttctgattagttttttccgcgggtag

SEQ ID NO: 222421 - RNA, 672 nt, Artificial Sequence
  derived and/or modified sequence
augaaauucgucccuugccuccuccuagucacacuuucuugcuuaggaacguugggacaggcaccacgccagaaacaggguuccacaggugaggaauuccacuuucagaccggggggcgagacucuuguacuaugagacccuccaguuuggggcagggagcgggcgagguguggcugcgaguagacuguagaaacacagaccagacauauuggugugaguaccguggacagcccucuaugugccaggcauuugccgcggacccuaagccauauuggaaccaggcgcugcaggagcugaggcgucuccaccaugcaugccaaggggccccaguguugaggcccucaguuugucgcgaggccgggccucaagcccauaugcagcaagucacaagcucucugaaagggagcccagagccuaaccagcagccugaggccgguacgccuucucuucggccaaaagcgacgguaaaacugacagaagccacacagcugggaaaagacucuauggaagaacuaggcaaagcaaaaccaaccacgagacccaccgcaaagccaacacagcccgguccccguccaggcgggaacgaagaagcuaaaaagaaagcgugggaacacugcuggaagccguuccaagcccucugcgcuuuucugaucuccuuuuuuaggggcuag

SEQ ID NO: 222422 - RNA, 672 nt, Artificial Sequence
  derived and/or modified sequence
augaaguuuguacccugucuccuucuagucacucugagcugucuggguacacuggggcaggccccaagacaaaaacaggguaguacaggcgaggaauuucacuuucagacaggcggucgagacuccugcaccaugaggccuucuucccuggggcagggagcaggggaaguguggcugagaguugauugccggaacaccgaccagacauauuggugcgaguaccgcggccaacccagcaugugccaggccuucgcagcagacccaaagcccuauuggaaccaggcucuccaggaauuacguagauugcaccacgcaugucagggcgcccccgucuugaggccauccguuugcagagaagcuggcccucaggcacacaugcagcagguaacaagcucucuuaaggguucccccgaaccuaaccaacagccagaagcagguacucccucccuacgacccaaggccaccguuaaauugaccgaggcaacccaacuggggaaggacaguauggaagaacuuggaaaggccaagccaacaacacggcccaccgcuaaaccuacgcagcccggcccuaggccuggcggaaaugaggaggcuaagaagaaggccugggaacauugcuggaaaccauuucaggcccugugugcauuuuugauuucuuuuuuccguggguag

SEQ ID NO: 222423 - protein, 254 aa, Artificial Sequence
  derived and/or modified sequence
MPIKPVGWICGQVLKNFSGRIEGIQKAIMDLVDEFKDEFPTILRLSQSNQKREPAQKTSKIRMAIALAKINRATLIRGLNSISRSSKSVAKLLHPQLACRLLELRDISGRLLREVNAPRQPLYNIQVRKGSLFEIISFPAKTALTSIIYASYAALIYLAVCVNAVLKKVKNIFQEEESIRQNREESENCRKAFSEPVLSEPMFAEGEIKAKPYRSLPEKPDISDYPKLLANKQSNNIQVLHSVFDQSAEMNEQI

SEQ ID NO: 222424 - protein, 135 aa, Artificial Sequence
  derived and/or modified sequence
MPIKPVGWICGQVLKNFSGRIEGIQKAIMDLVDEFKDEFPTILRLSQSNQKREPAQKTSKIRMAIALAKINRATLIRGLNSISRSSKSVAKLLHPQLACRLLELRDISGRLLREVNAPRQPLYNIQEKKMGLQLS

SEQ ID NO: 222425 - DNA, 765 bp, Artificial Sequence
  derived and/or modified sequence
atgcccatcaagcccgtgggctggatctgcggccaggtgctgaagaacttcagcggcagaatcgagggcatccagaaggccatcatggacctggtggacgagttcaaggacgagttccccaccatcctgagactgagccagagcaaccagaagagagagcccgcccagaagaccagcaagatcagaatggccatcgccctggccaagatcaacagagccaccctgatcagaggcctgaacagcatcagcagaagcagcaagagcgtggccaagctgctgcacccccagctggcctgcagactgctggagctgagagacatcagcggcagactgctgagagaggtgaacgcccccagacagcccctgtacaacatccaggtgagaaagggcagcctgttcgagatcatcagcttccccgccaagaccgccctgaccagcatcatctacgccagctacgccgccctgatctacctggccgtgtgcgtgaacgccgtgctgaagaaggtgaagaacatcttccaggaggaggagagcatcagacagaacagagaggagagcgagaactgcagaaaggccttcagcgagcccgtgctgagcgagcccatgttcgccgagggcgagatcaaggccaagccctacagaagcctgcccgagaagcccgacatcagcgactaccccaagctgctggccaacaagcagagcaacaacatccaggtgctgcacagcgtgttcgaccagagcgccgagatgaacgagcagatctag

SEQ ID NO: 222426 - DNA, 408 bp, Artificial Sequence
  derived and/or modified sequence
atgcccatcaagcccgtgggctggatctgcggccaggtgctgaagaacttcagcggcagaatcgagggcatccagaaggccatcatggacctggtggacgagttcaaggacgagttccccaccatcctgagactgagccagagcaaccagaagagagagcccgcccagaagaccagcaagatcagaatggccatcgccctggccaagatcaacagagccaccctgatcagaggcctgaacagcatcagcagaagcagcaagagcgtggccaagctgctgcacccccagctggcctgcagactgctggagctgagagacatcagcggcagactgctgagagaggtgaacgcccccagacagcccctgtacaacatccaggagaagaagatgggcctgcagctgagctag

SEQ ID NO: 222427 - DNA, 765 bp, Artificial Sequence
  derived and/or modified sequence
atgcccatcaagcctgtgggatggatttgcggtcaagtcctcaaaaatttttccggccgcatcgaaggaatacaaaaggccattatggatctggttgacgaattcaaggatgagtttcccactatccttaggctgtcccaatccaaccagaagcgggaaccagcccagaaaacgtcaaagattcgaatggctattgccctggcaaagattaaccgtgcaacgctcattagggggttgaactctatcagccggtcaagcaagtctgtagctaaactgcttcatccccaactggcctgtcgcctgcttgagttgagagacatctcaggtcgcctactccgcgaggtcaacgcccccagacagcccctctataatatccaggtgaggaaaggctcattgtttgagattatctcgtttccagccaagactgcattgactagtattatctacgccagctacgctgcactgatctacctggcggtttgtgtgaatgccgtgcttaagaaagtgaagaacatttttcaagaagaagagtcgatccgccagaaccgcgaagagtcagaaaactgtaggaaagcctttagcgagcccgtcctctccgaacctatgtttgctgagggggagatcaaggcaaagccataccggagcttgccagagaagcctgacatctccgattatccaaaacttctggccaataagcaatcgaataacattcaggtgctccatagcgtgtttgaccaatcagcagagatgaatgagcaaatttag

SEQ ID NO: 222428 - DNA, 765 bp, Artificial Sequence
  derived and/or modified sequence
atgcctataaaaccagtaggatggatttgtggacaggtgctaaaaaacttcagtggaaggatcgagggcatacagaaagccatcatggatctggtggatgaattcaaagacgagttccccactatcctcagactgagtcaatctaatcagaagagggagcccgcgcagaagacctcaaagataaggatggcgattgctctggctaaaataaatcgggcgaccctgatcaggggcctgaactcgatctcccgctcttctaagtccgtagccaagctgctgcacccccaactggcttgccggcttctcgagctgagggacatttccggcagactactgcgagaagtgaacgcaccccgtcagcccctgtacaacatccaggtgaggaaaggatcactgtttgagattatctctttccctgccaagaccgccctcacctcaattatctacgcatcttatgccgctcttatctatctcgccgtctgcgtaaacgctgtgctgaaaaaagtgaagaatatcttccaggaggaagagtccatccgtcaaaatcgagaagaatccgagaactgccggaaagctttttccgagccagtcctgtccgaacccatgttcgccgaaggcgagatcaaggccaaaccttaccggtcactccccgaaaagcctgacatttcggactatccaaagttactggcaaacaaacagtccaacaacattcaagttctgcatagcgtcttcgatcagagcgcggagatgaacgaacaaatttag

SEQ ID NO: 222429 - DNA, 408 bp, Artificial Sequence
  derived and/or modified sequence
atgccaataaagcccgtgggctggatatgtggtcaggtgctgaagaatttctccgggcgtatcgaaggcattcaaaaggccattatggatctggtggatgagttcaaggacgagttccccaccatcctacgcctgtcacaatccaatcagaagagagagccagctcaaaagacaagtaagattcggatggccatcgctctggctaaaatcaatagggcaactctgataagggggctaaattccatttcccggtcttctaagtcagtggcaaagctgctccacccccagctggcttgtcgcctgttggagttgcgggatatttctggccgtctgcttagagaggtgaatgcccctagacagccactgtacaacatccaggagaagaagatggggctgcaactatcatag

SEQ ID NO: 222430 - DNA, 765 bp, Artificial Sequence
  derived and/or modified sequence
atgcccatcaagcctgtgggctggatctgtggccaggtgctgaagaacttcagcggcagaattgagggcatccagaaggccatcatggacctggtggatgagttcaaggatgagttccccaccatcctgcggctgagccagagcaaccagaagcgggagcccgcccagaagaccagcaagatccgcatggccatcgccctggccaagatcaacagagccaccctcatccggggcctgaacagcatcagccgcagcagcaagtctgtggccaagctgctgcacccccagctggcctgccgcctgctggagctgcgggacatcagcggccgcctgctgcgggaggtgaatgccccccggcagcccctgtacaacatccaggtgaggaagggcagcctgtttgagatcatctccttccctgccaagacagccctgaccagcatcatctatgccagctatgctgccctgatctacctggccgtgtgtgtgaatgctgtgctgaagaaggtgaagaacatcttccaggaggaggagagcatccggcagaaccgggaggagagcgagaactgcaggaaggccttcagcgagcctgtgctgtctgagcccatgtttgctgagggggagatcaaggccaagccctaccgcagcctgcctgagaagccagacatcagtgactaccccaagctgctggccaacaagcagagcaacaacatccaggtgctgcacagcgtgtttgaccagagcgctgagatgaatgagcagatctag

SEQ ID NO: 222431 - DNA, 408 bp, Artificial Sequence
  derived and/or modified sequence
atgcccatcaagcctgtgggctggatctgtggccaggtgctgaagaacttcagcggcagaattgagggcatccagaaggccatcatggacctggtggatgagttcaaggatgagttccccaccatcctgcggctgagccagagcaaccagaagcgggagcccgcccagaagaccagcaagatccgcatggccatcgccctggccaagatcaacagagccaccctcatccggggcctgaacagcatcagccgcagcagcaagtctgtggccaagctgctgcacccccagctggcctgccgcctgctggagctgcgggacatcagcggccgcctgctgcgggaggtgaatgccccccggcagcccctgtacaacatccaggagaagaagatgggcctgcagctgtcctag

SEQ ID NO: 222432 - DNA, 765 bp, Artificial Sequence
  derived and/or modified sequence
atgcccatcaagcccgtgggctggatctgcggccaggtgctgaagaattttagcggtcgtattgagggtatccagaaagctatcatggacctcgtcgatgaattcaaagatgaattccccactatcttaagattgtcacagtctaaccaaaagcgcgagccagcccagaagacaagcaagattcgcatggccattgccctagccaagatcaatagagccacccttatccgaggattgaactctatcagccggagcagcaaaagcgtggcaaagctgctacacccccagctcgcctgtaggctcttagaactgcgggacataagtggacgtttactgagggaagtcaatgccccaaggcagcccttatacaacatccaggtaagaaaaggcagcctcttcgaaatcatctcatttcctgcgaagaccgcattgacaagtattatttacgcttcttatgcggccttgatttacttggcagtgtgcgtaaacgctgtcctgaaaaaagttaagaacatttttcaggaagaggaatcaattcgtcagaacagggaagaaagcgagaactgtaggaaggcgttctcagagcccgttctaagtgaacctatgttcgccgagggcgagatcaaagcaaaaccttatcgttccctgcctgagaaacctgacattagtgactaccccaagttgcttgctaataaacagagtaacaatatccaagtactgcactccgtgtttgaccagtcagctgagatgaacgagcagatttag

SEQ ID NO: 222433 - DNA, 765 bp, Artificial Sequence
  derived and/or modified sequence
atgcccatcaagcccgtgggctggatctgcggccaggtgctgaagaatttcagtggaagaatcgagggtatccagaaagctatcatggacttggtggacgagttcaaggacgagtttcccactatcctgcgcctctctcagagcaatcagaaacgcgagcccgcccaaaaaaccagtaagatcaggatggccatagcgctagctaagataaacagggcaacgctgattagaggcctgaattcaatttcccgttcaagtaaatccgtggcaaaacttctgcacccacagctggcctgtagactgttggagctgcgcgacatcagcgggcggctactgcgggaagtgaatgccccaaggcagccgctatacaatatccaggtgagaaaggggtccttatttgagatcatctcgtttcctgcgaaaacagcgctaacgagcattatctacgcttcgtacgccgctttgatatatctagcagtctgtgtgaatgccgtcctcaaaaaggtgaagaacatatttcaagaggaagaaagtattcgtcagaacagagaggagagcgagaattgccgcaaggccttcagcgaacccgtcttgtctgagccaatgttcgccgagggagagattaaagccaaaccctacaggagtcttcccgagaagccagatatcagtgattatcccaaactgctcgcaaacaaacaatcgaataacatccaggtgttgcattccgtgtttgaccaatctgcagagatgaatgaacagatatag

SEQ ID NO: 222434 - DNA, 408 bp, Artificial Sequence
  derived and/or modified sequence
atgcccatcaagcccgtgggctggatctgcggccaggtgctgaagaatttcagcggtagaatcgagggaattcaaaaggctataatggatctggtcgatgaattcaaagatgagttcccaacaatcttgagacttagtcagagcaaccagaaacgcgagccggctcagaagacttctaaaatccgcatggctatcgcgctggccaagatcaaccgagctacccttatcaggggactcaattctataagcaggtcatctaagtccgttgctaaactactgcacccacagttggcttgccggctgctggaattgcgggatattagcggtagactgctgcgtgaggtgaatgcccccaggcaacccctctataacattcaggaaaaaaagatgggcctgcagctgagctag

SEQ ID NO: 222435 - DNA, 765 bp, Artificial Sequence
  derived and/or modified sequence
atgcccattaaacctgtaggttggatttgtgggcaggtgctaaagaatttctcgggcaggatcgagggcatccagaaggccatcatggatctcgttgatgagttcaaggatgagttcccaacgatattacggctgtctcagtcaaatcagaagcgcgagcctgcacagaagacatcaaagattcggatggccattgcactcgctaaaataaatcgtgctaccctgatcagagggttaaacagtatttcacgaagcagtaagtctgttgctaagttgctgcacccgcagctggcatgtagactgctggagctgcgtgacatttctggccgactgctcagggaggtgaacgcccctaggcagccgctatataacatccaggtcagaaaaggctcactctttgagatcattagttttccagcaaagacggctctgacatcaattatttacgcgtcttacgcagccctcatctatttggcggtgtgcgtgaatgcggtgctgaaaaaagtgaaaaacattttccaggaagaggaaagcatccgccagaatcgcgaagaaagcgaaaattgtcggaaggcattttcagaacccgtgctgtctgaaccaatgtttgccgagggggagataaaagccaagccgtaccgttccctgcctgaaaagccagacatctctgattatcccaagctcttggccaataagcagtcaaacaacatccaggtcctccactcagtgtttgatcagtctgccgagatgaacgaacagatctag

SEQ ID NO: 222436 - DNA, 765 bp, Artificial Sequence
  derived and/or modified sequence
atgcccattaaacctgtagggtggatctgcggtcaagtccttaaaaatttttccgggaggattgagggaatccagaaagctatcatggatctcgttgatgaatttaaggacgaattccccaccatcctccggttatctcagtccaatcagaagagggagcccgctcaaaaaaccagtaagatcaggatggctatagccctggccaagatcaatagagccactctcattagaggtctgaacagcatctctcgcagtagtaagagcgtggcgaagctcttacacccccagttagcttgtaggcttctggaacttagggatatttcgggaagactgcttcgcgaagtcaatgcgcctagacaacccctttataatattcaagtccgaaaaggctccctgtttgagatcatctcctttcctgccaagacggcgttaactagcatcatttacgcaagctatgcagcgctaatctaccttgctgtgtgtgtgaacgccgttttgaagaaggtcaaaaacatcttccaagaagaggagagcatcaggcagaatagagaagaaagtgagaactgccgcaaggcttttagcgaaccagtcttgagcgaacctatgtttgcggagggcgagattaaagcgaaaccttacagatctctgcctgaaaagcccgacattagcgattatccgaagctcctggccaataaacagtccaacaatatacaggtgctgcacagcgtttttgaccagtccgctgagatgaacgaacagatttag

SEQ ID NO: 222437 - DNA, 408 bp, Artificial Sequence
  derived and/or modified sequence
atgcctattaaacccgtcgggtggatttgcgggcaggtgctaaagaatttttcaggcagaatcgaaggcattcagaaagccatcatggacctggtggacgagtttaaagacgagttccctactatcctaaggctctcacaatccaaccagaagagggagcctgcacaaaaaacatctaagattcgaatggctattgccctcgccaagataaaccgcgctactttaattcggggtctaaatagcatctccagatcttcgaagtcagtcgccaagctgctgcatccacagctggcttgtagattgctagagctgagggacatatcagggagattactgagggaggtcaacgcgcctcggcagcctctctacaatatccaggagaagaaaatgggccttcagctgtcgtag

SEQ ID NO: 222438 - DNA, 1100 bp, Artificial Sequence
  derived and/or modified sequence
ccagcagtgagctgtgagttctgtccttgctggctttcccaagtggaaggctaccctcatctttcactaatggcagactaggacaagcattacccaggcctgcaagcttgttaaggactaggaacccaagcaagaactcaccatgccaatcaaacctgttgggtggatatgtgggcaggtgttgaagaacttttctggaagaatcgaggggatccagaaagcaatcatggaccttgtagatgagtttaaagatgaatttcccaccatcctaagattatcacagtctaatcagaaaagagaacctgcgcagaaaacatccaaaatcaggatggctattgctttagctaagattaatcgagcaacattaattcgtggattaaacagcatatccagatcctccaaatcagtggccaaacttctgcatcctcagcttgcatgcagacttttagagctaagggacatatctggtcgtctgctgagggaagttaatgcgccgaggcaacccctatataacattcaggtcagaaagggttctttgtttgaaatcatctcctttccagcaaagactgctttaactagcataatatatgcttcatatgcagcactaatttatttggcagtctgtgttaatgctgtgctgaagaaggtaaagaacatcttccaggaagaagaatccataaggcaaaacagagaggagagtgaaaattgtagaaaagccttttctgagcctgtgctttcggagcctatgtttgctgaaggtgaaatcaaagcaaaaccttataggtcattgccggagaagccagacatttcagattaccccaagcttcttgctaataagcagagtaataacatccaagttttacattctgtgtttgaccaatcagctgaaatgaatgagcaaatctgaatacaggtatcactgaacagaacttaagagttatctatttaatggcacatttcatctgacaaaactcagagtctagtttacatattctgaattgctctgctttcttaaaaaaaagagaagggggctactattaaaatgtcattttctagtatttacatgatagagtaaataaaatgaatattgatgtggaata

SEQ ID NO: 222439 - DNA, 1583 bp, Artificial Sequence
  derived and/or modified sequence
ccagcagtgagctgtgagttctgtccttgctggctttcccaagtggaaggctaccctcatctttcactaatggcagactaggacaagcattacccaggcctgcaagcttgttaaggactaggaacccaagcaagaactcaccatgccaatcaaacctgttgggtggatatgtgggcaggtgttgaagaacttttctggaagaatcgaggggatccagaaagcaatcatggaccttgtagatgagtttaaagatgaatttcccaccatcctaagattatcacagtctaatcagaaaagagaacctgcgcagaaaacatccaaaatcaggatggctattgctttagctaagattaatcgagcaacattaattcgtggattaaacagcatatccagatcctccaaatcagtggccaaacttctgcatcctcagcttgcatgcagacttttagagctaagggacatatctggtcgtctgctgagggaagttaatgcgccgaggcaacccctatataacattcaggtcagaaagggttctttgtttgaaatcatctcctttccagcaaagactgctttaactagcataatatatgcttcatatgcagcactaatttatttggcagtctgtgttaatgctgtgctgaagaaggtaaagaacatcttccaggaagaagaatccataaggcaaaacagagaggagagtgaaaattgtagaaaagccttttctgagcctgtgctttcggagcctatgtttgctgaaggtgaaatcaaagcaaaaccttataggtcattgccggagaagccagacatttcagattaccccaagcttcttgctaataagcagagtaataacatccaagttttacattctgtgtttgaccaatcagctgaaatgaatgagcaaatctgaatacaggcattcaaagaacattggctcactgaataggagactttacatctctcatggctgggcagcagctgtgtctggcttccttacttcaagatctgccttgatcacagatcacttaacagtggttaagtttcttattttcaagttcagcaggggcaaactatacacggtcgtccatcaaaatcctggggaagagaataactcatttaatattctgacatgtcaaatgttcttgatagactctgaagagtctgctgcagaagaaccaggttaaaaaaacagtaggtctaaggggttggggtgacaagattctgcatgtctaagaagctcccatgtgacaccaaagttgctggtctatggacaacagtttgaggagcaaggtcttcaagctctcattatggactgaaactggagaaaattctatggaactattatcagctcacacatataaaaactggtcactgagatgacagctgagctgaaatgcccaaaatgcaaatgaactagacatgccaacagcttggggaagagaattccatactgaaagaagagcaaatacaaaagcctgaaggaaagaaaagtcttggtgaatgtgttccagaagactggaacataatatgcaagattggtaaacaggcaggagccaggttgtgcagtgctgtgtatggattttact

SEQ ID NO: 222440 - DNA, 510 bp, Artificial Sequence
  derived and/or modified sequence
aagtggaaggctaccctcatctttcactaatggcagactaggacaagcattacccaggcctgcaagcttgttaaggactaggaacccaagcaagaactcaccatgccaatcaaacctgttgggtggatatgtgggcaggtgttgaagaacttttctggaagaatcgaggggatccagaaagcaatcatggaccttgtagatgagtttaaagatgaatttcccaccatcctaagattatcacagtctaatcagaaaagagaacctgcgcagaaaacatccaaaatcaggatggctattgctttagctaagattaatcgagcaacattaattcgtggattaaacagcatatccagatcctccaaatcagtggccaaacttctgcatcctcagcttgcatgcagacttttagagctaagggacatatctggtcgtctgctgagggaagttaatgcgccgaggcaacccctatataacattcaggagaagaaaatggggctccaattgagttaa

SEQ ID NO: 222441 - protein, 313 aa, Artificial Sequence
  derived and/or modified sequence
MEEMSGESVVSSAVPAAATRTTSFKGTSPSSKYVKLNVGGALYYTTMQTLTKQDTMLKAMFSGRMEVLTDSEGWILIDRCGKHFGTILNYLRDGAVPLPESRREIEELLAEAKYYLVQGLVEECQAALQNKDTYEPFCKVPVITSSKEEQKLIATSNKPAVKLLYNRSNNKYSYTSNSDDNMLKNIELFDKLSLRFNGRVLFIKDVIGDEICCWSFYGQGRKIAEVCCTSIVYATEKKQTKVEFPEARIYEETLNILLYEAQDGRGPDNALLEATGGAAGRSHHLDEDEERERIERVRRIHIKRPDDRAHLHQ

SEQ ID NO: 222442 - protein, 132 aa, Artificial Sequence
  derived and/or modified sequence
MLKNIELFDKLSLRFNGRVLFIKDVIGDEICCWSFYGQGRKIAEVCCTSIVYATEKKQTKVEFPEARIYEETLNILLYEAQDGRGPDNALLEATGGAAGRSHHLDEDEERERIERVRRIHIKRPDDRAHLHQ

SEQ ID NO: 222443 - protein, 279 aa, Artificial Sequence
  derived and/or modified sequence
  misc_feature (1)..(1): Xaa can be any naturally occurring amino acid
XRYCRSPFWSGYGNFYSLQKSGFLPTLGTVQPFNYCKSGWILIDRCGKHFGTILNYLRDGAVPLPESRREIEELLAEAKYYLVQGLVEECQAALQNKDTYEPFCKVPVITSSKEEQKLIATSNKPAVKLLYNRSNNKYSYTSNSDDNMLKNIELFDKLSLRFNGRVLFIKDVIGDEICCWSFYGQGRKIAEVCCTSIVYATEKKQTKVEFPEARIYEETLNILLYEAQDGRGPDNALLEATGGAAGRSHHLDEDEERERIERVRRIHIKRPDDRAHLHQ

SEQ ID NO: 222444 - DNA, 942 bp, Artificial Sequence
  derived and/or modified sequence
atggaggagatgagcggagagtccgtggtgagctctgcagtgccggccgccgcgacacgcacgacatctttcaagggaaccagcccgagttcaaagtacgtcaagttaaacgtgggaggcgccctgtactatacaacaatgcagacgctgaccaagcaagatactatgctgaaggccatgttttccggtaggatggaggtgctgacagactcagagggttggatcctaattgatcgatgcggcaaacactttggcactatacttaattacctgcgcgacggcgcggtgcccttaccagagagccgacgggagatcgaggagttacttgccgaggctaagtattacctagtgcagggattggtggaggaatgtcaggccgctctgcaaaacaaagatacatacgaaccgttctgtaaggtacctgtcataacctcatcaaaggaagaacagaaactgatcgctactagcaataagcctgccgtgaaactcctatacaaccgcagcaataacaaatacagctatacgtccaactccgatgataacatgctgaagaatatcgagctctttgataagctgagcctgcgctttaatgggagggtcctcttcataaaggatgtcatcggagacgagatatgttgctggagcttctatggtcagggcagaaaaatcgccgaggtctgttgcacatcgatcgtctacgccacagagaagaagcagactaaagttgaatttcccgaagcccggatctatgaggagacattaaacatcctgctttatgaggcccaggacggcaggggcccggacaatgcactcctggaggctacaggtggcgcagcaggcaggagtcaccacctggacgaggatgaagaaagagaacgaatcgagagagtgaggaggattcacatcaagcgtcctgatgatagagcgcatctgcaccaatag

SEQ ID NO: 222445 - DNA, 399 bp, Artificial Sequence
  derived and/or modified sequence
atgctgaagaatatcgagcttttcgataagctctctcttcgcttcaatgggcgggttctctttatcaaggacgttattggcgacgagatttgctgctggagcttttacggccagggcaggaagattgccgaggtttgctgcacttccattgtgtacgcgactgagaaaaagcagacaaaggtcgagttccccgaggcacggatttacgaggagactctaaatattctcctctacgaggcccaggacggaaggggccctgacaatgccttgcttgaagcgaccggcggggctgcagggcgttcacaccacttggacgaagatgaggagcgtgaaaggatcgagcgtgtgcgtcgcattcatattaaacgccccgatgatagggctcatctgcaccagtag

SEQ ID NO: 222446 - DNA, 840 bp, Artificial Sequence
  derived and/or modified sequence
tgaaggtactgtcgcagcccattttggagcggctatggaaacttctactcgctccagaaaagtggttttctgccaacgttgggcacagtacagccttttaattactgcaaaagcggctggattctgattgatcgatgtgggaagcactttggaaccattctgaattaccttagagacggagcggtccctttaccggagtctcggagggagattgaagagcttttggctgaggctaaatattatcttgttcagggtctagtggaagagtgccaagctgccttacagaataaagacacgtacgagcctttttgcaaggtccctgtgatcacttccagtaaggaagagcaaaagctgatcgctacatcaaacaagcccgccgttaagctcctttacaaccgctccaacaacaagtactcatatacttcaaactcagatgacaacatgcttaagaacatagaactcttcgataagctcagtctgaggttcaacgggcgggtacttttcatcaaggatgtcatcggcgacgaaatttgctgctggtcattttacggccagggtaggaaaatcgccgaggtgtgttgcacttctattgtgtatgctacagaaaagaagcagactaaggtggagttccccgaggcaaggatttatgaggagaccctcaacattctgctgtatgaggcccaggacggaagaggccccgacaatgcccttctggaagccacagggggtgccgctggcaggagtcatcacctggacgaggatgaggaaagagagaggatcgagagggtccggaggattcacattaagagaccggatgatagggctcacttacaccagtag

SEQ ID NO: 222447 - DNA, 468 bp, Artificial Sequence
  derived and/or modified sequence
atgatggctgtgttcacctccctctggagtccctaccagatgttattctgcagcaacagcgatgacaacatgttgaaaaatatcgagctattcgataagcttagcctgaggtttaatggtcgtgtgctcttcattaaggacgtaatcggcgacgaaatttgctgttggtctttctatggccagggccggaagattgccgaagtttgctgcacctccattgtgtacgccactgagaagaaacagacaaaggtagagttccctgaggctagaatctatgaagagacactgaatatcctgttatatgaggcgcaggatgggagagggccggataacgcgctgctcgaagctactggaggcgccgctgggcggtctcaccacctggacgaagatgaggaacgagagagaatcgaacgcgtcagacgtatacacatcaagagacctgatgatcgcgctcatttgcaccagtag

SEQ ID NO: 222448 - DNA, 942 bp, Artificial Sequence
  derived and/or modified sequence
atggaggagatgtctggagagagcgtggtgagcagcgctgtgcctgctgctgccaccaggaccaccagcttcaagggcaccagccccagcagcaaatatgtgaagctgaatgtgggcggggccctgtactacaccaccatgcagaccctgaccaagcaggacaccatgctgaaggccatgttcagcggccgcatggaggtgctgacagattctgagggctggatcctgattgacagatgtgggaagcacttcggcaccatcctgaactacctgagagatggagctgtgcccctgcctgagagccggcgggagattgaggagctgctggccgaggccaagtactacctggtgcagggcctggtggaggagtgccaggccgccctgcagaacaaggacacctatgagcccttctgcaaggtgcctgtgatcaccagcagcaaggaggagcagaagctgattgccaccagcaacaagccagctgtgaagctgctgtacaacagaagcaacaacaagtacagctacaccagcaacagtgatgacaacatgctgaagaacatcgagctgtttgacaagctgagcctgcgcttcaacggccgggtgctcttcatcaaggatgtgattggagatgagatctgctgctggagcttctacggccagggcaggaagattgctgaggtgtgctgcaccagcatcgtgtatgccacagagaagaagcagaccaaggtggagttccctgaggcccgcatctatgaggagaccctgaacatcctgctgtatgaggcccaggacggccggggccctgacaatgccctgctggaggccactggaggagctgctggccgcagccaccacctggatgaagatgaggagcgggagcgcatcgagcgggtgcggcgcatccacatcaagaggccagatgaccgggcccacctgcaccagtag

SEQ ID NO: 222449 - DNA, 399 bp, Artificial Sequence
  derived and/or modified sequence
atgctgaagaacatcgagctgtttgacaagctgagcctgcgcttcaacggccgggtgctcttcatcaaggatgtgattggagatgagatctgctgctggagcttctacggccagggcaggaagattgctgaggtgtgctgcaccagcatcgtgtatgccacagagaagaagcagaccaaggtggagttccctgaggcccgcatctatgaggagaccctgaacatcctgctgtatgaggcccaggacggccggggccctgacaatgccctgctggaggccaccggcggggccgccggccgcagccaccacctggatgaagatgaggagcgggagagaattgagcgggtgcggcgcatccacatcaagaggccagatgaccgggcccacctgcaccagtag

SEQ ID NO: 222450 - DNA, 840 bp, Artificial Sequence
  derived and/or modified sequence
tgaagatactgccgcagccccttctggagcggctacggcaacttctacagcctgcagaagagcggcttcctgcccaccctgggcaccgtgcagcccttcaactactgcaagagcggctggatcctgattgacagatgtgggaagcacttcggcaccatcctgaactacctgagagatggagctgtgcccctgcctgagagccggcgggagattgaggagctgctggccgaggccaagtactacctggtgcagggcctggtggaggagtgccaggccgccctgcagaacaaggacacctatgagcccttctgcaaggtgcctgtgatcaccagcagcaaggaggagcagaagctgattgccaccagcaacaagccagctgtgaagctgctgtacaacagaagcaacaacaagtacagctacaccagcaacagtgatgacaacatgctgaagaacatcgagctgtttgacaagctgagcctgcgcttcaacggccgggtgctcttcatcaaggatgtgattggagatgagatctgctgctggagcttctacggccagggcaggaagattgctgaggtgtgctgcaccagcatcgtgtatgccacagagaagaagcagaccaaggtggagttccctgaggcccgcatctatgaggagaccctgaacatcctgctgtatgaggcccaggacggccggggccctgacaatgccctgctggaggccactggaggagctgctggccgcagccaccacctggatgaagatgaggagcgggagcgcatcgagcgggtgcggcgcatccacatcaagaggccagatgaccgggcccacctgcaccagtag

SEQ ID NO: 222451 - DNA, 468 bp, Artificial Sequence
  derived and/or modified sequence
atgatggctgtgttcaccagcctgtggagcccctaccagatgctgttctgcagcaacagtgatgacaacatgctgaagaacatcgagctgtttgacaagctgagcctgcgcttcaacggccgggtgctcttcatcaaggatgtgattggagatgagatctgctgctggagcttctacggccagggcaggaagattgctgaggtgtgctgcaccagcatcgtgtatgccacagagaagaagcagaccaaggtggagttccctgaggcccgcatctatgaggagaccctgaacatcctgctgtatgaggcccaggacggccggggccctgacaatgccctgctggaggccactggaggagctgctggccgcagccaccacctggatgaagatgaggagcgggagcgcatcgagcgggtgcggcgcatccacatcaagaggccagatgaccgggcccacctgcaccagtag

SEQ ID NO: 222452 - DNA, 942 bp, Artificial Sequence
  derived and/or modified sequence
atggaggagatgagcggcgagagcgtggtgagcagcgccgtgcccgccgctgctacccgcactacttccttcaaagggaccagtccttcctctaagtacgtgaagttaaacgtcggcggagcactttactacaccacgatgcagactctgacaaagcaagacaccatgttgaaagccatgttttcagggcggatggaggtactgactgattccgagggttggatccttattgacagatgtgggaagcacttcggtaccattctgaattacttgcgtgacggagccgttcccttaccagaaagcagacgcgaaatcgaagagctccttgccgaggcaaaatattacctggtgcagggcctagtcgaggaatgccaagccgccctccagaacaaagacacttacgaacccttttgtaaggtccctgtgatcacctcaagtaaagaagagcaaaaattaattgcgacttctaataaaccagccgtcaagctgctctacaaccgttccaataacaaatattcatacactagcaattcagacgataacatgctaaagaatattgagctgttcgacaagctgagtctccgatttaacggccgcgtgctgtttataaaggatgttatcggcgacgagatttgctgttggagcttttacggccaggggcggaagatcgcggaggtgtgctgtacttcgatcgtgtacgcaaccgagaaaaaacagactaaagtggagtttcctgaggcaagaatctatgaggagacactgaatatccttctctatgaagctcaagacggccgcggccctgacaacgccctactggaagcgacaggaggtgcggcaggtcgcagccaccacctcgacgaggacgaagaacgcgaacgcatcgagcgtgtccggagaatccacattaaaaggccagatgacagggcacatcttcatcagtag

SEQ ID NO: 222453 - DNA, 399 bp, Artificial Sequence
  derived and/or modified sequence
atgctgaagaacatcgagctgttcgacaagctgagcctgcggttcaacgggagagtccttttcatcaaggacgttattggggacgagatctgttgctggtctttttacggtcagggtcggaaaatcgctgaggtatgctgtacttctatcgtctacgccacagagaaaaagcagactaaggtcgaattccctgaagctcgtatttacgaggagactctcaacatcctcttgtatgaagcacaggacggccggggacccgacaacgccctgctggaggcgactggcggagccgctggtcgctcgcaccaccttgatgaggacgaggagcgagaacgcatcgagcgcgtaaggcgcattcatatcaagcgaccagatgacagggctcatctgcatcagtag

SEQ ID NO: 222454 - DNA, 840 bp, Artificial Sequence
  derived and/or modified sequence
tgacggtactgccggagccccttctggagcggctacggcaacttctattctctgcagaaatcagggttccttccgacactgggcaccgttcaaccctttaactattgtaaatcaggctggatcctgattgacagatgtggcaaacatttcgggacaatactaaattacttacgtgacggcgcagtgcccctcccagaatcccggagagaaatagaggaattgttagctgaagccaaatactatctcgtgcagggactcgtggaggagtgccaagccgctttgcagaataaagatacctatgagcccttctgtaaggtgcctgtgatcacctcctctaaagaagaacagaaactcattgccaccagcaacaaacccgccgtgaaactgttgtataacaggtcaaataacaaatatagctacacaagtaactctgacgacaatatgctgaaaaatattgagctgttcgacaaactgtccttgcggttcaatggccgtgtgctgtttatcaaagacgtgattggcgacgaaatctgttgttggtcattttatggacagggtcgcaagatcgccgaggtatgttgtacaagcatcgtgtacgccacggagaaaaagcagactaaagtcgagtttccagaagccaggatctacgaagagactctcaatatcctgctctacgaggcccaagatggccgtggcccagacaacgctttgctagaagcaacggggggtgctgctgggcggagccatcatctggatgaggatgaagagcgagaacggatcgagagggtccgaagaattcacatcaagcgtcccgatgaccgagcacatttgcaccagtag

SEQ ID NO: 222455 - DNA, 468 bp, Artificial Sequence
  derived and/or modified sequence
atgatggccgtgttcaccagcctgtggagcccctaccagatgctgttttgttccaattccgatgataatatgctgaaaaacatcgagttatttgataaactgtccctcaggttcaacgggcgagtccttttcattaaggacgtgatcggagacgaaatctgctgctggtcattttatggccagggaagaaaaatcgccgaggtgtgttgcacaagcatcgtgtacgccacagagaaaaagcagaccaaggtagagttccctgaggccaggatctacgaggagaccctgaacatcctcctgtatgaggcccaggacggccgcgggcccgacaacgctttactggaagccacaggcggcgcagctgggcggagccaccacctagacgaagacgaagagcgtgagcgcatcgaacgcgtccggagaattcacattaagcgccccgatgacagggcacacctgcatcaatag

SEQ ID NO: 222456 - DNA, 942 bp, Artificial Sequence
  derived and/or modified sequence
atggaggaaatgtcaggtgagtctgttgtctcatctgcggtgcctgccgcagccaccaggacaacctcatttaagggtacatcaccctcctcaaaatatgtcaagctcaatgtagggggagcgctgtactacacaaccatgcaaaccctgacaaagcaggatacgatgcttaaagcgatgttctctgggaggatggaggttcttacggatagcgaaggctggattctgatcgatcggtgtggcaagcatttcggcactatcttaaattatctgcgggatggagcggtgccactgccagagagcagacgagaaatagaggagctgctggcagaggccaagtactacttagtccagggtctggtggaggagtgccaggctgctctgcagaacaaagatacatacgagcctttctgtaaggtgccagttataactagctccaaggaggaacagaagctaatcgccacttctaacaagccagctgtgaaactcctctacaatcgatctaacaacaaatatagctatacctccaattcagacgacaacatgttgaaaaacatcgaactcttcgataaactcagtctccgatttaacggcagagtccttttcattaaggatgtgatcggcgacgagatctgttgttggtcattttacggacaggggagaaaaatcgccgaggtttgttgcacatccatcgtgtacgcaacggagaagaaacagactaaggtggaattcccagaggcccgaatttatgaagagacactgaacattcttttgtacgaggcccaggacggacgtggacctgacaatgctcttctggaggcaacaggcggagcggctggtcgatcgcaccacctagacgaggatgaggagagagagaggattgagcgggttaggcgtattcacataaaaaggcccgacgatcgggcacatctacaccagtag

SEQ ID NO: 222457 - DNA, 4163 bp, Artificial Sequence
  derived and/or modified sequence
acaccttgcctcccctctggcagctgaaatagcggaggtgggataaatgccctccccagccgagaaaagctggaacccactccggccggggaggctggaaagaaaactggcccctaggcgcacaacggacggcttaagacgttgccctctgcggggcggaagtggggtgcggacagcggaagttatcgctccggccccgcctccgcccccggctggcgtgagctgggtgtttcctgcctctctcagtccgggtttggagactcctgcgtcctccgacttttcatggaagagatgtcaggagaaagtgtggtgagctcagcggtgccagcggctgctacccgcaccacttccttcaagggcacgagccccagctccaaatacgtgaagctgaatgtgggtggagccctctactataccaccatgcagacgctgaccaagcaggacaccatgctgaaggccatgttcagcgggcgcatggaagtgctcaccgacagtgaaggctggatcctcattgaccgctgtgggaagcactttggtacgatactcaactaccttcgagacggggcggtgcctttacccgagagccgccgggagatcgaggagctgctagcagaagccaagtactacctagtccaaggcctggtggaagagtgccaggcggccctacaaaacaaagatacttatgagcctttctgcaaggtccctgtgatcacctcatccaaggaagaacaaaaacttatagcgacttcaaataagccagccgtgaagttgctctacaacagaagtaacaacaaatactcatataccagcaattctgacgacaatatgttgaaaaacattgaactgtttgataagctgtctctgcgctttaacggaagggtcctgttcataaaggatgttattggggatgaaatctgctgctggtccttttatggtcagggccggaagattgctgaagtctgttgtacctccatcgtctatgccactgagaagaaacagaccaaggtggagtttcccgaagcccggatttatgaggagaccctgaacattttgctgtatgaggcccaggatggccggggacctgacaatgcgctcctggaggccacaggcggggcggcggggcgctcccaccacctggacgaggacgaggagcgggagcggatcgagcgcgtgcggaggatccacatcaagcgccctgatgaccgggcccacctccaccagtgagcaggcaagagaccgagccgccctcctctcaccgcccccactccctgccgtgctacacccagatcctgtgcaggctgccgggccccttctgcttcccttggagcctggagatacttttgtaacaagccagatgattattttggtattgcttgacaaggcaaattgattgtcttgacccaggcgtatgacccctgtcgttgaacaagctgtgtctaagatctctacttttcatgagaatctgagactctttggagccaggctttctcggttctcagaggaaaagtatgaatgagtgtgaagtgtatgtgagaacttttgtttgcaatatttatttttgtgggtgtcgacttcctatgtgggctttttgggtgacactcccttaagggttcagtttgacaattctgagagttgtcctgcagttggaggccaccagaggtatctgagctccctgcttcctatttcataatcctccagccccagcaggtccactcctggttcctgtgtgtttggcccgggcacaatccccactgctttgctagacgtgctttctgccatgtggctttgggcctagagcttgttgataattgcagcttgtggcagtggaaatatggctgaatgagcgtctaaatcgttgagaccagtgcaactttgggtgcaaggctttgtttagggatcaagccttttgccaccttgggctggtctttggcctggtgctcactgggaccccatatgtctgcgtaggagcagaactttccatggcagtaagtgtccagctctgtttctggttctttccccaactccagccccgtccagttgttctcctgattgacccgactccactccaggaaggccatctgaccctgtgacaggcatagctcataaactacccctccctgggatcccgctcctcttcagcctccttccccatgaagctgggctaactttctaagtcattttgcttagaaattcagtgtggcccataccctttgtcctcccagcctggcatccaggcagggacaccctcacaccaccagccccagggagcttccctgctataaacacagacccccttgtctttgcctctgatttttacacagtgtagagtggccagcagtgaacaggttgaggatgtgcgggtagatagataactttgggtctggtttgtgtctgtgttcatgtttgtttaagggatatgtgtgactgtgggtggggacgtgtgcttgtggggcacaggtggcggcccctgctggagcccggctgggcgcagcgcctatgtaggacgggtgttctcagtgacctacctcccaggctcctctgcacctgcaaaggaacaggagtgagtcgtgactgacaggggtggttgagactagactaggtagagtagttaccaggagatgtgaatgtgcgtcaggtgatggatgggtttgtcaagggaatcgttaccgttttataccaaaggtattaacatgggcagcctttgacacatgtattccaaaaacgagtttatattttcaaacggtttttacagcttagactttgtacttactgccctgcctgtgacagttgtatgccttcattttgtatccaacagcaaagtctacaataaaactttaaaacaatcatgactgaatgtcaaaatcgtgtattgggcagatgctttttaaactgtcgtgtgagaaacttttatattaggccatttggattttattaagtgctaaggaaagagggcttacaaaatgtttcgtaaatattttatactgtttaagtgttaaacaccaaccctgtctttcttttgggttgagcttttttagaaagtcgaagtgaatgttggccaggaaaatggaaaagccattgtataaatttttttttgaggcggagtcttgctctattggccaggctggagtgtagtggcaccatctccacttaccacaacttgtgcctcctgggttcaagcgattctgctgcctcagcctcccgagtagctgggattgcaggtacccatcagcccatgcccagctaattttgtatttttagtagagatggggtttcaccatgttggccaggctggtcttgaactcctgaccctgtgatccgaccaccttggcctcccaaagtgctgggattacaggtgtgagtcaccacacctggctgcatagtgttttaaatgtttgtgtgaagaatgagtttgtggaacaatttgatttgctgtggcctctatgcctaatgagctagtgtttctggcagctctctctacccaactttgcacttgtagttttgagtctttgtctctctggaatatgaacaggtttataaaacattccatggtgaacaattctgtcggctgcattatagccatgagtgaatagacagcattggctggtccaagctctgttattgagtatacaaggaactgatttttcttatgttagcactaagggcaaaaaccaatatttataatgtaagcactatccaggtaaaacactggcccaagatttggtaaagagatttcattgcaatgtaataactacagttttttacaaattggaacagctttggtgtgtcgtaatcaagggttttttttgtttgtttgtttcaaataagccatctgattgtggtgactggggcccatgtccaagacaattcctggcatattctgtcaccctcccgtggggcgatcactgtgtggggaccccattccccagttaaagtgtgtctctgtaccttacaacagcgattcaggacccaagtgtgaacaacactcagcccgccctctggagcgtgtgctgtctttagggccctacccaaagtcactgtaacagttaagtgtgtcattaacctttctgtctctttgcgccataaaaaaatgctcaaagttttagatgtagccactgtatgttgtacaaacgttggcgacatgtaaaataaaagtcataaaatgc

SEQ ID NO: 222458 - DNA, 2467 bp, Artificial Sequence
  derived and/or modified sequence
gctggcgtgagctgggtgtttcctgcctctctcagtccgggtttggagactcctgcgtcctccgacttttcatggaagagatgtcaggagaaagtgtggtgagctcagcggtgccagcggctgctacccgcaccacttccttcaagggcacgagccccagctccaaatacgtgaagctgaatgtgggtggagccctctactataccaccatgcagacgctgaccaagcaggacaccatgctgaaggccatgttcagcgggcgcatggaagtgctcaccgacagtgaagaacaaagatacttatgagcctttctgcaaggtccctgtgatcacctcatccaaggaagaacaaaaacttatagcgacttcaaataagccagccgtgaagttgctctacaacagaagtaacaacaaatactcatataccagcaattctgacgacaatatgttgaaaaacattgaactgtttgataagctgtctctgcgctttaacggaagggtcctgttcataaaggatgttattggggatgaaatctgctgctggtccttttatggtcagggccggaagattgctgaagtctgttgtacctccatcgtctatgccactgagaagaaacagaccaaggtggagtttcccgaagcccggatttatgaggagaccctgaacattttgctgtatgaggcccaggatggccggggacctgacaatgcgctcctggaggccacaggcggggcggcggggcgctcccaccacctggacgaggacgaggagcgggagcggatcgagcgcgtgcggaggatccacatcaagcgccctgatgaccgggcccacctccaccagtgagcaggcaagagaccgagccgccctcctctcaccgcccccactccctgccgtgctacacccagatcctgtgcaggctgccgggccccttctgcttcccttggagcctggagatacttttgtaacaagccagatgattattttggtattgcttgacaaggcaaattgattgtcttgacccaggcgtatgacccctgtcgttgaacaagctgtgtctaagatctctacttttcatgagaatctgagactctttggagccaggctttctcggttctcagaggaaaagtatgaatgagtgtgaagtgtatgtgagaacttttgtttgcaatatttatttttgtgggtgtcgacttcctatgtgggctttttgggtgacactcccttaagggttcagtttgacaattctgagagttgtcctgcagttggaggccaccagaggtatctgagctccctgcttcctatttcataatcctccagccccagcaggtccactcctggttcctgtgtgtttggcccgggcacaatccccactgctttgctagacgtgctttctgccatgtggctttgggcctagagcttgttgataattgcagcttgtggcagtggaaatatggctgaatgagcgtctaaatcgttgagaccagtgcaactttgggtgcaaggctttgtttagggatcaagccttttgccaccttgggctggtctttggcctggtgctcactgggaccccatatgtctgcgtaggagcagaactttccatggcagtaagtgtccagctctgtttctggttctttccccaactccagccccgtccagttgttctcctgattgacccgactccactccaggaaggccatctgaccctgtgacaggcatagctcataaactacccctccctgggatcccgctcctcttcagcctccttccccatgaagctgggctaactttctaagtcattttgcttagaaattcagtgtggcccataccctttgtcctcccagcctggcatccaggcagggacaccctcacaccaccagccccagggagcttccctgctataaacacagacccccttgtctttgcctctgatttttacacagtgtagagtggccagcagtgaacaggttgaggatgtgcgggtagatagataactttgggtctggtttgtgtctgtgttcatgtttgtttaagggatatgtgtgactgtgggtggggacgtgtgcttgtggggcacaggtggcggcccctgctggagcccggctgggcgcagcgcctatgtaggacgggtgttctcagtgacctacctcccaggctcctctgcacctgcaaaggaacaggagtgagtcgtgactgacaggggtggttgagactagactaggtagagtagttaccaggagatgtgaatgtgcgtcaggtgatggatgggtttgtcaagggaatcgttaccgttttataccaaaggtattaacatgggcagcctttgacacatgtattccaaaaacgagtttatattttcaaacggtttttacagcttagactttgtacttactgccctgcctgtgacagttgtatgccttcattttgtatccaacagcaaagtctacaataaaactttaaaacaatcatg

SEQ ID NO: 222459 - DNA, 1030 bp, Artificial Sequence
  derived and/or modified sequence
ttagatattgcaggagtcccttctggagtggttatggcaacttctactccctgcagaagtctggatttttgccaacccttggcactgtccaaccttttaattattgcaaatctggctggatcctcattgaccgctgtgggaagcactttggtacgatactcaactaccttcgagacggggcggtgcctttacccgagagccgccgggagatcgaggagctgctagcagaagccaagtactacctagtccaaggcctggtggaagagtgccaggcggccctacaaaacaaagatacttatgagcctttctgcaaggtccctgtgatcacctcatccaaggaagaacaaaaacttatagcgacttcaaataagccagccgtgaagttgctctacaacagaagtaacaacaaatactcatataccagcaattctgacgacaatatgttgaaaaacattgaactgtttgataagctgtctctgcgctttaacggaagggtcctgttcataaaggatgttattggggatgaaatctgctgctggtccttttatggtcagggccggaagattgctgaagtctgttgtacctccatcgtctatgccactgagaagaaacagaccaaggtggagtttcccgaagcccggatttatgaggagaccctgaacattttgctgtatgaggcccaggatggccggggacctgacaatgcgctcctggaggccacaggcggggcggcggggcgctcccaccacctggacgaggacgaggagcgggagcggatcgagcgcgtgcggaggatccacatcaagcgccctgatgaccgggcccacctccaccagtgagcaggcaagagaccgagccgccctcctctcaccgcccccactccctgccgtgctacacccagatcctgtgcaggctgccgggccccttctgcttcccttggagcctggagatacttttgtaacaagccagatgattattttggtattgcttgacaaggcaaattgattgtcttgacccaggcgtatgaccc

SEQ ID NO: 222460 - DNA, 5355 bp, Artificial Sequence
  derived and/or modified sequence
attctcccagtacagttcatcacagttttggttaaattcagagtttacgtcatgacgtgtaaatacggctgacagttaagccacagagtgtacagtgattattttctttcttctataactttaagtttgccagagttagggattgcctcattgttttgttcacttggttttctaaatatatgttcctacttcagccccacgttctcagcggtctcatagtggtgtgttcagacacatcagaggttctgtttcatctttgtcttggagacatgcccctgggtctcgtttctgttagtctaaggttagacctccaggactgacctcctaattctttcctcttagtgtctctggctttatccttttgttctactttctcagaagttttatttttcaccttttcaacccttctatcaaaattttcatttctgcttcgtctttctaacttcaggagccttttcttgctgtccgaatgccctgctttccacagcgtgctcatcttgtttcctaggaggccgtatctgctctcaactgtctgatgattctgtttgttttctttcttctcccttcattatctgactcctcctcttttcctgtctttgttttggttttgttctcatgttaaagaggcttttcacatgtaatctgatgatgcttggctgtctgttgaaggaatgagagactctgaaagctgtttgtgcatggaaggtccttgttgtccactgggctgcattgtgggtgataaggcagactttttcagcgggacccccaactgtcagaatctgtaagccattttgggggaagcaggtggtgttcctgaagaggaatcctctactctcctcctgcctgacgggtctaggcctggccggctgcctttggggatctggaaggggaaggagctggggttgctcatcacttagtgtgatgttcacttgtccccccgttttcagaatcgcagctcagccctgtcctctaccgtgcaaaccactgcaggaagatggccctttcttctgcctgcatggggacggagatggatttggggatctttccagtgcttccgcccactggtttcagctttccccctctccttggttaacgctcacctgtgacctttctaccctcaaatttttgactttttttactggtctgctgacctcacttctcccattctttttccccttatgggtttatgcttttttttttaattcctctgcagtcatggtagtggggttttaggagcttttgattaaaacacgtttctgctgccacgtcaagggtttatttttgagtggcttcctgggctgtggaaaatgtgtcatcattgttagtacttactcagcatcctggcctatcatggtcatagccaaagagcagacttactgggaaattcaactccctgtcttcccccatctagttcactggtggtgagaatccttctctcttcccagccatgactgccccatctcccctcgccagagcctgtccagccggtcaactttaaaaatgcagtgctaggcaggcctcctaggctgaaagcatgttttgttccagcagaacaaagatacttatgagcctttctgcaaggtccctgtgatcacctcatccaaggaagaacaaaaacttatagcgacttcaaataaggtatgttggaggcacccttgtggaatttcttttgctaccagaaatgatggaggttcttctgaataacttttgaaataaaaacatgtataattgcctgagtgaggcctgataatgggttcacagtgggaagctacaggtcatcttttgtgcccctgctattgggtcatgtggtccccctctccagccagcaagctatgcttgtctgcctcttctgatgcagggcagggccccagccctatgggaagctagtagttcattgcatctgcctgccaagtaactctcttcttcttcttttaaaacaacccacagccagccgtgaagttgctctacaacagaagtaacaacaaatactcatataccaggtaaggcgtcagccgggaaagacagctccatttactaggaaaacctccactcacaccagccaggcccagctcttcttcgtaccttcagatgaggatgacccctctgtacctctctgcctggatagataagtagacagatggatacaggggtataactctgagctataattcacacatatcataaaagtcatctttctagagtgtacagttattattatattcacaatatgtggtttttatatattcacaagttgtgaggccataacgactatctaattttagaactttttcactgcctgaaaagaaaccctctattcgttagcagtcactccccattttccctcaaccattgcttccccaaccccacagccctaggtaaccactaatctgttttctgtcttgatgaatttgcctgttctggacatttttatgtgaatggaattgcataatatatggccttttgtgaccagattccttcattcagcataatgagattacctaagaggttttcaaggtttatccatgttgtagcatgaatcaatacttcattcctttttatggcagaataatattccacagtgtagaccacattttctttacccattcatcagttgatggacatttgggttgtttgcactttttggctattgtgtgtaatgctgttatgaacattcatgcaaagtctctatgtggacttacgttttcatttctctgggaacagaattgctgggtcatgtggtaattctatgtttaatcattcgaggacctgccaaactgttttctaaagtggctgcaccattttacattcccaccagcaatatatgcaggtttctagaatgccatttggcccttgaaaacatgtggctctaactcaggaacttgagggatgcagggaggatttaatcaggttactcaagatctttaaaaagacctaggatatagagtctcccttgggcagtgccattctgctcctcttggggctcggtgaggtgctctcctccacctggtgcctgtgcccagaggctgtcactcaagcacaatggttaggagcactcaggcttaggggccagggctgtcttttggggggcgtgtctgccatttattaggttcagccttgagcaattacctaatttctctgatcctcactttccttcttgagtgatggagattggagtgcctttgtcatgggattattgtgaggttgaaatgaggtagtggagaaagtgggctcagtagggccctgcgtgtagaagggcccagcaaatgatggcagtttttaccagcttgtggtcaccgtatcaaatgctcttttgcagcaattctgacgacaatatgttgaaaaacattgaactgtttgataagctgtctctgcgctttaacggaagggtcctgttcataaaggatgttattggggatgaaatctgctgctggtccttttatggtcagggccggaagattgctgaagtctgttgtacctccatcgtctatgccactgagaagaaacagaccaaggtggagtttcccgaagcccggatttatgaggagaccctgaacattttgctgtatgaggcccaggatggccggggacctgacaatgcgctcctggaggccacaggcggggcggcggggcgctcccaccacctggacgaggacgaggagcgggagcggatcgagcgcgtgcggaggatccacatcaagcgccctgatgaccgggcccacctccaccagtgagcaggcaagagaccgagccgccctcctctcaccgcccccactccctgccgtgctacacccagatcctgtgcaggctgccgggccccttctgcttcccttggagcctggagatacttttgtaacaagccagatgattattttggtattgcttgacaaggcaaattgattgtcttgacccaggcgtatgacccctgtcgttgaacaagctgtgtctaagatctctacttttcatgagaatctgagactctttggagccaggctttctcggttctcagaggaaaagtatgaatgagtgtgaagtgtatgtgagaacttttgtttgcaatatttatttttgtgggtgtcgacttcctatgtgggctttttgggtgacactcccttaagggttcagtttgacaattctgagagttgtcctgcagttggaggccaccagaggtatctgagctccctgcttcctatttcataatcctccagccccagcaggtccactcctggttcctgtgtgtttggcccgggcacaatccccactgctttgctagacgtgctttctgccatgtggctttgggcctagagcttgttgataattgcagcttgtggcagtggaaatatggctgaatgagcgtctaaatcgttgagaccagtgcaactttgggtgcaaggctttgtttagggatcaagccttttgccaccttgggctggtctttggcctggtgctcactgggaccccatatgtctgcgtaggagcagaactttccatggcagtaagtgtccagctctgtttctggttctttccccaactccagccccgtccagttgttctcctgattgacccgactccactccaggaaggccatctgaccctgtgacaggcatagctcataaactacccctccctgggatcccgctcctcttcagcctccttccccatgaagctgggctaactttctaagtcattttgcttagaaattcagtgtggcccataccctttgtcctcccagcctggcatccaggcagggacaccctcacaccaccagccccagggagcttccctgctataaacacagacccccttgtctttgcctctgatttttacacagtgtagagtggccagcagtgaacaggttgaggatgtgcgggtagatagataactttgggtctggtttgtgtctgtgttcatgtttgtttaagggatatgtgtgactgtgggtggggacgtgtgcttgtggggcacaggtggcggcccctgctggagcccggctgggcgcagcgcctatgtaggacgggtgttctcagtgacctacctcccaggctcctctgcacctgcaaaggaacaggagtgagtcgtgactgacaggggtggttgagactagactaggtagagtagttaccaggagatgtgaatgtgcgtcaggtgatggatgggtttgtcaagggaatcgttaccgttttataccaaaggtattaacatgggcagcctttgacacatgtattccaaaaacgagtttatattttcaaacggtttttacagcttagactttgtacttactgccctgcctgtgacagttgtatgccttcattttgtatccaacagcaaagtctacaataaaactttaaaacaatcatg

SEQ ID NO: 222461 - DNA, 399 bp, Artificial Sequence
  derived and/or modified sequence
atgcttaaaaacatcgagctgtttgataaactgtctctccgcttcaacggccgagttctgttcataaaggacgtgataggggatgagatctgctgttggagcttttatggacagggaaggaaaattgcagaagtttgctgcacgtcaattgtctacgcaacggagaagaagcagacgaaagtagaattccctgaggctagaatctatgaggaaaccctgaacatcctcttgtacgaggcccaagatggcagagggcctgataatgcccttctggaagccacaggcggtgccgctggacgttcccaccaccttgacgaagacgaagaaagggaaaggatcgagcgggtgcgacggatccacattaaacggccagacgaccgcgctcatctccaccagtag

SEQ ID NO: 222462 - DNA, 840 bp, Artificial Sequence
  derived and/or modified sequence
tgaagatactgtagatctcccttctggagcggctacgggaatttttactccctccagaaatctgggttcttacctaccctgggaacagtacaacccttcaactactgtaagtcaggatggattctgatagaccggtgtgggaagcacttcggcacaatcttaaactatctaagagacggggctgtgccgttgcctgaatcccggagggaaattgaagagctgctggcagaagctaagtactatttggttcaaggacttgtcgaggaatgtcaggcagcactgcaaaacaaggatacctacgagcccttctgcaaggttccggtgatcacttccagcaaagaagagcagaaattaatcgcaaccagcaataagcccgcagtgaagcttctgtacaatcgatccaataacaaatacagctacacctccaatagtgatgacaatatgctgaagaatatcgaactgttcgacaaactgtctttaagattcaatggtcgggtactcttcatcaaagacgtgatcggtgatgaaatttgttgttggtccttctatggccagggcaggaagatcgccgaagtatgctgtacaagtatagtgtacgcaactgaaaaaaaacagacgaaggtggaattcccggaggctagaatctacgaagagaccttgaacattctgctctacgaagcccaagatggccgagggccagataacgcactgctggaggcaaccggtggcgcagccggaaggagccatcatctcgatgaagatgaggagcgggagagaatcgagcgagtaaggcggatccacatcaagagacccgacgatcgagcccatcttcatcagtag

SEQ ID NO: 222463 - DNA, 468 bp, Artificial Sequence
  derived and/or modified sequence
atgatggccgtattcacaagcctgtggagcccttaccagatgctcttttgcagcaattctgatgataatatgcttaagaatatcgaactgtttgacaagctctccttgaggttcaacgggagggttctttttatcaaagatgtgattggagatgaaatttgttgttggtctttctacggacagggcaggaaaattgccgaagtctgttgcaccagcatcgtctacgccacagaaaagaagcagacaaaggtggagttccccgaggctagaatttacgaagaaacacttaatatcttgctttatgaggcccaagatggccgagggcctgacaatgctttgctcgaggcgactggcggtgcagctggcaggtcccaccacctcgacgaagatgaagagagggagaggattgaacgagtgcgtagaattcacatcaagagaccagatgaccgagcccacttgcaccagtag

SEQ ID NO: 222464 - DNA, 942 bp, Artificial Sequence
  derived and/or modified sequence
atggaggagatgagcggcgagagcgtggtgagcagcgccgtgcccgccgccgccaccagaaccaccagcttcaagggcaccagccccagcagcaagtacgtgaagctgaacgtgggcggcgccctgtactacaccaccatgcagaccctgaccaagcaggacaccatgctgaaggccatgttcagcggcagaatggaggtgctgaccgacagcgagggctggatcctgatcgacagatgcggcaagcacttcggcaccatcctgaactacctgagagacggcgccgtgcccctgcccgagagcagaagagagatcgaggagctgctggccgaggccaagtactacctggtgcagggcctggtggaggagtgccaggccgccctgcagaacaaggacacctacgagcccttctgcaaggtgcccgtgatcaccagcagcaaggaggagcagaagctgatcgccaccagcaacaagcccgccgtgaagctgctgtacaacagaagcaacaacaagtacagctacaccagcaacagcgacgacaacatgctgaagaacatcgagctgttcgacaagctgagcctgagattcaacggcagagtgctgttcatcaaggacgtgatcggcgacgagatctgctgctggagcttctacggccagggcagaaagatcgccgaggtgtgctgcaccagcatcgtgtacgccaccgagaagaagcagaccaaggtggagttccccgaggccagaatctacgaggagaccctgaacatcctgctgtacgaggcccaggacggcagaggccccgacaacgccctgctggaggccaccggcggcgccgccggcagaagccaccacctggacgaggacgaggagagagagagaatcgagagagtgagaagaatccacatcaagagacccgacgacagagcccacctgcaccagtag

SEQ ID NO: 222465 - DNA, 399 bp, Artificial Sequence
  derived and/or modified sequence
atgctgaagaacatcgagctgttcgacaagctgagcctgagattcaacggcagagtgctgttcatcaaggacgtgatcggcgacgagatctgctgctggagcttctacggccagggcagaaagatcgccgaggtgtgctgcaccagcatcgtgtacgccaccgagaagaagcagaccaaggtggagttccccgaggccagaatctacgaggagaccctgaacatcctgctgtacgaggcccaggacggcagaggccccgacaacgccctgctggaggccaccggcggcgccgccggcagaagccaccacctggacgaggacgaggagagagagagaatcgagagagtgagaagaatccacatcaagagacccgacgacagagcccacctgcaccagtag

SEQ ID NO: 222466 - DNA, 840 bp, Artificial Sequence
  derived and/or modified sequence
tgaagatactgcagaagccccttctggagcggctacggcaacttctacagcctgcagaagagcggcttcctgcccaccctgggcaccgtgcagcccttcaactactgcaagagcggctggatcctgatcgacagatgcggcaagcacttcggcaccatcctgaactacctgagagacggcgccgtgcccctgcccgagagcagaagagagatcgaggagctgctggccgaggccaagtactacctggtgcagggcctggtggaggagtgccaggccgccctgcagaacaaggacacctacgagcccttctgcaaggtgcccgtgatcaccagcagcaaggaggagcagaagctgatcgccaccagcaacaagcccgccgtgaagctgctgtacaacagaagcaacaacaagtacagctacaccagcaacagcgacgacaacatgctgaagaacatcgagctgttcgacaagctgagcctgagattcaacggcagagtgctgttcatcaaggacgtgatcggcgacgagatctgctgctggagcttctacggccagggcagaaagatcgccgaggtgtgctgcaccagcatcgtgtacgccaccgagaagaagcagaccaaggtggagttccccgaggccagaatctacgaggagaccctgaacatcctgctgtacgaggcccaggacggcagaggccccgacaacgccctgctggaggccaccggcggcgccgccggcagaagccaccacctggacgaggacgaggagagagagagaatcgagagagtgagaagaatccacatcaagagacccgacgacagagcccacctgcaccagtag

SEQ ID NO: 222467 - DNA, 468 bp, Artificial Sequence
  derived and/or modified sequence
atgatggccgtgttcaccagcctgtggagcccctaccagatgctgttctgcagcaacagcgacgacaacatgctgaagaacatcgagctgttcgacaagctgagcctgagattcaacggcagagtgctgttcatcaaggacgtgatcggcgacgagatctgctgctggagcttctacggccagggcagaaagatcgccgaggtgtgctgcaccagcatcgtgtacgccaccgagaagaagcagaccaaggtggagttccccgaggccagaatctacgaggagaccctgaacatcctgctgtacgaggcccaggacggcagaggccccgacaacgccctgctggaggccaccggcggcgccgccggcagaagccaccacctggacgaggacgaggagagagagagaatcgagagagtgagaagaatccacatcaagagacccgacgacagagcccacctgcaccagtag

SEQ ID NO: 222468 - protein, 569 aa, Artificial Sequence
  derived and/or modified sequence
MDAGSSRSLENAVNRIYHDQLVPKINTSKKMSTLAHPPNILEMSQEIKKNCGGKQVEITLERTKMTKGIKEKQSNDLEKAAFKRKAEGEEKPTRKKQAKITELDNQLITMPLPHIPLKNIMDVEMKLVYIDEMGVRYEFVESFMSTGSQPTCQAAEIVDPLSVHNFSFLPQIDKWLQVALKDASSCYRQKKYALAAGQFRTALELCSKGAVLGEPFDAPAEDIASVASFIETKLVTCYLRMRKPDLALNHAHRSIVLNPAYFRNHLRQATVFRCLERYSEAARSAMIADYMFWLGGGREESISKLIKLYWQAMIEEAITRAESFSVMYTPFATKIRADKIEKVKDAFTKTHPAYAEYMYTDLQALHMLPQTVDWSSFPPQQYLLTLGFKNKDDGKFLEKISSRKLPIFTEHKTPFGLTREDTVRQMETMGKRILPILDFIRSTQLNGSFPASSGVMEKLQYASLLSQLQRVKEQSQVINQAMAELATIPYLQDISQQEAELLQSLMADAMDTLEGRRNNNERVWNMIQKVGQIEDFLYQLEDSFLKTKKLRTARRQKTKMKRLQTVQQR

SEQ ID NO: 222469 - DNA, 1710 bp, Artificial Sequence
  derived and/or modified sequence
atggacgccggcagcagcagaagcctggagaacgccgtgaacagaatctaccacgaccagctggtgcccaagatcaacaccagcaagaagatgagcaccctggcccacccccccaacatcctggagatgagccaggagatcaagaagaactgcggcggcaagcaggtggagatcaccctggagagaaccaagatgaccaagggcatcaaggagaagcagagcaacgacctggagaaggccgccttcaagagaaaggccgagggcgaggagaagcccaccagaaagaagcaggccaagatcaccgagctggacaaccagctgatcaccatgcccctgccccacatccccctgaagaacatcatggacgtggagatgaagctggtgtacatcgacgagatgggcgtgagatacgagttcgtggagagcttcatgagcaccggcagccagcccacctgccaggccgccgagatcgtggaccccctgagcgtgcacaacttcagcttcctgccccagatcgacaagtggctgcaggtggccctgaaggacgccagcagctgctacagacagaagaagtacgccctggccgccggccagttcagaaccgccctggagctgtgcagcaagggcgccgtgctgggcgagcccttcgacgcccccgccgaggacatcgccagcgtggccagcttcatcgagaccaagctggtgacctgctacctgagaatgagaaagcccgacctggccctgaaccacgcccacagaagcatcgtgctgaaccccgcctacttcagaaaccacctgagacaggccaccgtgttcagatgcctggagagatacagcgaggccgccagaagcgccatgatcgccgactacatgttctggctgggcggcggcagagaggagagcatcagcaagctgatcaagctgtactggcaggccatgatcgaggaggccatcaccagagccgagagcttcagcgtgatgtacacccccttcgccaccaagatcagagccgacaagatcgagaaggtgaaggacgccttcaccaagacccaccccgcctacgccgagtacatgtacaccgacctgcaggccctgcacatgctgccccagaccgtggactggagcagcttccccccccagcagtacctgctgaccctgggcttcaagaacaaggacgacggcaagttcctggagaagatcagcagcagaaagctgcccatcttcaccgagcacaagacccccttcggcctgaccagagaggacaccgtgagacagatggagaccatgggcaagagaatcctgcccatcctggacttcatcagaagcacccagctgaacggcagcttccccgccagcagcggcgtgatggagaagctgcagtacgccagcctgctgagccagctgcagagagtgaaggagcagagccaggtgatcaaccaggccatggccgagctggccaccatcccctacctgcaggacatcagccagcaggaggccgagctgctgcagagcctgatggccgacgccatggacaccctggagggcagaagaaacaacaacgagagagtgtggaacatgatccagaaggtgggccagatcgaggacttcctgtaccagctggaggacagcttcctgaagaccaagaagctgagaaccgccagaagacagaagaccaagatgaagagactgcagaccgtgcagcagagatag

SEQ ID NO: 222470 - DNA, 1710 bp, Artificial Sequence
  derived and/or modified sequence
atggatgcaggcagctcgcgtagtctggaaaatgcagtgaacagaatctaccatgaccagctagtgcccaaaatcaacacgtcaaagaagatgagcacactggctcatccgcctaacattcttgagatgagccaggaaatcaaaaagaattgcggaggaaagcaagttgaaattactttggagaggaccaaaatgacgaagggcatcaaagagaaacagtccaatgatttggaaaaagccgctttcaaaagaaaggcagaaggagaagaaaaacctaccagaaagaagcaagcaaagatcaccgagctcgacaaccagctcattaccatgcccctgcctcatattcctctcaagaacatcatggatgtggagatgaagctagtgtatatcgacgaaatgggcgtacgatacgagttcgtagagtccttcatgagcacaggaagccagcctacttgccaggctgctgagatcgtggatccactgtccgtacataacttcagttttctccctcaaattgacaaatggttacaggtcgcactgaaagacgccagttcttgctaccggcagaaaaaatacgccttggctgcaggccagtttaggaccgcactcgaactgtgttctaaaggcgctgtgctaggcgagccctttgacgcccctgccgaggatattgcttcggtggcaagctttatcgagaccaaactcgttacatgttacctccgcatgcgtaagccggatcttgctttgaatcacgcacacagaagtattgttctgaacccggcttacttccgtaatcaccttaggcaggctaccgtttttcgttgcctagaacggtactctgaagctgcaaggtccgccatgatagctgactatatgttttggctcggaggcggtcgagaggaaagtatttcgaaactcatcaaattatattggcaggctatgattgaagaggccattaccagagccgagtctttttccgtaatgtacacccctttcgcaaccaaaattcgcgcggataagatcgagaaagtcaaagatgccttcactaaaacccaccctgcctacgccgaatacatgtatactgacctgcaggctctgcatatgttaccacagacagtggattggtcctccttcccacctcaacagtatctgctgacgctgggcttcaaaaataaagatgacgggaagtttttggagaagatatcgagtcgaaagttgcctatctttaccgaacataaaacaccctttgggctgacccgtgaggacactgttagacagatggaaacgatggggaagagaatcctccctatcctggactttatcaggagcactcagttaaacggctccttccccgcctcctcaggcgtgatggagaagctgcaatatgccagcttgctttcacagttgcagcgagttaaggagcaaagtcaggtgatcaaccaagccatggctgagctggctaccataccatacctgcaggacatctcccagcaggaggctgaattactacaatccctcatggctgacgctatggatacactggagggccgaaggaataataatgagcgtgtatggaatatgattcagaaagtgggacagatcgaggacttcctttatcagttagaggatagctttctgaagacaaaaaaactgaggaccgctcggcggcaaaaaactaagatgaaaaggttgcagacagtgcaacaaagatag

SEQ ID NO: 222471 - DNA, 1710 bp, Artificial Sequence
  derived and/or modified sequence
atggatgctggcagcagccgcagcctggagaatgctgtgaaccgcatctaccatgaccagctggtgcccaagatcaacaccagcaagaagatgagcaccctggcccacccccccaacatcctggagatgagccaggagatcaagaagaactgtggcggcaagcaggtggagatcaccctggagaggaccaagatgaccaagggcatcaaggagaagcagagcaatgacctggagaaggccgccttcaagaggaaggccgagggggaggagaagcccaccaggaagaagcaggccaagatcacagagctggacaaccagctgatcaccatgcccctgccccacatccccctgaagaacatcatggatgtggagatgaagctggtgtacattgatgagatgggcgtgcgctatgaatttgtggagagcttcatgagcacaggcagccagcccacctgccaggccgctgagatcgtggaccccctgtctgtgcacaacttctccttcctgccccagattgacaagtggctgcaggtggccctgaaggatgccagcagctgctaccggcagaagaagtatgccctggccgccggccagttcagaacagccctggagctgtgcagcaaaggagctgtgctgggggagccctttgatgccccagcagaagatattgcctctgtggccagcttcatcgagaccaagctggtgacctgctacctgaggatgaggaagccagacctggccctgaaccacgcccacaggagcatcgtgctgaacccagcctacttcaggaaccacctgcggcaggccaccgtcttccgctgcctggagcgctacagcgaggccgcccggagcgccatgattgctgactacatgttctggctgggcggcggccgggaggagagcatcagcaagctgatcaagctgtactggcaggccatgattgaggaggccatcaccagggctgagagcttctctgtgatgtacaccccatttgccaccaagatccgggctgacaagattgagaaggtgaaggatgccttcaccaagacccacccagcctatgcagagtacatgtacacagacctgcaggccctgcacatgctgccccagacagtggactggagcagcttccccccccagcagtacctgctgaccctgggcttcaagaacaaggatgatggcaagttcctggagaagatcagcagcaggaagctgcccatcttcacagagcacaagaccccatttggcctgacccgggaggacacagtgcggcagatggagaccatgggcaagaggatcctgcccatcctggacttcatccgcagcacccagctgaatggcagcttccctgccagcagtggagtgatggagaagctgcagtatgccagcctgctgagccagctgcagagggtgaaggagcagagccaggtgatcaaccaggccatggccgagctggccaccatcccctacctgcaggacatcagccagcaggaggccgagctgctgcagagcctgatggctgatgccatggacaccctggagggcagaagaaacaacaatgaaagagtgtggaacatgatccagaaggtgggccagatcgaggacttcctgtaccagctggaggacagcttcctgaagaccaagaagctgaggacagcccggcggcagaagaccaagatgaagaggctgcagacagtgcagcagaggtag

SEQ ID NO: 222472 - DNA, 1710 bp, Artificial Sequence
  derived and/or modified sequence
atggacgccggcagcagccggagcctggagaacgccgtgaaccggatctaccacgatcaattggtgcccaagatcaatacttcaaagaagatgagcacgcttgcccaccctcccaatatccttgaaatgtcccaggagatcaagaagaattgcggaggaaagcaggtggaaataaccctggagcggacaaaaatgaccaagggtatcaaagaaaagcagtctaacgaccttgaaaaggccgccttcaaaagaaaggcagagggcgaagagaagcctacccgcaagaaacaggctaaaatcaccgaactggacaaccaactcatcactatgccacttcctcatatcccactgaaaaatatcatggatgtggaaatgaaactggtatatattgatgagatgggcgtgcgttacgagtttgtcgaaagtttcatgtccactggcagtcagcccacatgtcaggctgccgaaattgttgatcccttgtctgtccataatttctcattcctgccccagatagacaagtggttacaggttgccttgaaggacgcatccagctgctaccggcagaagaagtacgctctcgctgcagggcaattcagaactgctcttgaactgtgcagcaaaggggccgtgttgggcgagcctttcgatgcccctgccgaggacattgcgtctgtcgcatcctttatagaaactaagcttgtgacttgttatctccggatgcggaagcctgacttggccttgaaccacgcccacaggagcatagtgctgaatcctgcatactttaggaaccacctacggcaggcgacggtgttccggtgtctggagcggtactccgaggccgctcggtctgcaatgatcgccgactatatgttttggctgggtgggggccgcgaagaatctatttctaaattaattaaattgtattggcaggcaatgatcgaggaggccattactagagctgaatcgttttctgtcatgtatacgcccttcgcaactaagatcagagctgataaaatcgagaaggtgaaagatgctttcactaagacccacccagcctacgctgaatacatgtataccgatcttcaggccctccacatgctcccacagactgtcgactggtcgtcctttccacctcaacagtatctgctcaccctgggattcaaaaataaagacgacggcaaattcctagagaaaataagttcgcggaagctgccaatctttactgagcataaaaccccctttggcttgacaagagaggatactgttcgacaaatggagaccatgggtaaacgaatcctgccaatcctggatttcattaggtctacacagctcaacgggtcttttcctgcttcgtcaggagtgatggagaaacttcagtacgcctctcttctttcacagctacaacgagtgaaagagcaatctcaagtgattaaccaggctatggccgagctagcgacaatcccatatttgcaggatatttctcaacaagaggccgagctgctccagagtttgatggcagacgcgatggatacgctagaggggcggaggaataacaatgagcgtgtgtggaacatgatccaaaaggtaggacagatcgaagactttctgtaccagctcgaagatagttttcttaaaacaaaaaagctccggacggccaggcgtcagaaaactaagatgaagcggctgcagaccgtccagcaaaggtag

SEQ ID NO: 222473 - DNA, 1710 bp, Artificial Sequence
  derived and/or modified sequence
atggatgctggtagctcccggtccttagagaatgccgtaaaccgcatttaccatgatcaactggttccaaagatcaacactagcaagaaaatgtcaacgctcgcacacccccctaacatcctcgaaatgagccaggagatcaagaagaactgcggcggaaaacaggtggaaatcactctggagcggactaagatgacaaaaggcatcaaggagaaacagtccaacgacctcgaaaaagcagcctttaagcggaaggcagaaggagaggagaaacctacacgtaaaaagcaagctaagatcaccgagctggataaccagcttatcacaatgccgctgcctcacattcccttgaagaatataatggatgttgagatgaaactggtttacattgacgaaatgggtgtcaggtatgaatttgtagagtctttcatgtctactggctcacaaccaacttgccaggctgccgagattgtggacccattgagcgtccacaacttttcatttctcccacaaatcgacaagtggctgcaggtggcccttaaagacgctagctcatgctaccggcagaagaagtatgccctcgcagcgggtcaatttagaaccgcactggaactctgttctaaaggagccgtcctgggcgagccttttgatgcgccagccgaggatattgcctccgttgcaagttttatcgaaactaagctggtgacctgttacttgaggatgcgtaagcccgatctggccttgaaccacgctcaccgcagtattgttctgaatcccgcatactttcggaatcatctaaggcaagcgaccgtgttccgctgcttagagaggtatagtgaggccgcacgtagcgctatgatagctgattacatgttttggctgggcggtggacgcgaagagagcatctctaagctgattaagctttactggcaggctatgattgaagaggctattaccagggcagaatcctttagtgtgatgtacaccccatttgcaaccaagatacgggctgacaaaatcgagaaggtaaaggatgccttcaccaagacacatcccgcatacgcagaatatatgtacacagacttgcaagcacttcacatgctgcctcagactgtagattggtcatccttcccaccgcagcagtacctgctaaccctggggttcaagaacaaggatgatgggaaattcctggagaagatatcatcgcggaaattgcctatcttcactgaacataagaccccctttggcctgaccagggaagatacggtcagacagatggagactatggggaagcgtattcttccaattctggattttattcgatcgacacagttgaatggatcatttccagcaagttcaggagtgatggagaagcttcaatatgcctcactgctgtcccagttgcagagggtgaaggagcagagtcaggtcatcaaccaagctatggcggaacttgcaactataccctacctgcaagatatcagccaacaagaggctgaactgctacagtcgttaatggctgacgccatggatacccttgagggacgcaggaataataatgagcgtgtatggaatatgatacagaaggttggtcagatcgaagattttttatatcagttggaggactccttcttgaaaactaagaaacttagaactgctaggaggcagaagaccaagatgaaacgcttacagactgtgcagcagcggtag

SEQ ID NO: 222474 - DNA, 2106 bp, Artificial Sequence
  derived and/or modified sequence
atgggcctcgtggcacgggacgtttcaagtcctggcgtccccgcgagcaagcagcctgatcaggcctcgcagtgggacgttgggaagccggtgttggcagatgctgtggctgggaggagtccagagcttcgccctgtccccgcggggctgagccacaactgcttaggagttttgggcaggatcgatggatgcaggaagcagtaggagtttggagaatgcagtgaataggatctatcatgatcagcttgttccaaagataaacacaagcaagaaaatgtccaccttagcgcacccacctaacatcctggaaatgtcacaagagattaagaaaaactgtggaggtaaacaggtagaaatcacacttgaaagaacaaaaatgacaaagggcatcaaagaaaaacaaagcaatgatttagagaaagcagcctttaaacggaaggcagaaggtgaagaaaagccaactagaaagaaacaggcaaagataacagaacttgacaatcagttaatcaccatgcctctgcctcacatccccttaaagaacataatggatgtggaaatgaagttggtctacattgatgaaatgggtgttcgctatgagtttgtagagtccttcatgtctactgggagtcagccaacatgccaagctgctgaaatagtagaccctttgagtgtacataatttcagctttctgcctcagattgacaaatggcttcaggtagccttaaaggatgccagctcttgctatagacaaaagaaatacgccttggcagcaggacagttcagaacagcacttgagctttgcagcaaaggagcagttctgggagaaccatttgatgcacctgctgaagatatagcaagcgtggcaagtttcattgagacaaagcttgttacctgttatctacggatgaggaaaccagatcttgccctgaatcatgcacacaggagcattgttttaaacccagcctatttccggaatcatcttcgtcaagcaacagtgtttagatgtctggagaggtattcagaggctgcccggagtgccatgattgctgactacatgttctggcttggtggaggaagggaagagagcataagcaagctcatcaaactgtattggcaggccatgattgaggaagccatcaccagagctgaatctttctcggttatgtacacaccatttgcgacaaaaataagagctgataaaatagaaaaagtaaaagatgctttcacaaaaactcatcctgcatatgcagagtatatgtacacagatcttcaagcactccacatgttgcctcagacagttgactggtcatcttttcctccccaacaatatctcttgactcttgggttcaaaaacaaagatgatggaaaatttttggaaaaaatatcaagcaggaagctgccgatattcacagagcataaaacacctttcggtctgaccagagaagatacagtgaggcaaatggagacaatggggaagcgaatcttgccaatattggattttattagaagcacccaattgaatgggagttttcctgcatcctcaggtgtgatggagaagttgcaatatgccagcctcctcagccagctgcagagagtaaaggagcagtcccaggtgattaatcaagcaatggcagagctagcaaccattccctacctacaggacatcagtcaacaggaggcagaattgctgcagtcactaatggcagatgctatggacacccttgaaggaagaagaaacaataatgaacgtgtgtggaatatgatccaaaaggttggacaaattgaagattttctataccaattagaggacagtttcttaaaaactaaaaaactgagaactgctcgaaggcaaaaaacaaaaatgaagcgacttcaaactgttcagcaaaggtagtcattagggagcaggcactaccactaagatatcccagaagaagaggcaagggcatccactccaatgcccacctagtactgtgaagctggataacaaaagcttgtcaccaaaagaaagaggtggtattcccctcagttcatctttaccaaagacactctatgtttcattaatctcaactggcagcaataaatattctcagcaagtttgacttg

SEQ ID NO: 222475 - protein, 433 aa, Artificial Sequence
  derived and/or modified sequence
MALRVTRNSKINAENKAKINMAGAKRVPTAPAATSKPGLRPRTALGDIGNKVSEQLQAKMPMKKEAKPSATGKVIDKKLPKPLEKVPMLVPVPVSEPVPEPEPEPEPEPVKEEKLSPEPILVDTASPSPMETSGCAPAEEDLCQAFSDVILAVNDVDAEDGADPNLCSEYVKDIYAYLRQLEEEQAVRPKYLLGREVTGNMRAILIDWLVQVQMKFRLLQETMYMTVSIIDRFMQNNCVPKKMLQLVGVTAMFIASKYEEMYPPEIGDFAFVTDNTYTKHQIRQMEMKILRALNFGLGRPLPLHFLRRASKIGEVDVEQHTLAKYLMELTMLDYDMVHFPPSQIAAGAFCLALKILDNGEWTPTLQHYLSYTEESLLPVMQHLAKNVVMVNQGLTKHMTVKNKYATSKHAKISTLPQLNSALVQDLAKAVAKV

SEQ ID NO: 222476 - protein, 396 aa, Artificial Sequence
  derived and/or modified sequence
MALRVTRNSKINAENKAKINMAGAKRVPTAPAATSKPGLRPRTALGDIGNKVSEQLQAKMPMKKEAKPSATGKVIDKKLPKPLEKVPMLVPVPVSEPVPEPEPEPEPEPVKEEKLSPEPILVDTASPSPMETSGCAPAEEDLCQAFSDVILAVNDVDAEDGADPNLCSEYVKDIYAYLRQLEEEQAVRPKYLLGREVTGNMRAILIDWLVQVQMKFRLLQETMYMTVSIIDRFMQNNCVPKKMLQLVGVTAMFIASKYEEMYPPEIGDFAFVTDNTYTKHQIRQMEMKILRALNFGLGRPLPLHFLRRASKIGEVDVEQHTLAKYLMELTMLDYDMVHFPPSQIAAGAFCLALKILDNGEWTVKNKYATSKHAKISTLPQLNSALVQDLAKAVAKV

SEQ ID NO: 222477 - protein, 401 aa, Artificial Sequence
  derived and/or modified sequence
MALRVTRNSKINAENKAKINMAGAKRVPTAPAATSKPGLRPRTALGDIGNKVSEQLQAKMPMKKEAKPSATGKVIDKKLPKPLEKVPMLVPVPVSEPVPEPEPEPEPEPVKEEKLSPEPILVDTASPSPMETSGCAPAEEDLCQAFSDVILAVNDVDAEDGADPNLCSEYVKDIYAYLRQLEEEQAVRPKYLLGREVTGNMRAILIDWLVQVQMKFRLLQETMYMTVSIIDRFMQNNCVPKKMLQLVGVTAMFIASKYEEMYPPEIGDFAFVTDNTYTKHQIRQMEMKILRALNFGLGRPLPLHFLRRASKIGEVDVEQHTLAKYLMELTMLDYDMVHFPPSQIAAGAFCLALKILDNGEWTPTLQHYLSYTEESLLPVMQHLAKNVVMVNQGLTKHMVSQ

SEQ ID NO: 222478 - DNA, 1302 bp, Artificial Sequence
  derived and/or modified sequence
atggccctgagagtgaccagaaacagcaagatcaacgccgagaacaaggccaagatcaacatggccggcgccaagagagtgcccaccgcccccgccgccaccagcaagcccggcctgagacccagaaccgccctgggcgacatcggcaacaaggtgagcgagcagctgcaggccaagatgcccatgaagaaggaggccaagcccagcgccaccggcaaggtgatcgacaagaagctgcccaagcccctggagaaggtgcccatgctggtgcccgtgcccgtgagcgagcccgtgcccgagcccgagcccgagcccgagcccgagcccgtgaaggaggagaagctgagccccgagcccatcctggtggacaccgccagccccagccccatggagaccagcggctgcgcccccgccgaggaggacctgtgccaggccttcagcgacgtgatcctggccgtgaacgacgtggacgccgaggacggcgccgaccccaacctgtgcagcgagtacgtgaaggacatctacgcctacctgagacagctggaggaggagcaggccgtgagacccaagtacctgctgggcagagaggtgaccggcaacatgagagccatcctgatcgactggctggtgcaggtgcagatgaagttcagactgctgcaggagaccatgtacatgaccgtgagcatcatcgacagattcatgcagaacaactgcgtgcccaagaagatgctgcagctggtgggcgtgaccgccatgttcatcgccagcaagtacgaggagatgtacccccccgagatcggcgacttcgccttcgtgaccgacaacacctacaccaagcaccagatcagacagatggagatgaagatcctgagagccctgaacttcggcctgggcagacccctgcccctgcacttcctgagaagagccagcaagatcggcgaggtggacgtggagcagcacaccctggccaagtacctgatggagctgaccatgctggactacgacatggtgcacttcccccccagccagatcgccgccggcgccttctgcctggccctgaagatcctggacaacggcgagtggacccccaccctgcagcactacctgagctacaccgaggagagcctgctgcccgtgatgcagcacctggccaagaacgtggtgatggtgaaccagggcctgaccaagcacatgaccgtgaagaacaagtacgccaccagcaagcacgccaagatcagcaccctgccccagctgaacagcgccctggtgcaggacctggccaaggccgtggccaaggtgtag

SEQ ID NO: 222479 - DNA, 1191 bp, Artificial Sequence
  derived and/or modified sequence
atggccctgagagtgaccagaaacagcaagatcaacgccgagaacaaggccaagatcaacatggccggcgccaagagagtgcccaccgcccccgccgccaccagcaagcccggcctgagacccagaaccgccctgggcgacatcggcaacaaggtgagcgagcagctgcaggccaagatgcccatgaagaaggaggccaagcccagcgccaccggcaaggtgatcgacaagaagctgcccaagcccctggagaaggtgcccatgctggtgcccgtgcccgtgagcgagcccgtgcccgagcccgagcccgagcccgagcccgagcccgtgaaggaggagaagctgagccccgagcccatcctggtggacaccgccagccccagccccatggagaccagcggctgcgcccccgccgaggaggacctgtgccaggccttcagcgacgtgatcctggccgtgaacgacgtggacgccgaggacggcgccgaccccaacctgtgcagcgagtacgtgaaggacatctacgcctacctgagacagctggaggaggagcaggccgtgagacccaagtacctgctgggcagagaggtgaccggcaacatgagagccatcctgatcgactggctggtgcaggtgcagatgaagttcagactgctgcaggagaccatgtacatgaccgtgagcatcatcgacagattcatgcagaacaactgcgtgcccaagaagatgctgcagctggtgggcgtgaccgccatgttcatcgccagcaagtacgaggagatgtacccccccgagatcggcgacttcgccttcgtgaccgacaacacctacaccaagcaccagatcagacagatggagatgaagatcctgagagccctgaacttcggcctgggcagacccctgcccctgcacttcctgagaagagccagcaagatcggcgaggtggacgtggagcagcacaccctggccaagtacctgatggagctgaccatgctggactacgacatggtgcacttcccccccagccagatcgccgccggcgccttctgcctggccctgaagatcctggacaacggcgagtggaccgtgaagaacaagtacgccaccagcaagcacgccaagatcagcaccctgccccagctgaacagcgccctggtgcaggacctggccaaggccgtggccaaggtgtag

SEQ ID NO: 222480 - DNA, 1206 bp, Artificial Sequence
  derived and/or modified sequence
atggccctgagagtgaccagaaacagcaagatcaacgccgagaacaaggccaagatcaacatggccggcgccaagagagtgcccaccgcccccgccgccaccagcaagcccggcctgagacccagaaccgccctgggcgacatcggcaacaaggtgagcgagcagctgcaggccaagatgcccatgaagaaggaggccaagcccagcgccaccggcaaggtgatcgacaagaagctgcccaagcccctggagaaggtgcccatgctggtgcccgtgcccgtgagcgagcccgtgcccgagcccgagcccgagcccgagcccgagcccgtgaaggaggagaagctgagccccgagcccatcctggtggacaccgccagccccagccccatggagaccagcggctgcgcccccgccgaggaggacctgtgccaggccttcagcgacgtgatcctggccgtgaacgacgtggacgccgaggacggcgccgaccccaacctgtgcagcgagtacgtgaaggacatctacgcctacctgagacagctggaggaggagcaggccgtgagacccaagtacctgctgggcagagaggtgaccggcaacatgagagccatcctgatcgactggctggtgcaggtgcagatgaagttcagactgctgcaggagaccatgtacatgaccgtgagcatcatcgacagattcatgcagaacaactgcgtgcccaagaagatgctgcagctggtgggcgtgaccgccatgttcatcgccagcaagtacgaggagatgtacccccccgagatcggcgacttcgccttcgtgaccgacaacacctacaccaagcaccagatcagacagatggagatgaagatcctgagagccctgaacttcggcctgggcagacccctgcccctgcacttcctgagaagagccagcaagatcggcgaggtggacgtggagcagcacaccctggccaagtacctgatggagctgaccatgctggactacgacatggtgcacttcccccccagccagatcgccgccggcgccttctgcctggccctgaagatcctggacaacggcgagtggacccccaccctgcagcactacctgagctacaccgaggagagcctgctgcccgtgatgcagcacctggccaagaacgtggtgatggtgaaccagggcctgaccaagcacatggtgagccagtag

SEQ ID NO: 222481 - DNA, 2169 bp, Artificial Sequence
  derived and/or modified sequence
cgaacgccttcgcgcgatcgccctggaaacgcattctctgcgaccggcagccgccaatgggaagggagtgagtgccacgaacaggccaataaggagggagcagtgcggggtttaaatctgaggctaggctggctcttctcggcgtgctgcggcggaacggctgttggtttctgctgggtgtaggtccttggctggtcgggcctccggtgttctgcttctccccgctgagctgctgcctggtgaagaggaagccatggcgctccgagtcaccaggaactcgaaaattaatgctgaaaataaggcgaagatcaacatggcaggcgcaaagcgcgttcctacggcccctgctgcaacctccaagcccggactgaggccaagaacagctcttggggacattggtaacaaagtcagtgaacaactgcaggccaaaatgcctatgaagaaggaagcaaaaccttcagctactggaaaagtcattgataaaaaactaccaaaacctcttgaaaaggtacctatgctggtgccagtgccagtgtctgagccagtgccagagccagaacctgagccagaacctgagcctgttaaagaagaaaaactttcgcctgagcctattttggttgatactgcctctccaagcccaatggaaacatctggatgtgcccctgcagaagaagacctgtgtcaggctttctctgatgtaattcttgcagtaaatgatgtggatgcagaagatggagctgatccaaacctttgtagtgaatatgtgaaagatatttatgcttatctgagacaacttgaggaagagcaagcagtcagaccaaaatacctactgggtcgggaagtcactggaaacatgagagccatcctaattgactggctagtacaggttcaaatgaaattcaggttgttgcaggagaccatgtacatgactgtctccattattgatcggttcatgcagaataattgtgtgcccaagaagatgctgcagctggttggtgtcactgccatgtttattgcaagcaaatatgaagaaatgtaccctccagaaattggtgactttgcttttgtgactgacaacacttatactaagcaccaaatcagacagatggaaatgaagattctaagagctttaaactttggtctgggtcggcctctacctttgcacttccttcggagagcatctaagattggagaggttgatgtcgagcaacatactttggccaaatacctgatggaactaactatgttggactatgacatggtgcactttcctccttctcaaattgcagcaggagctttttgcttagcactgaaaattctggataatggtgaatggacaccaactctacaacattacctgtcatatactgaagaatctcttcttccagttatgcagcacctggctaagaatgtagtcatggtaaatcaaggacttacaaagcacatgactgtcaagaacaagtatgccacatcgaagcatgctaagatcagcactctaccacagctgaattctgcactagttcaagatttagccaaggctgtggcaaaggtgtaacttgtaaacttgagttggagtactatatttacaaataaaattggcaccatgtgccatctgtacatattactgttgcatttacttttaataaagcttgtggccccttttacttttttatagcttaactaatttgaatgtggttacttcctactgtagggtagcggaaaagttgtcttaaaaggtatggtggggatatttttaaaaactccttttggtttacctggggatccaattgatgtatatgtttatatactgggttcttgttttatatacctggcttttactttattaatatgagttactgaaggtgatggaggtatttgaaaattttacttccataggacatactgcatgtaagccaagtcatggagaatctgctgcatagctctattttaaagtaaaagtctaccaccgaatccctagtccccctgttttctgtttcttcttgtgattgctgccataattctaagttatttacttttaccactatttaagttatcaactttagctagtatcttcaaactttcactttgaaaaatgagaattttatattctaagccagttttcattttggttttgtgttttggttaataaaacaatactcaaatacaaaa

SEQ ID NO: 222482 - DNA, 1190 bp, Artificial Sequence
  derived and/or modified sequence
atggcgctccgagtcaccaggaactcgaaaattaatgctgaaaataaggcgaagatcaacatggcaggcgcaaagcgcgttcctacggcccctgctgcaacctccaagcccggactgaggccaagaacagctcttggggacattggtaacaaagtcagtgaacaactgcaggccaaaatgcctatgaagaaggaagcaaaaccttcagctactggaaaagtcattgataaaaaactaccaaaacctcttgaaaaggtacctatgctggtgccagtgccagtgtctgagccagtgccagagccagaacctgagccagaacctgagcctgttaaagaagaaaaactttcgcctgagcctattttggttgatactgcctctccaagcccaatggaaacatctggatgtgcccctgcagaagaagacctgtgtcaggctttctctgatgtaattcttgcagtaaatgatgtggatgcagaagatggagctgatccaaacctttgtagtgaatatgtgaaagatatttatgcttatctgagacaacttgaggaagagcaagcagtcagaccaaaatacctactgggtcgggaagtcactggaaacatgagagccatcctaattgactggctagtacaggttcaaatgaaattcaggttgttgcaggagaccatgtacatgactgtctccattattgatcggttcatgcagaataattgtgtgcccaagaagatgctgcagctggttggtgtcactgccatgtttattgcaagcaaatatgaagaaatgtaccctccagaaattggtgactttgcttttgtgactgacaacacttatactaagcaccaaatcagacagatggaaatgaagattctaagagctttaaactttggtctgggtcggcctctacctttgcacttccttcggagagcatctaagattggagaggttgatgtcgagcaacatactttggccaaatacctgatggaactaactatgttggactatgacatggtgcactttcctccttctcaaattgcagcaggagctttttgcttagcactgaaaattctggataatggtgaatggactgtcaagaacaagtatgccacatcgaagcatgctaagatcagcactctaccacagctgaattctgcactagttcaagatttagccaaggctgtggcaaaggtgta

SEQ ID NO: 222483 - DNA, 1331 bp, Artificial Sequence
  derived and/or modified sequence
aggctggctcttctcggcgtgctgcggcggaacggctgttggtttctgctgggtgtaggtccttggctggtcgggcctccggtgttctgcttctccccgctgagctgctgcctggtgaagaggaagccatggcgctccgagtcaccaggaactcgaaaattaatgctgaaaataaggcgaagatcaacatggcaggcgcaaagcgcgttcctacggcccctgctgcaacctccaagcccggactgaggccaagaacagctcttggggacattggtaacaaagtcagtgaacaactgcaggccaaaatgcctatgaagaaggaagcaaaaccttcagctactggaaaagtcattgataaaaaactaccaaaacctcttgaaaaggtacctatgctggtgccagtgccagtgtctgagccagtgccagagccagaacctgagccagaacctgagcctgttaaagaagaaaaactttcgcctgagcctattttggttgatactgcctctccaagcccaatggaaacatctggatgtgcccctgcagaagaagacctgtgtcaggctttctctgatgtaattcttgcagtaaatgatgtggatgcagaagatggagctgatccaaacctttgtagtgaatatgtgaaagatatttatgcttatctgagacaacttgaggaagagcaagcagtcagaccaaaatacctactgggtcgggaagtcactggaaacatgagagccatcctaattgactggctagtacaggttcaaatgaaattcaggttgttgcaggagaccatgtacatgactgtctccattattgatcggttcatgcagaataattgtgtgcccaagaagatgctgcagctggttggtgtcactgccatgtttattgcaagcaaatatgaagaaatgtaccctccagaaattggtgactttgcttttgtgactgacaacacttatactaagcaccaaatcagacagatggaaatgaagattctaagagctttaaactttggtctgggtcggcctctacctttgcacttccttcggagagcatctaagattggagaggttgatgtcgagcaacatactttggccaaatacctgatggaactaactatgttggactatgacatggtgcactttcctccttctcaaattgcagcaggagctttttgcttagcactgaaaattctggataatggtgaatggacaccaactctacaacattacctgtcatatactgaagaatctcttcttccagttatgcagcacctggctaagaatgtagtcatggtaaatcaaggacttacaaagcacatggtgagtcaa

SEQ ID NO: 222484 - DNA, 1302 bp, Artificial Sequence
  derived and/or modified sequence
atggcattgagggtcactcgtaactccaagataaacgcagagaataaggctaagatcaatatggcaggcgccaagagagtccctactgcgcctgctgccaccagcaaacccggcttgcgccccagaacagctctgggcgatatcgggaataaggtcagcgagcaattgcaggccaaaatgccaatgaagaaggaggccaagcccagtgccaccggcaaagtaattgacaaaaaactgcccaagccgctcgagaaggtcccaatgttggtccccgttccagtgagtgagccagttcccgagcctgaacccgagcctgaacccgagcctgtcaaggaagaaaaactgtcccctgagccaattctggtagataccgcatctccatctccaatggagacctccggatgcgcgccagcagaggaggatctgtgccaggctttttctgacgttatcttagcagtgaacgacgttgacgccgaggacggcgccgaccccaacctgtgctctgaatacgttaaggatatctatgcatatctgcggcaactcgaggaggaacaggccgtgcggccaaaatatctgttaggtagagaagtaacaggcaatatgagagccattttgattgattggttggtgcaggtccaaatgaagtttaggctgttgcaagagaccatgtacatgacagtcagcatcatcgaccgatttatgcagaacaattgtgtgcccaaaaagatgttacagctcgtcggagttacagcgatgttcatcgctagcaagtatgaggaaatgtatccgcccgaaattggtgactttgcatttgtaacagacaacacttacacaaagcaccagatcagacagatggaaatgaagattctcagggccttaaatttcgggctggggaggccccttcctcttcatttcctgaggagggccagtaaaattggggaggtggatgtggagcaacacaccttagctaagtacttaatggagctgaccatgttagactatgacatggtgcacttccccccatcccagattgccgctggggcgttctgtttagccctgaaaatacttgataatggcgagtggactcccacattacagcattatctctcttacaccgaggaaagccttctacctgtgatgcagcacctggcaaagaacgtcgtgatggtgaatcagggactgactaagcatatgaccgttaagaacaagtatgccacgagtaaacatgccaagatatccacattaccacagcttaacagcgcgctggttcaagacctcgccaaggcggtggctaaagtttag

SEQ ID NO: 222485 - DNA, 1191 bp, Artificial Sequence
  derived and/or modified sequence
atggcactgcgcgtgactcgtaattccaagataaacgccgagaataaagccaagatcaacatggctggggcgaaacgagtcccaacggctccagcggctacatctaaacctgggctgcgcccccggactgctctaggcgacattggaaataaagtcagcgaacaacttcaagccaaaatgcctatgaagaaggaagccaagccctcagcaacgggaaaagtgatcgataagaagctgccgaaacccctggagaaggtccctatgttagtcccagtcccagtctccgaaccagtgccagaacctgagcctgaaccggagccggagcccgttaaagaggaaaaactctcaccggaacccattcttgtcgatacagccagcccatcaccaatggaaacctctggatgtgcgccagccgaggaagacctctgccaggcgttctctgacgtaatcctggccgtcaatgacgtcgatgctgaggacggcgccgaccccaacctgtgctccgagtacgtgaaggatatatatgcatacctccggcagttggaggaagagcaggctgtgcgcccaaaatatcttctggggagagaagtaaccggtaatatgagagccattttgatagactggttggtacaggttcaaatgaaattccgactgctgcaggagaccatgtatatgacggtctcaataattgacaggtttatgcagaacaactgtgtccctaaaaaaatgttgcagctcgtcggagtcacagcaatgttcattgccagtaaatacgaagagatgtatcctccagagatcggtgacttcgcctttgtcaccgataatacgtacactaaacatcagattaggcagatggagatgaagatccttcgggcgctgaattttggtcttggccgacctttgcccctacacttccttcgccgggcatcaaagattggagaggtggatgtcgagcagcacaccctcgctaaatatttaatggagttgacgatgcttgattatgatatggtgcatttccctccaagccagattgctgctggggccttctgtctggcgctgaagatacttgacaacggggagtggactgttaagaataagtacgcaactagcaaacatgccaaaatcagcaccctgcctcagctgaacagtgctctggtgcaggacctcgccaaagctgtggctaaggtctag

SEQ ID NO: 222486 - DNA, 1206 bp, Artificial Sequence
  derived and/or modified sequence
atggctctgcgggtgacgagaaattccaaaattaacgctgaaaataaggctaagattaacatggcaggagccaagcgagtgcctaccgctcccgccgcgacgagcaaacccgggctgcgcccacgaacagcactgggcgatattggaaacaaagttagcgagcagctgcaggccaagatgcccatgaagaaagaggcaaaaccatccgcaaccggcaaggtgatcgacaagaagctcccaaaacccttagagaaggtcccgatgctcgtgcccgtcccagtatcagaacccgtccctgagccggaaccagagcctgagcccgaacccgtgaaagaggagaaattgtccccagaacccatcctagtagacaccgcatccccgtccccgatggaaacttctgggtgcgcccccgccgaggaagacctgtgtcaggccttcagtgatgtgatcctcgctgtcaacgacgtcgatgctgaagacggcgctgatcccaacctgtgttccgaatatgtgaaggacatttatgcatacctgcgccagctggaggaggaacaggccgttcgccctaagtatcttttaggcagggaagtgaccggaaatatgcgggccatactgatcgattggttagttcaagtgcagatgaaattcagattactgcaggaaaccatgtatatgacagtgtccattatcgaccgattcatgcagaataattgcgtcccaaagaaaatgttacagctcgtcggtgtgacagccatgttcattgctagtaaatatgaagagatgtatccacccgaaatcggagactttgcttttgtaacagacaatacgtacacgaaacaccagatccggcagatggagatgaagattcttcgcgccctgaatttcggattgggccgccctctgcctttgcacttcctcaggcgggctagcaaaatcggtgaggtggatgtggaacagcatacactcgcaaaatacttaatggaacttaccatgctggattacgacatggtgcatttccccccgtctcagatcgccgcgggcgcattttgcctggccctgaagatcttggacaatggagagtggacacccacactgcagcactatctgtcctacactgaagagtcactattgcctgtgatgcagcatcttgccaagaatgtagtgatggtcaatcagggtctgaccaaacatatggtgtcacagtag

SEQ ID NO: 222487 - DNA, 1302 bp, Artificial Sequence
  derived and/or modified sequence
atggccctgcgggtgaccaggaacagcaagatcaatgctgagaacaaggccaagatcaacatggccggggccaagagggtgcccacagccccagctgccaccagcaagccaggcctgcggcccaggacagccctgggggacatcggcaacaaggtgtctgagcagctgcaggccaagatgcccatgaagaaggaggccaagcccagcgccaccgggaaggtgattgacaagaagctgcccaagcccctggagaaggtgcccatgctggtgcctgtgcctgtgtctgagcctgtgcctgagcctgagcctgagcctgagcctgagcctgtgaaggaggagaagctgagccctgagcccatcctggtggacacagccagccccagccccatggagaccagcggctgtgccccagctgaggaggacctgtgccaggccttcagtgatgtgatcctggccgtgaatgatgtggatgctgaagatggagctgaccccaacctgtgcagtgaatatgtgaaggacatctatgcctacctgcggcagctggaggaggagcaggccgtgcggcccaagtacctgctgggccgggaggtgacaggcaacatgagggccatcctgattgactggctggtgcaggtgcagatgaagttccggctgctgcaggagaccatgtacatgacagtgtccatcatcgaccgcttcatgcagaacaactgtgtgcccaagaagatgctgcagctggtgggcgtgacagccatgttcatcgccagcaaatatgaggagatgtacccacctgagatcggggactttgcctttgtgacagacaacacctacaccaagcaccagatccggcagatggagatgaagatcctgcgggccctgaactttggcctgggccggcccctgcccctgcacttcctgcggcgggccagcaagatcggggaggtggatgtggagcagcacaccctggccaagtacctgatggagctgaccatgctggactatgacatggtgcacttcccccccagccagattgctgctggggccttctgcctggccctgaagatcctggacaacggggagtggacccccaccctgcagcactacctgagctacacagaggagagcctgctgcctgtgatgcagcacctggccaagaatgtggtgatggtgaaccagggcctgaccaagcacatgacagtgaagaacaagtatgccaccagcaagcacgccaagatcagcaccctgccccagctgaacagcgccctggtgcaggacctggccaaggctgtggccaaggtgtag

SEQ ID NO: 222488 - DNA, 1191 bp, Artificial Sequence
  derived and/or modified sequence
atggccctgcgggtgaccaggaacagcaagatcaatgctgagaacaaggccaagatcaacatggccggggccaagagggtgcccacagccccagctgccaccagcaagccaggcctgcggcccaggacagccctgggggacatcggcaacaaggtgtctgagcagctgcaggccaagatgcccatgaagaaggaggccaagcccagcgccaccgggaaggtgattgacaagaagctgcccaagcccctggagaaggtgcccatgctggtgcctgtgcctgtgtctgagcctgtgcctgagcctgagcctgagcctgagcctgagcctgtgaaggaggagaagctgagccctgagcccatcctggtggacacagccagccccagccccatggagaccagcggctgtgccccagctgaggaggacctgtgccaggccttcagtgatgtgatcctggccgtgaatgatgtggatgctgaagatggagctgaccccaacctgtgcagtgaatatgtgaaggacatctatgcctacctgcggcagctggaggaggagcaggccgtgcggcccaagtacctgctgggccgggaggtgacaggcaacatgagggccatcctgattgactggctggtgcaggtgcagatgaagttccggctgctgcaggagaccatgtacatgacagtgtccatcatcgaccgcttcatgcagaacaactgtgtgcccaagaagatgctgcagctggtgggcgtgacagccatgttcatcgccagcaaatatgaggagatgtacccacctgagatcggggactttgcctttgtgacagacaacacctacaccaagcaccagatccggcagatggagatgaagatcctgcgggccctgaactttggcctgggccggcccctgcccctgcacttcctgcggcgggccagcaagatcggggaggtggatgtggagcagcacaccctggccaagtacctgatggagctgaccatgctggactatgacatggtgcacttcccccccagccagattgctgctggggccttctgcctggccctgaagatcctggacaacggggagtggacagtgaagaacaagtatgccaccagcaagcacgccaagatcagcaccctgccccagctgaacagcgccctggtgcaggacctggccaaggctgtggccaaggtgtag

SEQ ID NO: 222489 - DNA, 1206 bp, Artificial Sequence
  derived and/or modified sequence
atggccctgcgggtgaccaggaacagcaagatcaatgctgagaacaaggccaagatcaacatggccggggccaagagggtgcccacagccccagctgccaccagcaagccaggcctgcggcccaggacagccctgggggacatcggcaacaaggtgtctgagcagctgcaggccaagatgcccatgaagaaggaggccaagcccagcgccaccgggaaggtgattgacaagaagctgcccaagcccctggagaaggtgcccatgctggtgcctgtgcctgtgtctgagcctgtgcctgagcctgagcctgagcctgagcctgagcctgtgaaggaggagaagctgagccctgagcccatcctggtggacacagccagccccagccccatggagaccagcggctgtgccccagctgaggaggacctgtgccaggccttcagtgatgtgatcctggccgtgaatgatgtggatgctgaagatggagctgaccccaacctgtgcagtgaatatgtgaaggacatctatgcctacctgcggcagctggaggaggagcaggccgtgcggcccaagtacctgctgggccgggaggtgacaggcaacatgagggccatcctgattgactggctggtgcaggtgcagatgaagttccggctgctgcaggagaccatgtacatgacagtgtccatcatcgaccgcttcatgcagaacaactgtgtgcccaagaagatgctgcagctggtgggcgtgacagccatgttcatcgccagcaaatatgaggagatgtacccacctgagatcggggactttgcctttgtgacagacaacacctacaccaagcaccagatccggcagatggagatgaagatcctgcgggccctgaactttggcctgggccggcccctgcccctgcacttcctgcggcgggccagcaagatcggggaggtggatgtggagcagcacaccctggccaagtacctgatggagctgaccatgctggactatgacatggtgcacttcccccccagccagattgctgctggggccttctgcctggccctgaagatcctggacaacggggagtggacccccaccctgcagcactacctgagctacacagaggagagcctgctgcctgtgatgcagcacctggccaagaatgtggtgatggtgaaccagggcctgaccaagcacatggtgtcccagtag

SEQ ID NO: 222490 - DNA, 1302 bp, Artificial Sequence
  derived and/or modified sequence
atggccctgcgggtgacccggaacagcaagatcaacgccgagaacaaagcgaagataaatatggctggggccaaaagagttcccaccgccccggcagccacttccaagcctggcctgagaccccggaccgcactgggcgatattgggaacaaggtgtctgaacagcttcaggccaaaatgcctatgaaaaaggaggccaagccatccgcaaccggaaaagtgatagataaaaagctccctaagcctctagagaaggtgccgatgctggtgcctgtgccagtttcagaacccgtgccagagcctgagccggaacctgaacctgagccggtcaaggaggagaagttaagtcctgagccaatcctggtggataccgcctcgccatcccccatggagaccagcggctgtgctcccgctgaagaggacctctgtcaggccttctctgacgtcatcttagcagtgaacgatgtggacgctgaggacggggcagatcccaacctttgttcagaatacgtcaaagacatctatgcctacctccggcaattggaggaagagcaagccgtcaggccaaagtacctgctaggacgcgaagtgactgggaatatgagagcaattttgattgattggctggtgcaggtccaaatgaagtttagattactgcaagaaaccatgtacatgacggttagtatcatagacaggttcatgcaaaacaactgcgttcccaaaaagatgctgcagctggtgggcgtgactgcgatgtttatcgcgtccaaatacgaggaaatgtaccctcctgagatcggcgacttcgccttcgtcaccgataatacgtacacaaagcatcagatcagacagatggagatgaaaatccttagggccttgaacttcggtctgggtcggccacttcccctacactttctgaggagagcatccaagatcggcgaagttgacgtggaacagcatacactggcgaagtacctcatggaattaacaatgctagattatgacatggtgcacttccctccttcgcagatcgctgcaggagccttctgtctggcccttaaaatcttagataacggagagtggacacctacgttacagcactacctctcgtacaccgaggaatctttactgcctgtgatgcagcatcttgctaaaaacgtcgtcatggtgaatcaggggctcaccaagcatatgacagtcaagaacaagtacgccacatcaaagcacgccaagatctccacattgccgcagttgaactcagccctcgtgcaggatctagccaaggccgtggccaaggtatag

SEQ ID NO: 222491 - DNA, 1191 bp, Artificial Sequence
  derived and/or modified sequence
atggccctgcgggtgacccggaacagcaagatcaacgccgagaacaaagctaagatcaatatggctggtgctaagcgggttcccactgctcccgctgctacttctaaacccggcctaagaccgcgaaccgccctgggcgacatcggaaataaagtcagtgagcagctgcaagccaagatgcctatgaagaaagaagccaagcctagcgctacaggtaaggtaattgacaaaaagcttcccaaacccctggagaaggtgcccatgctggtgccagtgcctgtgagcgagcctgtccctgagcctgagcccgaaccggagcctgagccagtgaaagaggagaagctgagccccgagccaatcctggtcgataccgcctctccgtcgccaatggagacttctggctgcgcccctgctgaggaagacctctgccaggcctttagcgatgtgatcctggctgtcaatgatgtggacgctgaagacggtgctgatccaaacttgtgcagcgaatatgtgaaggatatctatgcttacctgagacaacttgaagaggagcaggctgtcagacctaagtacctgctggggagagaggtaaccggtaacatgagggccatactcatcgactggctggtacaggtccaaatgaagtttagactgctgcaggagacaatgtacatgacggtgagcatcattgaccgattcatgcagaataattgtgtgccaaaaaagatgctccagttagtgggggtgactgctatgttcatcgcatcaaaatacgaggagatgtatcctcccgagatcggagattttgcttttgtgactgataacacatacacaaaacaccaaattagacaaatggaaatgaagattctgcgtgcactcaattttggcctaggacgccccctgcccctgcattttctccggcgggcgtccaagattggagaggtggatgtcgaacagcatactctcgccaagtatctaatggagttgactatgctggactacgatatggtgcatttcccgcccagccagatcgccgcgggcgctttctgtctggctttaaagattttggacaatggggagtggacagtgaaaaacaagtacgcgacatccaaacacgcaaagattagcactcttcctcagctcaattccgcgctggtccaggatcttgccaaggctgtggctaaggtttag

SEQ ID NO: 222492 - DNA, 1206 bp, Artificial Sequence
  derived and/or modified sequence
atggccctgcgggtgacccggaacagcaagatcaacgccgagaacaaggcgaagattaacatggccggtgctaagcgtgttccgacagcgcctgcggctacaagcaagcccggtttacggcctcgtacagccttgggcgacattggaaataaggtgtcagaacagctacaggcaaaaatgcctatgaagaaggaggctaagccttcagcaaccggaaaagtcattgataagaagctccctaaacctctggagaaagtcccaatgctggtacccgtgcctgtgagcgaacccgtgcccgaacccgaacctgagccggagcccgagcccgtaaaagaggagaaactgtccccagagcctatactcgtggacactgccagtccctcccctatggagacctctggttgtgcccctgccgaggaagatctttgccaggcattcagcgacgttatcttggccgtgaatgatgtggacgccgaggacggagctgacccaaatctgtgtagtgagtacgtgaaagacatttatgcctacctgcgccagctggaagaggaacaggcagtcagacccaagtacctgctcggcagagaggtgaccggcaatatgcgtgctatcttgatcgactggctagttcaagtccagatgaaatttaggctgctgcaggaaacaatgtacatgacagtcagcatcattgacaggtttatgcagaacaattgtgtccccaaaaaaatgctgcagctcgtcggggtgactgcaatgttcattgcttccaaatatgaagaaatgtatccaccagagattggagactttgcattcgtgacagacaatacctacacaaagcatcaaatacgtcagatggagatgaaaatcctgcgagccctgaatttcggcttggggcgcccgctgcccctgcactttctgcggagggcctccaagataggcgaagtcgacgttgaacagcacacactggctaaatatcttatggagcttacaatgcttgattacgatatggtgcactttccacccagccagatcgctgcgggcgcgttctgcctggccctgaagattctcgataatggagagtggacgccgaccttgcagcattatctcagctacaccgaggaaagcctcctgcccgttatgcagcatctggcaaaaaacgtggtgatggttaatcagggactgactaagcatatggtcagccaatag

SEQ ID NO: 222493 - DNA, 1302 bp, Artificial Sequence
  derived and/or modified sequence
atggctctgcgggtgacgaggaactcgaagattaacgcggaaaacaaggctaaaataaacatggctggggcaaagcgagtacctacagcacctgcggctaccagtaagcccggactgcgtccacggacagcactaggcgacatcgggaataaagtgagcgaacagctgcaagccaagatgccaatgaagaaagaagctaaaccgtcggcgactggtaaggttatagacaagaagctgccgaaacccttggagaaagtccctatgctggttccagtacccgtctccgagcccgtgcccgaacctgaacccgagccagagccagaaccagtgaaagaagaaaagttatcacctgaacctatcctcgttgatacagcatcccccagtcctatggaaacctccggctgcgctccagccgaagaagacctgtgccaggcattcagcgatgtcatattggcggtcaacgacgttgacgctgaagatggggctgatccaaacctctgttccgagtacgtcaaggatatctacgcataccttcgccaactagaggaggagcaggcagtgcgacccaaatatctgcttggtcgggaagtcactggaaatatgcgggcaatcctcatcgattggctggtgcaggtacaaatgaaattcagactactacaggagacaatgtacatgacagtatcaattattgacagattcatgcaaaataattgtgtgcctaagaagatgcttcaacttgtgggggtcacggctatgtttatcgccagcaaatatgaggaaatgtatccacccgaaatcggggattttgccttcgtaactgacaatacctataccaaacaccaaatccggcagatggaaatgaagatcttacgggctctaaatttcgggttggggaggccattaccattacatttcttgaggcgcgcttctaagataggtgaggtggacgtggaacagcatacactcgccaagtatctcatggaacttaccatgctagattacgatatggttcactttccgccttcccagatagccgcaggggcattttgtcttgccctgaaaattctcgacaacggtgaatggacgcccacactgcagcattatttgtcatataccgaagagtccctgcttccggtcatgcagcatctcgccaagaacgtggtgatggtgaatcagggcttgacaaagcatatgacggtcaaaaacaagtatgcaacttctaagcatgccaagatctctactctgccccaactgaattccgcactagtccaggatctcgcgaaagcagttgcaaaagtgtag

SEQ ID NO: 222494 - DNA, 1191 bp, Artificial Sequence
  derived and/or modified sequence
atggctctccgcgtgacaaggaacagtaaaattaacgctgaaaacaaggcaaaaattaatatggcgggtgctaaacgggtgccaacagctcccgcagcaactagcaagcccggactgcgtccccgtactgcattgggcgatatcggcaataaggtttccgaacagctgcaggccaagatgccaatgaaaaaggaggccaagccttcagcaacggggaaagtgatcgacaagaagctccccaaacctctagagaaagttccgatgctggtgccagtgcctgtgtccgaacctgtgcccgagcccgagcctgaacccgaacctgagcctgtgaaagaagagaagctttccccagagcctattcttgtggataccgccagtcccagtccaatggagacgagtggttgcgcgcctgctgaagaagacctgtgtcaggctttctctgatgtcatcctcgccgttaacgacgtggacgctgaggatggcgctgaccccaatctttgctccgaatacgtgaaggacatatacgcttacctccggcagctggaggaagaacaggccgtgcgacctaaatatctgctcggaagggaagtaacaggcaacatgcgcgcaatcttaatcgactggctggtgcaagtacaaatgaagttcaggctcttgcaggagacgatgtatatgactgtaagcatcattgacagatttatgcagaacaattgtgtgcctaaaaaaatgctgcagctcgtaggagttacagctatgttcattgcttcaaaatacgaggagatgtaccctcctgaaatcggggacttcgcgttcgtgactgacaatacatatacaaaacaccagatcaggcagatggaaatgaagattctccgagccctaaactttggactcggtaggcctttgccgctgcactttctccgcagggccagcaaaattggagaagttgatgtggagcagcacacattagctaaatacttgatggagttaacaatgctggactacgatatggtccattttcctcctagccaaatcgccgcaggcgctttttgtcttgccctaaagatcctggataatggcgagtggactgtgaaaaacaaatatgccacatctaagcacgccaaaatctcgacccttcctcagctgaattcagcgctggtacaggatttagcaaaagcagtcgcgaaagtgtag

SEQ ID NO: 222495 - DNA, 1206 bp, Artificial Sequence
  derived and/or modified sequence
atggctctgcgcgtaacacgcaattcaaaaataaacgctgaaaataaggccaagatcaatatggctggtgcaaagagggttccaaccgctcctgctgcaacatccaaaccgggactcagacccagaacagccttaggcgacatagggaataaggtgagtgaacagctgcaggcaaaaatgcccatgaagaaagaagccaagccaagcgctactggaaaggtgatcgacaagaagttacccaagccactcgagaaggtgcctatgctggtaccagtgcctgtcagcgagccagtacctgagcccgagccagaacccgagcctgaacccgtgaaggaagagaaactctcgcccgagcccattctggtagacaccgccagcccctcgcccatggagacttcagggtgtgcacccgctgaggaggacctttgtcaagctttttctgatgtgatcctagcagtgaacgacgtggatgccgaagatggcgctgaccccaatctgtgctctgaatatgtgaaggatatctacgcctacctccgccaactggaggaagagcaggctgtccgaccaaagtacttactgggtagggaggtgactgggaatatgcgggcaatactaatagattggctcgtgcaggtacagatgaagtttcgactcttgcaggagacgatgtacatgacagtttccattattgacaggtttatgcaaaacaattgtgtgcccaagaagatgctgcagttggtcggggtgactgctatgtttattgccagcaaatacgaagaaatgtatccccctgaaatcggcgattttgcctttgtgactgataatacttataccaagcatcaaatccgccagatggagatgaaaatcttgcgagctctcaattttggcctggggcgtccgcttcccctccacttcctgcggcgagcttcaaagattggagaggtggacgtggagcagcacaccttggctaaatacttaatggagctgactatgctcgactacgacatggtgcactttcctccaagccagatcgccgcaggggcattttgcctggccttaaaaattctggacaacggggagtggacccccacactccagcattacttgagctacaccgaagagagtctcctacctgttatgcaacaccttgccaagaatgtggttatggtgaatcaggggttgacaaaacatatggtgtcacagtag

SEQ ID NO: 222496 - protein, 301 aa, Artificial Sequence
  derived and/or modified sequence
MDTGVIEGGLNVTLTIRLLMHGKEVGSIIGKKGESVKKMREESGARINISEGNCPERIITLAGPTNAIFKAFAMIIDKLEEDISSSMTNSTAASRPPVTLRLVVPASQCGSLIGKGGCKIKEIRESTGAQVQVAGDMLPNSTERAITIAGIPQSIIECVKQICVVMLESPPKGVTIPYRPKPSSSPVIFAGGQDRYSTGSDSASFPHTTPSMCLNPDLEGPPLEAYTIQGQYAIPQPDLTKLHQLAMQQSHFPMTHGNTGFSGMDTSVFISVRCSARERPVPRSQLDICLKQTSLSSILLV

SEQ ID NO: 222497 - protein, 362 aa, Artificial Sequence
  derived and/or modified sequence
MDTGVIEGGLNVTLTIRLLMHGKEVGSIIGKKGESVKKMREESGARINISEGNCPERIITLAGPTNAIFKAFAMIIDKLEEDISSSMTNSTAASRPPVTLRLVVPASQCGSLIGKGGCKIKEIRESTGAQVQVAGDMLPNSTERAITIAGIPQSIIECVKQICVVMLESPPKGVTIPYRPKPSSSPVIFAGGQDRYSTGSDSASFPHTTPSMCLNPDLEGPPLEAYTIQGQYAIPQPDLTKLHQLAMQQSHFPMTHGNTGFSGIESSSPEVKGYWAGLDASAQTTSHELTIPNDLIGCIIGRQGAKINEIRQMSGAQIKIANPVEGSTDRQVTITGSAASISLAQYLINVRLSSETGGMGSS

SEQ ID NO: 222498 - DNA, 1089 bp, Artificial Sequence
  derived and/or modified sequence
atggacactggagtgattgagggtggacttaacgtaacattgaccatcagacttctcatgcatgggaaggaagtgggatccattatcggcaagaaaggggaatcggtcaaaaaaatgcgggaagagtccggggcacgcatcaatatcagcgaaggaaattgccccgaaagaatcatcaccctggcgggccctaccaacgctatttttaaggctttcgctatgattatcgataagctcgaagaagatatttcctcaagcatgacaaattccacagccgcaagtcggcctcccgtgactttgcgcctggtggttccagcatcgcagtgcggaagtttgatcggcaagggcgggtgtaagatcaaggaaatcagggagtcaactggagcccaggttcaggtggccggagacatgctgcctaactctacggaacgcgctatcaccatcgctggcatacctcaatcgatcattgaatgcgttaaacagatctgcgtcgtgatgctcgaatcgccgccaaagggagtgacaatcccctaccggccaaaaccttcttcaagtcccgttatctttgctgggggtcaggaccgctactcaacaggatctgacagcgccagcttcccgcacacaacaccctccatgtgcctaaaccccgatctggaagggccacccctcgaagcctacacaattcaagggcaatatgcaatcccccagcctgatctgacaaagctgcatcaactcgctatgcagcaatctcacttccctatgactcacggtaatactggattcagcggcattgagagtagcagccccgaggtcaaaggctattgggcaggcctcgacgccagtgcgcaaaccaccagccacgagttgaccatccctaacgatctgatcggatgcattatcggacgacagggagccaagataaatgaaattaggcagatgagcggagcacagatcaagatcgccaaccctgtcgagggctccactgacaggcaggtcacaatcaccgggagcgcagcctccataagtctggctcagtaccttatcaacgtgcgcctgtccagcgagaccggaggaatgggatcaagctag

SEQ ID NO: 222499 - DNA, 1089 bp, Artificial Sequence
  derived and/or modified sequence
atggacacaggagtcatcgagggcggcctgaatgtgaccctgaccatccggctgctgatgcacggcaaggaggtgggcagcatcatcggcaagaagggggagagcgtgaagaagatgagggaggagagcggggcccgcatcaacatcagcgagggcaactgcccagagcgcatcatcaccctggccggccccaccaatgccatcttcaaggcctttgccatgatcatcgacaagctggaggaggacatcagcagctccatgaccaacagcacagctgccagccggccccctgtgaccctgcggctggtggtgcctgccagccagtgtggcagcctgattggaaaaggaggctgcaagatcaaggagatccgggagagcactggagcccaggtgcaggtggccggggacatgctgcccaacagcacagagcgggccatcaccatcgccggcatcccccagagcatcattgaatgtgtgaagcagatctgtgtggtgatgctggagagcccccccaagggcgtgaccatcccctaccggcccaagcccagcagcagccctgtgatctttgctgggggccaggaccgctacagcacaggcagtgacagcgccagcttcccccacaccacccccagcatgtgcctgaacccagacctggagggcccccccctggaggcctacaccatccagggccagtatgccatcccccagcctgacctgaccaagctgcaccagctggccatgcagcagagccacttccccatgacccacggcaacacaggcttcagcggcatcgagagcagcagccctgaggtgaagggctactgggccggcctggatgccagcgcccagaccaccagccatgagctgaccatccccaatgacctgattggctgcatcatcggccggcagggcgccaagatcaatgagatccggcagatgtctggggcccagatcaagatcgccaaccctgtggagggcagcacagaccggcaggtgaccatcactggatctgctgccagcatcagcctggcccagtacctgatcaacgtgcggctgagcagcgagaccggcggcatgggcagcagctag

SEQ ID NO: 222500 - DNA, 1089 bp, Artificial Sequence
  derived and/or modified sequence
atggacaccggcgtgatcgagggcggcctgaacgtgaccctgaccatacggctgctcatgcacggcaaagaggttggctccatcattggcaaaaaaggagagtccgtgaaaaagatgcgcgaagagagcggggcccgcatcaacatctctgagggcaactgcccggaacgcattattactctggctggaccaaccaacgctatctttaaagccttcgctatgataatcgataagctggaggaggacatctctagttccatgacgaactctaccgccgcttcccgaccacccgtgactctgaggctggtagtccccgcctctcaatgtggatctttgattgggaagggcggctgcaagataaaggagattcgagaatcaaccggcgcacaggttcaggtggcaggggatatgctcccaaatagcactgaacgcgccattactattgccggaattccccagagtatcattgaatgtgtgaaacagatatgtgtcgtgatgctggagtccccccctaagggggtgaccattccatacagaccaaagcccagttcctcacccgtgatcttcgctggaggccaggacaggtatagtactgggagcgacagtgcttccttcccccatacgacaccaagcatgtgcctgaatcctgatctggaaggtcctcctctggaggcatatacaattcaagggcaatacgcgatacctcagcctgacctaacaaagcttcaccagcttgccatgcagcagtctcactttcctatgacccatggcaacaccggattctccggaattgagtcctcatctccagaggttaaggggtattgggctggcctcgacgcgagtgctcagactactagccacgagctaaccattccgaatgatcttattgggtgtatcatcggccgccagggagcaaagatcaatgagattcggcagatgagtggagcacagataaagatcgccaaccccgtagaaggatctacggacaggcaggtcactatcaccgggtccgcagcatccatctccttggcccagtatctgatcaatgttcgcctgagcagcgaaacaggcggtatgggcagcagctag

SEQ ID NO: 222501 - DNA, 1457 bp, Artificial Sequence
  derived and/or modified sequence
cttccccttcccgcccgctccccttttcccctcagtcgcctcgcgcctgcagtttttggctttcacccccaaccagtgaccaaagacttgaccactcaaagtccagctccccagaacactgctcgacatggacaccggtgtgattgaaggtggattaaatgtcactctcaccatccggctacttatgcatggaaaggaagttggcagtatcatcggaaagaaaggagaatcagttaagaagatgcgcgaggagagtggtgcacgtatcaacatctcagaagggaattgtcctgagagaattatcactttggctggacccactaatgccatcttcaaagcctttgctatgatcattgacaaactggaagaggacataagcagctctatgaccaatagcacagctgccagtagacccccggtcaccctgaggctggtggtccctgctagtcagtgtggctctctcattggaaaaggtggatgcaagatcaaggaaatacgagagagtacaggggctcaggtccaggtggcaggggatatgctacccaactcaactgagcgggccatcactattgctggcattccacaatccatcattgagtgtgtcaaacagatctgcgtggtcatgttggagtcccccccgaagggcgtgaccatcccgtaccggcccaagccgtccagctctccggtcatctttgcaggtggtcaggacaggtacagcacaggcagcgacagtgcgagctttccccacaccaccccgtccatgtgcctcaaccctgacctggagggaccacctctagaggcctataccattcaaggacagtatgccattccacagccagatttgaccaagctgcaccagttggcaatgcaacagtctcattttcccatgacgcatggcaacaccggattcagtggcattgaatccagctctccagaggtgaaaggctattgggcaggtttggatgcatctgctcagactacttctcatgaactcaccattccaaacgatttgattggctgcataatcgggcgtcaaggcgccaaaatcaatgagatccgtcagatgtctggggcgcagatcaaaattgcgaacccagtggaaggatctactgataggcaggttaccatcactggatctgctgccagcattagcctggctcaatatctaatcaatgtcaggctttcctcggagacgggtggcatggggagcagctagaacaatgcagattcatccataatccctttctgctgttcaccaccacccatgatccatctgtgtagtttctgaacagtcagcgattccaggttttaaatagtttgtaaattttcagtttctacacactttatcatccactcgtgattttttaattaaagcgttttaattcctttctctgttcagctgttgatgctgagatccatatttagttttataagcttctccctggtttttttttttt

SEQ ID NO: 222502 - DNA, 1089 bp, Artificial Sequence
  derived and/or modified sequence
atggacacaggcgtcatagaagggggtctgaatgttactcttacaattcgactgctgatgcatggaaaggaggtcggctccattattggaaagaaaggcgagagcgtgaaaaaaatgcgtgaggaatccggtgcccgaattaatatctccgaaggtaactgccctgagagaattatcacactggctggacccactaatgcaatctttaaagcattcgctatgatcatagacaaactggaagaggatatctcttctagcatgacaaactcaacagccgctagtaggccccctgtgacattgcggctggtggtgcctgcgtctcagtgcggcagccttatcgggaaagggggttgcaagattaaggaaatcagagagtcaacaggcgcacaagtgcaagtcgccggagacatgctcccaaactcaacagagcgagcaattactattgctgggatccctcagagtataattgagtgcgtgaagcagatttgtgtcgtcatgctcgagtcacctcctaaaggcgtgacgataccgtaccgtcctaaaccctctagttctccggtcatcttcgcagggggtcaagataggtatagcaccggatccgactctgctagcttcccacatacaaccccgtccatgtgccttaatccagacctcgaggggcctccattagaggcttacactatacagggccagtacgctattcctcaaccggacctaacaaagctccaccagcttgctatgcaacaatcacattttcctatgacgcacgggaacacaggcttttcaggtatcgaaagctctagccccgaggtgaagggatattgggcaggccttgacgcaagcgcccaaacaacaagtcatgagttgaccattcccaacgacctaattggctgtattatcggcagacaaggtgcgaagattaacgaaataagacagatgagcggagcccagatcaaaattgccaacccagtggagggatctacggaccgccaggtcaccatcacagggtccgccgcatcgataagcttggcccagtacctcataaatgtgagactgtcctccgagacgggcggaatgggctcgagctag

SEQ ID NO: 222503 - DNA, 1089 bp, Artificial Sequence
  derived and/or modified sequence
atggacaccggcgtgatcgagggcggcctgaacgtgaccctgaccatcagactgctgatgcacggcaaggaggtgggcagcatcatcggcaagaagggcgagagcgtgaagaagatgagagaggagagcggcgccagaatcaacatcagcgagggcaactgccccgagagaatcatcaccctggccggccccaccaacgccatcttcaaggccttcgccatgatcatcgacaagctggaggaggacatcagcagcagcatgaccaacagcaccgccgccagcagaccccccgtgaccctgagactggtggtgcccgccagccagtgcggcagcctgatcggcaagggcggctgcaagatcaaggagatcagagagagcaccggcgcccaggtgcaggtggccggcgacatgctgcccaacagcaccgagagagccatcaccatcgccggcatcccccagagcatcatcgagtgcgtgaagcagatctgcgtggtgatgctggagagcccccccaagggcgtgaccatcccctacagacccaagcccagcagcagccccgtgatcttcgccggcggccaggacagatacagcaccggcagcgacagcgccagcttcccccacaccacccccagcatgtgcctgaaccccgacctggagggcccccccctggaggcctacaccatccagggccagtacgccatcccccagcccgacctgaccaagctgcaccagctggccatgcagcagagccacttccccatgacccacggcaacaccggcttcagcggcatcgagagcagcagccccgaggtgaagggctactgggccggcctggacgccagcgcccagaccaccagccacgagctgaccatccccaacgacctgatcggctgcatcatcggcagacagggcgccaagatcaacgagatcagacagatgagcggcgcccagatcaagatcgccaaccccgtggagggcagcaccgacagacaggtgaccatcaccggcagcgccgccagcatcagcctggcccagtacctgatcaacgtgagactgagcagcgagaccggcggcatgggcagcagctag

SEQ ID NO: 222504 - protein, 550 aa, Artificial Sequence
  derived and/or modified sequence
MDGIVPDIAVGTKRGSDELFSTCVTNGPFIMSSNSASAANGNDSKKFKGDSRSAGVPSRVIHIRKLPIDVTEGEVISLGLPFGKVTNLLMLKGKNQAFIEMNTEEAANTMVNYYTSVTPVLRGQPIYIQFSNHKELKTDSSPNQARAQAALQAVNSVQSGNLALAASAAAVDAGMAMAGQSPVLRIIVENLFYPVTLDVLHQIFSKFGTVLKIITFTKNNQFQALLQYADPVSAQHAKLSLDGQNIYNACCTLRIDFSKLTSLNVKYNNDKSRDYTRPDLPSGDSQPSLDQTMAAAFASPYAGAGFPPTFAIPQAAGLSVPNVHGALAPLAIPSAAAAAAAAGRIAIPGLAGAGNSVLLVSNLNPERVTPQSLFILFGVYGDVQRVKILFNKKENALVQMADGNQAQLAMSHLNGHKLHGKPIRITLSKHQNVQLPREGQEDQGLTKDYGNSPLHRFKKPGSKNFQNIFPPSATLHLSNIPPSVSEEDLKVLFSSNGGVVKGFKFFQKDRKMALIQMGSVEEAVQALIDLHNHDLGENHHLRVSFSKSTI

SEQ ID NO: 222505 - DNA, 1653 bp, Artificial Sequence
  derived and/or modified sequence
atggacggcatcgtgcccgacatcgcagttgggaccaagagaggttccgacgagttgtttagcacctgcgtcaccaacgggccattcattatgtctagcaatagcgcttccgcagccaatggcaatgacagtaagaagttcaaaggagactctcggagcgccggcgtaccttcgcgcgtcattcatattaggaagctcccaattgatgtcaccgaaggagaagtgatctcattgggcctgccgttcggtaaagtcacgaatctcctaatgctcaagggcaagaaccaggcgtttattgagatgaacacagaagaggcagcgaacactatggtgaactactatacgtctgtaactccagtactgcggggccagccaatctacattcagttttctaaccacaaggagctgaagactgactcgagtcctaaccaagcccgggcccaagccgcactccaagcagttaacagcgtacagtctggcaacctggctctcgccgccagtgccgctgcagttgacgccgggatggctatggcaggacagtcccccgtattacggattattgtagaaaacctcttttacccagttactttagatgtgctgcaccagatatttagtaaatttggcactgtgctgaagattataacttttacaaagaataatcaatttcaggccctgctgcagtatgctgaccccgtttcagcccagcacgcaaaactgtcgctcgacggacaaaatatctacaacgcatgctgtactctgagaattgacttcagtaaactgacctcactcaatgtcaaatataataacgacaaatctcgtgattatacccgaccagacctgccaagcggagacagccagccaagcctagaccagaccatggcagccgctttcgcctcgccttatgccggcgcaggattcccaccaaccttcgcaatccctcaggccgccggcctgtcagtgcccaacgtgcatggagcactggctcccctggccatcccctctgcagccgccgcagccgccgcggccggacgaattgccatcccaggattagctggggccgggaactccgtcctactggtttctaacctgaatcccgagagggtaaccccccagtccctcttcattttgttcggagtgtatggcgatgtccagcgggtgaaaatcttgttcaacaagaaagagaatgcccttgtgcagatggctgacggcaatcaagcacaactcgcaatgtcccacctcaacggacacaagttacacggtaaacccattcgcattacattgagcaagcatcaaaatgtccagctgccacgcgaagggcaggaggaccaggggctgacaaaggactacgggaatagccctctgcacaggtttaaaaaacccggatctaagaacttccagaatatcttccccccaagcgcaaccttgcaccttagcaacatccctcctagtgtgtctgaggaagatcttaaagtgctattctcctcaaacggcggagtggtgaaagggttcaaattttttcagaaggacagaaaaatggcactgattcagatggggagcgtcgaagaggcagtccaggctctgatcgacctgcataaccacgaccttggtgagaaccaccacttgagggtgagcttttcaaaaagtacaatctag

SEQ ID NO: 222506 - DNA, 1653 bp, Artificial Sequence
  derived and/or modified sequence
atggatggcatcgtgcctgacattgctgtgggcaccaagaggggcagtgatgagctgttcagcacctgtgtgaccaacggccccttcatcatgagcagcaacagcgccagcgctgccaatggaaatgacagcaagaagttcaagggggacagccgctctgctggggtgcccagcagggtcatccacatcaggaagctgcccattgatgtgacagaaggagaggtgatcagcctgggcctgccctttgggaaggtgaccaacctgctgatgctgaagggcaagaaccaggccttcatcgagatgaacacagaggaggccgccaacaccatggtgaactactacacctctgtgacccctgtgctgcggggccagcccatctacatccagttcagcaaccacaaggagctgaagacagacagcagccccaaccaggcccgggcccaggccgccctgcaggccgtgaacagcgtgcagagcggcaacctggccctggccgccagcgctgctgctgtggatgctggcatggccatggccggccagagccctgtgctgcgcatcatcgtggagaacctcttctaccctgtgaccctggatgtgctgcaccagatcttcagcaagtttggaacagtgctgaagatcatcaccttcaccaagaacaaccagttccaggccctgctgcagtatgctgaccctgtgtctgcccagcacgccaagctgagcctggatggccagaacatctacaatgcctgctgcaccctgagaattgacttcagcaagctgaccagcctgaatgtgaagtacaacaatgacaagagccgggactacaccaggccagacctgcccagcggggacagccagcccagcctggaccagaccatggctgctgcctttgccagcccctatgctggggccggcttcccccccacctttgccatcccccaggccgccggcctgtctgtgcccaacgtgcacggggccctggcccccctggccatccccagcgctgctgctgctgctgctgctgctggaagaattgccatccctggcctggccggggccggcaacagcgtgctgctggtgagcaacctgaaccctgagcgggtgaccccccagagcctcttcatcctgtttggagtgtatggagatgtgcagagggtgaagatcctcttcaacaagaaggaaaatgccctggtgcagatggctgatggcaaccaggcccagctggccatgagccacctgaatggccacaagctgcacggcaagcccatccgcatcaccctgagcaagcaccagaatgtgcagctgccccgggagggccaggaggaccagggcctgaccaaggactatggcaacagccccctgcaccgcttcaagaagccaggcagcaagaacttccagaacatcttcccccccagcgccaccctgcacctgagcaacatccccccatctgtgtctgaggaggacctgaaggtgctcttcagcagcaatggaggagtggtgaagggcttcaagttcttccagaaggacaggaagatggccctgatccagatgggctctgtggaggaggccgtgcaggccctgattgacctgcacaaccacgacctgggggagaaccaccacctgcgggtgtccttcagcaagagcaccatctag

SEQ ID NO: 222507 - DNA, 1653 bp, Artificial Sequence
  derived and/or modified sequence
atggacggcatcgtgcccgacatcgccgtgggcaccaagcggggcagcgatgagctgttttcaacgtgcgtgacaaatggcccttttatcatgagttctaactctgcctctgccgcgaatggaaatgattctaaaaagttcaaaggggactccaggtccgctggagttccaagtagagtgatccacattcgcaaactgccaattgatgttactgagggcgaggtgatttccctgggcctccccttcggaaaggtcaccaatctcctcatgctcaaggggaagaaccaggcatttatcgaaatgaatactgaagaggctgccaacacaatggtcaattactacacatcagttactcccgtgctccgcggccagcctatctacatccagttcagtaaccacaaggaattaaaaactgattcttctcctaatcaagctcgagcacaggcagcccttcaagcagtgaatagtgttcaaagcggtaaccttgcattggcggcctccgctgcggcagttgatgcgggtatggcaatggccgggcagtctcctgtgttgcgcatcatcgtggagaatctgttctaccccgttaccttagatgttttacatcaaatttttagcaagttcggcaccgttttgaagataattacattcactaagaacaatcagtttcaagccctactacagtacgccgatccagtgtctgcccagcatgccaaactgagcttagatggtcaaaacatctacaacgcctgctgtacactccgtattgactttagcaagctgacctcgctgaacgtgaaatacaataatgataagtcccgggattatacgcggcctgatttgccatctggtgacagtcaaccaagcctcgaccagactatggccgcggcgtttgcatccccgtacgctggggctggattcccacctacctttgccattcctcaagctgccggcttgagcgttcccaacgtccacggagcactagctccgctggctattccaagcgctgctgccgccgccgccgccgctggtcggattgcgattcccgggctggcaggagcggggaacagtgtgcttctggtttcaaatttgaatccagagagggttacccctcagtccctattcatcctctttggagtgtacggtgacgtgcaacgcgttaagatcctgttcaacaaaaaggagaatgccctcgttcagatggctgacggcaatcaggctcagttggccatgtcacaccttaatggccataaactccacggcaaacccataagaataactctgagcaaacatcaaaatgtgcagcttccccgcgaaggccaggaggaccagggcctgaccaaagattacggaaactcccccttacatagattcaaaaagccgggtagcaagaatttccagaatatattccctcccagtgctactctccacctgagcaatataccgcccagcgtttcggaagaggatctgaaggttctgttttccagtaacggcggggtggtgaagggttttaaatttttccagaaggaccggaagatggctctgatccaaatggggtctgtggaggaggcagtccaggcccttatcgatctgcacaaccatgacctgggcgaaaaccaccatctgcgagtgagctttagcaagagtacaatctag

SEQ ID NO: 222508 - DNA, 3260 bp, Artificial Sequence
  derived and/or modified sequence
tgcgggcgtctccgccattttgtgagtctataactcggagccgttgggtcggttcctgctattccggcgcctccactccgtcccccgcgggtctgctctgtgtgccatggacggcattgtcccagatatagccgttggtacaaagcggggatctgacgagcttttctctacttgtgtcactaacggaccgtttatcatgagcagcaactcggcttctgcagcaaacggaaatgacagcaagaagttcaaaggtgacagccgaagtgcaggcgtcccctctagagtgatccacatccggaagctccccatcgacgtcacggagggggaagtcatctccctggggctgccctttgggaaggtcaccaacctcctgatgctgaaggggaaaaaccaggccttcatcgagatgaacacggaggaggctgccaacaccatggtgaactactacacctcggtgacccctgtgctgcgcggccagcccatctacatccagttctccaaccacaaggagctgaagaccgacagctctcccaaccaggcgcgggcccaggcggccctgcaggcggtgaactcggtccagtcggggaacctggccttggctgcctcggcggcggccgtggacgcagggatggcgatggccgggcagagccccgtgctcaggatcatcgtggagaacctcttctaccctgtgaccctggatgtgctgcaccagattttctccaagttcggcacagtgttgaagatcatcaccttcaccaagaacaaccagttccaggccctgctgcagtatgcggaccccgtgagcgcccagcacgccaagctgtcgctggacgggcagaacatctacaacgcctgctgcacgctgcgcatcgacttttccaagctcaccagcctcaacgtcaagtacaacaatgacaagagccgtgactacacacgcccagacctgccttccggggacagccagccctcgctggaccagaccatggccgcggccttcgcctctccgtatgcaggagctggtttccctcccacctttgccattcctcaagctgcaggcctttccgttccgaacgtccacggcgccctggcccccctggccatcccctcggcggcggcggcagctgcggcggcaggtcggatcgccatcccgggcctggcgggggcaggaaattctgtattgctggtcagcaacctcaacccagagagagtcacaccccaaagcctctttattcttttcggcgtctacggtgacgtgcagcgcgtgaagatcctgttcaataagaaggagaacgccctagtgcagatggcggacggcaaccaggcccagctggccatgagccacctgaacgggcacaagctgcacgggaagcccatccgcatcacgctctcgaagcaccagaacgtgcagctgccccgcgagggccaggaggaccagggcctgaccaaggactacggcaactcacccctgcaccgcttcaagaagccgggctccaagaacttccagaacatattcccgccctcggccacgctgcacctctccaacatcccgccctcagtctccgaggaggatctcaaggtcctgttttccagcaatgggggcgtcgtcaaaggattcaagttcttccagaaggaccgcaagatggcactgatccagatgggctccgtggaggaggcggtccaggccctcattgacctgcacaaccacgacctcggggagaaccaccacctgcgggtctccttctccaagtccaccatctaggggcacaggcccccacggccgggccccctggcgacaacttccatcattccagagaaaagccactttaaaaacagctgaagtgaccttagcagaccagagattttatttttttaaagagaaatcagtttacctgtttttaaaaaaattaaatctagttcaccttgctcaccctgcggtgacagggacagctcaggctcttggtgactgtggcagcgggagttcccggccctccacacccggggccagaccctcggggccatgccttggtggggcctgtgtcgggcgtggggcctgcaggtgggcgccccgaccacgacttggcttccttgtgccttaaaaaacctgccttcctgcagccacacacccacccggggtgtcctggggacccaaggggtgggggggtcacaccagagagaggcagggggcctggccggctcctgcaggatcatgcagctggggcgcggcggccgcggctgcgacaccccaaccccagccctctaatcaagtcacgtgattctcccttcaccccgcccccagggccttcccttctgcccccaggcgggctccccgctgctccagctgcggagctggtcgacataatctctgtattatatactttgcagttgcagacgtctgtgcctagcaatatttccagttgaccaaatattctaatcttttttcatttatatgcaaaagaaatagttttaagtaactttttatagcaagatgatacaatggtatgagtgtaatctaaacttccttgtggtattaccttgtatgctgttacttttattttattccttgtaattaagtcacaggcaggacccagtttccagagagcaggcggggccgcccagtgggtcaggcacagggagccccggtcctatcttagagcccctgagcttcagggaaggggcgggcgtgtcgccgcctctggcatcgcctccggttgccttacaccacgccttcacctgcagtcgcctagaaaacttgctctcaaacttcagggttttttcttccttcaaattttggaccaaagtctcatttctgtgttttgcctgcctctgatgctgggacccggaaggcgggcgctcctcctgtcttctctgtgctctttctaccgcccccgcgtcctgtcccgggggctctcctaggatcccctttccgtaaaagcgtgtaacaagggtgtaaatatttataattttttatacctgttgtgagacccgaggggcggcggcgcggttttttatggtgacacaaatgtatattttgctaacagcaattccaggctcagtattgtgaccgcggagccacaggggaccccacgcacattccgttgccttacccgatggcttgtgacgcggagagaaccgattaaaaccgtttgagaaactcctcccttgtctagccctgtgttcgctgtggacgctgtagaggcaggttggccagtctgtacctggacttcgaataaatcttctgtatcctcgctccgttccgcctt

SEQ ID NO: 222509 - DNA, 1653 bp, Artificial Sequence
  derived and/or modified sequence
atggatggaatagtacccgatatcgccgtcggtacaaaaagagggagtgacgaactcttctctacctgtgttaccaacggccctttcatcatgtcgtcaaattcggccagcgcggcaaacggcaatgactcgaagaagtttaaaggcgatagccgatcagcaggcgtgcctagtcgggtgatccacattaggaagttgcctattgatgtgacagaaggtgaagtcataagtctcggactaccattcgggaaggttacaaacctcctcatgctgaaaggaaagaaccaagctttcatcgagatgaacaccgaggaggccgctaacaccatggttaactattatacatccgtcactcccgtgctccgcggtcagcccatttatatccagttttctaatcataaggagctgaagaccgacagctccccaaaccaggcccgagctcaggccgcattacaggccgttaactctgtccagtctggcaacctggctctcgcggcaagtgccgctgccgtggacgccggtatggcaatggccggacagtcccccgttttaaggattatcgtggagaatctgttctatcctgttactctagacgtgctccatcagatctttagcaagttcgggaccgtgttgaagattatcacttttacaaaaaacaaccagtttcaggctctgctgcagtatgccgaccccgtctctgcccagcacgccaaactgagcttggacgggcagaacatttataatgcatgttgcaccctccgaatcgacttctcaaagctgacaagtttaaatgtaaaatacaacaacgacaagtcccgtgactacactaggcctgacttaccgtccggtgatagtcagcccagccttgatcaaacaatggcagccgctttcgctagcccatacgccggtgcgggattccccccaacttttgctattcctcaggctgccggtttgagtgtacctaatgtacacggtgctttagcacctttggcgataccctcagctgccgctgccgctgccgcagccggaagaatagccatccctggtctggccggtgccggaaactcggttctcctcgtgtctaatctgaaccccgagcgcgtaacccctcagtccctttttattctgttcggcgtgtacggcgacgtacagcgagtaaaaatcttgttcaacaagaaggagaacgcccttgtgcagatggctgacggcaaccaggctcagcttgctatgtctcacttgaatggccacaaattgcacggcaagcccattagaattacactgtcaaaacatcaaaacgtccagctcccgagggagggccaggaagaccagggcctaaccaaagattatggtaacagtcctcttcaccgatttaaaaaacctggctctaaaaatttccagaatattttccctccaagtgccacactccatctcagcaatattcccccatcagtctccgaagaggacctgaaggtgctgttctcgagtaacggaggtgtggtgaagggattcaagttctttcaaaaggacagaaaaatggcattaattcagatgggttccgtggaggaagcagtgcaggctctcattgacctgcataatcacgatcttggcgagaaccaccacctcagggtctcctttagcaagagcacgatttag

SEQ ID NO: 222510 - DNA, 1653 bp, Artificial Sequence
  derived and/or modified sequence
atggacggcatcgtgcccgacatcgccgtgggcaccaagagaggcagcgacgagctgttcagcacctgcgtgaccaacggccccttcatcatgagcagcaacagcgccagcgccgccaacggcaacgacagcaagaagttcaagggcgacagcagaagcgccggcgtgcccagcagagtgatccacatcagaaagctgcccatcgacgtgaccgagggcgaggtgatcagcctgggcctgcccttcggcaaggtgaccaacctgctgatgctgaagggcaagaaccaggccttcatcgagatgaacaccgaggaggccgccaacaccatggtgaactactacaccagcgtgacccccgtgctgagaggccagcccatctacatccagttcagcaaccacaaggagctgaagaccgacagcagccccaaccaggccagagcccaggccgccctgcaggccgtgaacagcgtgcagagcggcaacctggccctggccgccagcgccgccgccgtggacgccggcatggccatggccggccagagccccgtgctgagaatcatcgtggagaacctgttctaccccgtgaccctggacgtgctgcaccagatcttcagcaagttcggcaccgtgctgaagatcatcaccttcaccaagaacaaccagttccaggccctgctgcagtacgccgaccccgtgagcgcccagcacgccaagctgagcctggacggccagaacatctacaacgcctgctgcaccctgagaatcgacttcagcaagctgaccagcctgaacgtgaagtacaacaacgacaagagcagagactacaccagacccgacctgcccagcggcgacagccagcccagcctggaccagaccatggccgccgccttcgccagcccctacgccggcgccggcttcccccccaccttcgccatcccccaggccgccggcctgagcgtgcccaacgtgcacggcgccctggcccccctggccatccccagcgccgccgccgccgccgccgccgccggcagaatcgccatccccggcctggccggcgccggcaacagcgtgctgctggtgagcaacctgaaccccgagagagtgaccccccagagcctgttcatcctgttcggcgtgtacggcgacgtgcagagagtgaagatcctgttcaacaagaaggagaacgccctggtgcagatggccgacggcaaccaggcccagctggccatgagccacctgaacggccacaagctgcacggcaagcccatcagaatcaccctgagcaagcaccagaacgtgcagctgcccagagagggccaggaggaccagggcctgaccaaggactacggcaacagccccctgcacagattcaagaagcccggcagcaagaacttccagaacatcttcccccccagcgccaccctgcacctgagcaacatcccccccagcgtgagcgaggaggacctgaaggtgctgttcagcagcaacggcggcgtggtgaagggcttcaagttcttccagaaggacagaaagatggccctgatccagatgggcagcgtggaggaggccgtgcaggccctgatcgacctgcacaaccacgacctgggcgagaaccaccacctgagagtgagcttcagcaagagcaccatctag

SEQ ID NO: 222511 - protein, 531 aa, Artificial Sequence
  derived and/or modified sequence
MDGIVPDIAVGTKRGSDELFSTCVTNGPFIMSSNSASAANGNDSKKFKGDSRSAGVPSRVIHIRKLPIDVTEGEVISLGLPFGKVTNLLMLKGKNQAFIEMNTEEAANTMVNYYTSVTPVLRGQPIYIQFSNHKELKTDSSPNQARAQAALQAVNSVQSGNLALAASAAAVDAGMAMAGQSPVLRIIVENLFYPVTLDVLHQIFSKFGTVLKIITFTKNNQFQALLQYADPVSAQHAKLSLDGQNIYNACCTLRIDFSKLTSLNVKYNNDKSRDYTRPDLPSGDSQPSLDQTMAAAFGLSVPNVHGALAPLAIPSAAAAAAAAGRIAIPGLAGAGNSVLLVSNLNPERVTPQSLFILFGVYGDVQRVKILFNKKENALVQMADGNQAQLAMSHLNGHKLHGKPIRITLSKHQNVQLPREGQEDQGLTKDYGNSPLHRFKKPGSKNFQNIFPPSATLHLSNIPPSVSEEDLKVLFSSNGGVVKGFKFFQKDRKMALIQMGSVEEAVQALIDLHNHDLGENHHLRVSFSKSTI

SEQ ID NO: 222512 - DNA, 1596 bp, Artificial Sequence
  derived and/or modified sequence
atggacgggatagtccccgacattgcggtggggacaaaacgcggaagtgatgagctgttcagcacttgcgtaactaatggtccattcattatgtctagcaatagcgcgtcagcggctaatggcaacgactcaaaaaaatttaagggtgattctcgatcagccggtgtcccctcaagagtcatccacatccggaaattaccaatagatgttactgaaggcgaggtgattagcctgggtctgccattcgggaaggtcacaaatctgctcatgctcaagggtaaaaaccaggcatttattgagatgaacacagaagaggccgctaacaccatggtgaactattacactagtgtaacgccagtgttgcgcgggcagcctatttacatccagttctctaaccacaaagaactgaagaccgatagcagccctaatcaggcccgagcacaagccgcactgcaagccgtgaactccgtgcaaagtggcaatctggcgctggccgccagcgcagctgcagtcgacgctgggatggcaatggcaggtcaaagtcccgtgctaaggatcatagtcgaaaacttgttctatccggttacgttagatgttttgcatcagatcttcagcaagttcgggaccgtgctgaaaataataaccttcaccaagaataaccagttccaggccctgctccagtacgcagacccagtgtctgctcagcatgcaaagctgagcctggacgggcaaaatatttataatgcatgctgcacactgcgcatcgacttttctaagttgacttctctgaacgtgaagtataacaatgacaaatcaagagactacacccgcccggatctgccttctggagacagccagcccagtctggatcagaccatggccgctgctttcgggttaagtgtgccaaacgtgcatggcgctctggcgcctttggcgatcccgtctgccgcagccgcggctgctgctgcaggcagaattgcaatccccgggttggctggtgcgggaaactctgtcctactcgtgtctaacctaaatcctgaacgggttacgccacagagcctgttcattctctttggagtgtatggagatgtccaacgggtgaaaatccttttcaataaaaaggaaaatgcactcgtgcagatggccgacggcaatcaggcccaattagccatgagccatcttaacggtcataaactccatggaaaacctatcagaatcactctgagcaaacaccagaatgtgcagcttcctagggagggtcaagaagaccagggcttaacaaaagattatgggaactctccattacacaggtttaagaagccagggtcaaagaattttcagaatatctttcctccgtccgctaccctgcatttatcaaacatcccaccttccgtttccgaggaagatttgaaggtgttgttcagttcgaacggaggagtggtgaagggtttcaagttttttcagaaggatagaaagatggccctcatacagatgggctctgttgaggaggctgtacaggcactcattgaccttcataaccacgacctgggtgaaaatcaccacttgcgagttagcttttccaaatctaccatctag

SEQ ID NO: 222513 - DNA, 594 bp, Artificial Sequence
  derived and/or modified sequence
atggacggaatagtacctgatattgccgtgggcacgaagagggttacaccacagtcattgttcatcctttttggggtgtacggggatgtgcagcgcgtcaaaatcctattcaataagaaagaaaacgctctcgttcaaatggccgacgggaatcaagcccagctcgccatgtctcacctcaatggtcacaagctgcacggtaaacctattagaatcacattatcaaagcatcagaatgtacagctgccaagagagggccaagaggatcagggtctcacgaaagactatgggaatagcccactccatagatttaaaaaaccgggctctaagaattttcagaacatcttccccccctctgctacccttcatctgtccaacattcccccgagtgtgtcagaggaggacctgaaagtcctcttttctagcaatggcggcgtggtcaagggttttaaattcttccagaaggatcgcaaaatggccctgattcagatggggagcgttgaagaagctgttcaggctctgatcgacttgcataaccacgacttgggcgagaatcaccacctgagagtgtcctttagtaaaagcacgatttag

SEQ ID NO: 222514 - DNA, 1596 bp, Artificial Sequence
  derived and/or modified sequence
atggatggcatcgtgcctgacattgctgtgggcaccaagaggggcagtgatgagctgttcagcacctgtgtgaccaacggccccttcatcatgagcagcaacagcgccagcgctgccaatggaaatgacagcaagaagttcaagggggacagccgctctgctggggtgcccagcagggtcatccacatcaggaagctgcccattgatgtgacagaaggagaggtgatcagcctgggcctgccctttgggaaggtgaccaacctgctgatgctgaagggcaagaaccaggccttcatcgagatgaacacagaggaggccgccaacaccatggtgaactactacacctctgtgacccctgtgctgcggggccagcccatctacatccagttcagcaaccacaaggagctgaagacagacagcagccccaaccaggcccgggcccaggccgccctgcaggccgtgaacagcgtgcagagcggcaacctggccctggccgccagcgctgctgctgtggatgctggcatggccatggccggccagagccctgtgctgcgcatcatcgtggagaacctcttctaccctgtgaccctggatgtgctgcaccagatcttcagcaagtttggaacagtgctgaagatcatcaccttcaccaagaacaaccagttccaggccctgctgcagtatgctgaccctgtgtctgcccagcacgccaagctgagcctggatggccagaacatctacaatgcctgctgcaccctgagaattgacttcagcaagctgaccagcctgaatgtgaagtacaacaatgacaagagccgggactacaccaggccagacctgcccagcggggacagccagcccagcctggaccagaccatggctgctgccttcggcctgtctgtgcccaacgtgcatggagccctggcccccctggccatccccagcgctgctgctgctgctgctgctgctggccgcatcgccatccctggcctggccggggccggcaacagcgtgctgctggtgagcaacctgaaccctgagcgggtgaccccccagagcctcttcatcctgtttggagtgtatggagatgtgcagagggtgaagatcctcttcaacaagaaggaaaatgccctggtgcagatggctgatggcaaccaggcccagctggccatgagccacctgaatggccacaagctgcacggcaagcccatccgcatcaccctgagcaagcaccagaatgtgcagctgccccgggagggccaggaggaccagggcctgaccaaggactatggcaacagccccctgcaccgcttcaagaagccaggcagcaagaacttccagaacatcttccccccatctgccaccctgcacctgagcaacatcccccccagcgtgtctgaggaggacctgaaggtgctcttcagcagcaatggaggagtggtgaagggcttcaagttcttccagaaggacaggaagatggccctgatccagatgggctctgtggaggaggccgtgcaggccctgattgacctgcacaaccacgacctgggggagaaccaccacctgcgggtgtccttcagcaagagcaccatctag

SEQ ID NO: 222515 - DNA, 594 bp, Artificial Sequence
  derived and/or modified sequence
atggatggcatcgtgcctgacattgctgtgggcaccaagagggtgaccccccagagcctcttcatcctgtttggagtgtatggagatgtgcagagggtgaagatcctcttcaacaagaaggaaaatgccctggtgcagatggctgatggcaaccaggcccagctggccatgagccacctgaatggccacaagctgcacggcaagcccatccgcatcaccctgagcaagcaccagaatgtgcagctgccccgggagggccaggaggaccagggcctgaccaaggactatggcaacagccccctgcaccgcttcaagaagccaggcagcaagaacttccagaacatcttccccccatctgccaccctgcacctgagcaacatcccccccagcgtgtctgaggaggacctgaaggtgctcttcagcagcaatggaggagtggtgaagggcttcaagttcttccagaaggacaggaagatggccctgatccagatgggctctgtggaggaggccgtgcaggccctgattgacctgcacaaccacgacctgggggagaaccaccacctgcgggtgtccttcagcaagagcaccatctag

SEQ ID NO: 222516 - DNA, 1596 bp, Artificial Sequence
  derived and/or modified sequence
atggacggcatcgtgcccgacatcgccgtgggcaccaagcggggctccgatgaactcttctcgacttgcgtgacaaatggtccctttatcatgtcaagcaattctgcttccgccgccaacggaaacgactctaaaaagttcaaaggagacagccgatctgccggtgttccgtctagagtgattcacataagaaagctccccatcgatgtgaccgagggagaggtgatatctctcggactccccttcggcaaggtaactaaccttctgatgctgaaaggaaaaaaccaggcattcatagaaatgaataccgaggaagccgcaaataccatggtaaactattatacttctgtgacccctgtcctgcggggccagccaatctacatccaattttcaaaccataaggagctcaaaactgactcatcgcctaaccaggcgcgcgcacaagcagctttgcaggcagttaacagcgtccaatcaggaaatctggcactggcagcttcagcggcagctgttgatgcggggatggccatggccggtcagtcgcctgtgctgaggattattgtggagaacctattctacccagtcactctggatgtgcttcaccagattttttccaagtttggaaccgtgctgaaaatcattaccttcaccaagaataatcagttccaggcgctcctgcaatacgctgatccagtgtcagcccaacatgcaaagctgtctctcgacggccaaaacatctacaacgcctgctgcaccctgaggatcgatttcagcaagctgacatccctcaatgtgaagtacaacaatgacaagtcaagagactacaccagacctgatcttcctagtggagattcgcagcctagcctcgatcagactatggccgccgccttcggattgtccgtgcctaatgtgcatggtgccctagctccactagctattccatcagcagccgctgctgcagctgctgcgggccgcatcgccatcccaggactcgcaggcgctggaaactctgtgttgttggtgtctaaccttaatccagaacgggtgaccccacagagtctgttcattcttttcggcgtctatggggacgttcaaagagtcaaaattctcttcaacaaaaaagagaacgcgttagttcagatggccgatgggaaccaggcccagctggctatgtctcacttaaacggccacaaacttcatggtaagcccatcagaataactttgagtaaacatcagaacgtgcaactacctcgagagggccaggaggaccaaggactgaccaaggactatggcaattcaccactgcatagatttaagaaacctgggtctaagaacttccagaatatcttccccccgagtgctacccttcacttgagcaatatcccaccctcagtgagcgaagaggacctgaaggtcttatttagtagtaacggaggcgtcgtcaagggtttcaagttcttccagaaggaccggaagatggcattgattcagatgggatccgtcgaggaggcagtacaggccctgattgacctgcacaaccacgacttaggtgaaaaccaccatctgcgtgtctcattcagtaagtccacaatctag

SEQ ID NO: 222517 - DNA, 594 bp, Artificial Sequence
  derived and/or modified sequence
atggacggcatcgtgcccgacatcgccgtgggcaccaagcgggtgaccccacagagtctgttcatcttgttcggggtgtatggggacgtccaacgggttaagattctgttcaacaagaaagagaacgccttggtgcagatggccgatgggaatcaggctcagctggccatgagtcacttgaatgggcataagttgcacgggaaacctatccgcataactctttccaaacatcaaaacgtacagctgccccgagaaggacaagaggaccagggccttacaaaggattatggcaatagtcccttgcaccgatttaagaaaccgggttcaaagaacttccagaacatctttcccccgtcggccactctccacctgtcaaatatacctcctagcgtctcagaggaagacctgaaggtgctgtttagttctaacggcggcgtggtcaaaggttttaagttcttccagaaggatagaaagatggccttaattcaaatgggctctgtggaggaagccgtccaggcgttaatcgacttgcacaaccatgacctgggtgagaatcaccatctgcgtgttagcttcagcaagtctacgatttag

SEQ ID NO: 222518 - DNA, 3203 bp, Artificial Sequence
  derived and/or modified sequence
tgcgggcgtctccgccattttgtgagtctataactcggagccgttgggtcggttcctgctattccggcgcctccactccgtcccccgcgggtctgctctgtgtgccatggacggcattgtcccagatatagccgttggtacaaagcggggatctgacgagcttttctctacttgtgtcactaacggaccgtttatcatgagcagcaactcggcttctgcagcaaacggaaatgacagcaagaagttcaaaggtgacagccgaagtgcaggcgtcccctctagagtgatccacatccggaagctccccatcgacgtcacggagggggaagtcatctccctggggctgccctttgggaaggtcaccaacctcctgatgctgaaggggaaaaaccaggccttcatcgagatgaacacggaggaggctgccaacaccatggtgaactactacacctcggtgacccctgtgctgcgcggccagcccatctacatccagttctccaaccacaaggagctgaagaccgacagctctcccaaccaggcgcgggcccaggcggccctgcaggcggtgaactcggtccagtcggggaacctggccttggctgcctcggcggcggccgtggacgcagggatggcgatggccgggcagagccccgtgctcaggatcatcgtggagaacctcttctaccctgtgaccctggatgtgctgcaccagattttctccaagttcggcacagtgttgaagatcatcaccttcaccaagaacaaccagttccaggccctgctgcagtatgcggaccccgtgagcgcccagcacgccaagctgtcgctggacgggcagaacatctacaacgcctgctgcacgctgcgcatcgacttttccaagctcaccagcctcaacgtcaagtacaacaatgacaagagccgtgactacacacgcccagacctgccttccggggacagccagccctcgctggaccagaccatggccgcggccttcggcctttccgttccgaacgtccacggcgccctggcccccctggccatcccctcggcggcggcggcagctgcggcggcaggtcggatcgccatcccgggcctggcgggggcaggaaattctgtattgctggtcagcaacctcaacccagagagagtcacaccccaaagcctctttattcttttcggcgtctacggtgacgtgcagcgcgtgaagatcctgttcaataagaaggagaacgccctagtgcagatggcggacggcaaccaggcccagctggccatgagccacctgaacgggcacaagctgcacgggaagcccatccgcatcacgctctcgaagcaccagaacgtgcagctgccccgcgagggccaggaggaccagggcctgaccaaggactacggcaactcacccctgcaccgcttcaagaagccgggctccaagaacttccagaacatattcccgccctcggccacgctgcacctctccaacatcccgccctcagtctccgaggaggatctcaaggtcctgttttccagcaatgggggcgtcgtcaaaggattcaagttcttccagaaggaccgcaagatggcactgatccagatgggctccgtggaggaggcggtccaggccctcattgacctgcacaaccacgacctcggggagaaccaccacctgcgggtctccttctccaagtccaccatctaggggcacaggcccccacggccgggccccctggcgacaacttccatcattccagagaaaagccactttaaaaacagctgaagtgaccttagcagaccagagattttatttttttaaagagaaatcagtttacctgtttttaaaaaaattaaatctagttcaccttgctcaccctgcggtgacagggacagctcaggctcttggtgactgtggcagcgggagttcccggccctccacacccggggccagaccctcggggccatgccttggtggggcctgtgtcgggcgtggggcctgcaggtgggcgccccgaccacgacttggcttccttgtgccttaaaaaacctgccttcctgcagccacacacccacccggggtgtcctggggacccaaggggtgggggggtcacaccagagagaggcagggggcctggccggctcctgcaggatcatgcagctggggcgcggcggccgcggctgcgacaccccaaccccagccctctaatcaagtcacgtgattctcccttcaccccgcccccagggccttcccttctgcccccaggcgggctccccgctgctccagctgcggagctggtcgacataatctctgtattatatactttgcagttgcagacgtctgtgcctagcaatatttccagttgaccaaatattctaatcttttttcatttatatgcaaaagaaatagttttaagtaactttttatagcaagatgatacaatggtatgagtgtaatctaaacttccttgtggtattaccttgtatgctgttacttttattttattccttgtaattaagtcacaggcaggacccagtttccagagagcaggcggggccgcccagtgggtcaggcacagggagccccggtcctatcttagagcccctgagcttcagggaaggggcgggcgtgtcgccgcctctggcatcgcctccggttgccttacaccacgccttcacctgcagtcgcctagaaaacttgctctcaaacttcagggttttttcttccttcaaattttggaccaaagtctcatttctgtgttttgcctgcctctgatgctgggacccggaaggcgggcgctcctcctgtcttctctgtgctctttctaccgcccccgcgtcctgtcccgggggctctcctaggatcccctttccgtaaaagcgtgtaacaagggtgtaaatatttataattttttatacctgttgtgagacccgaggggcggcggcgcggttttttatggtgacacaaatgtatattttgctaacagcaattccaggctcagtattgtgaccgcggagccacaggggaccccacgcacattccgttgccttacccgatggcttgtgacgcggagagaaccgattaaaaccgtttgagaaactcctcccttgtctagccctgtgttcgctgtggacgctgtagaggcaggttggccagtctgtacctggacttcgaataaatcttctgtatcctcgctccgttccgcctt

SEQ ID NO: 222519 - DNA, 2201 bp, Artificial Sequence
  derived and/or modified sequence
tgcgggcgtctccgccattttgtgagtctataactcggagccgttgggtcggttcctgctattccggcgcctccactccgtcccccgcgggtctgctctgtgtgccatggacggcattgtcccagatatagccgttggtacaaagagagtcacaccccaaagcctctttattcttttcggcgtctacggtgacgtgcagcgcgtgaagatcctgttcaataagaaggagaacgccctagtgcagatggcggacggcaaccaggcccagctggccatgagccacctgaacgggcacaagctgcacgggaagcccatccgcatcacgctctcgaagcaccagaacgtgcagctgccccgcgagggccaggaggaccagggcctgaccaaggactacggcaactcacccctgcaccgcttcaagaagccgggctccaagaacttccagaacatattcccgccctcggccacgctgcacctctccaacatcccgccctcagtctccgaggaggatctcaaggtcctgttttccagcaatgggggcgtcgtcaaaggattcaagttcttccagaaggaccgcaagatggcactgatccagatgggctccgtggaggaggcggtccaggccctcattgacctgcacaaccacgacctcggggagaaccaccacctgcgggtctccttctccaagtccaccatctaggggcacaggcccccacggccgggccccctggcgacaacttccatcattccagagaaaagccactttaaaaacagctgaagtgaccttagcagaccagagattttatttttttaaagagaaatcagtttacctgtttttaaaaaaattaaatctagttcaccttgctcaccctgcggtgacagggacagctcaggctcttggtgactgtggcagcgggagttcccggccctccacacccggggccagaccctcggggccatgccttggtggggcctgtgtcgggcgtggggcctgcaggtgggcgccccgaccacgacttggcttccttgtgccttaaaaaacctgccttcctgcagccacacacccacccggggtgtcctggggacccaaggggtgggggggtcacaccagagagaggcagggggcctggccggctcctgcaggatcatgcagctggggcgcggcggccgcggctgcgacaccccaaccccagccctctaatcaagtcacgtgattctcccttcaccccgcccccagggccttcccttctgcccccaggcgggctccccgctgctccagctgcggagctggtcgacataatctctgtattatatactttgcagttgcagacgtctgtgcctagcaatatttccagttgaccaaatattctaatcttttttcatttatatgcaaaagaaatagttttaagtaactttttatagcaagatgatacaatggtatgagtgtaatctaaacttccttgtggtattaccttgtatgctgttacttttattttattccttgtaattaagtcacaggcaggacccagtttccagagagcaggcggggccgcccagtgggtcaggcacagggagccccggtcctatcttagagcccctgagcttcagggaaggggcgggcgtgtcgccgcctctggcatcgcctccggttgccttacaccacgccttcacctgcagtcgcctagaaaacttgctctcaaacttcagggttttttcttccttcaaattttggaccaaagtctcatttctgtgttttgcctgcctctgatgctgggacccggaaggcgggcgctcctcctgtcttctctgtgctctttctaccgcccccgcgtcctgtcccgggggctctcctaggatcccctttccgtaaaagcgtgtaacaagggtgtaaatatttataattttttatacctgttgtgagacccgaggggcggcggcgcggttttttatggtgacacaaatgtatattttgctaacagcaattccaggctcagtattgtgaccgcggagccacaggggaccccacgcacattccgttgccttacccgatggcttgtgacgcggagagaaccgattaaaaccgtttgagaaactcctcccttgtctagccctgtgttcgctgtggacgctgtagaggcaggttggccagtctgtacctggacttcgaataaatcttctgtatcctcgctccgttccgcctt

SEQ ID NO: 222520 - DNA, 1596 bp, Artificial Sequence
  derived and/or modified sequence
atggacggcatagtccctgatatagcggttgggactaaaagagggtcggacgaattgttctctacatgtgtcaccaatggcccattcattatgtcctcaaatagcgcaagcgccgctaacggcaatgattctaagaagtttaagggcgactctcgttccgctggcgtcccatctcgagtgatccacattagaaaattgcccatcgatgtgactgaaggagaagttataagtttgggcctgccttttggtaaagtgactaacctgttaatgctcaagggtaagaaccaagccttcatagaaatgaataccgaagaggccgcaaataccatggttaattattatacatcagtgacacctgtacttagggggcagcccatttacattcagttctctaatcacaaagagctgaagaccgattcatctccaaaccaggcgagagctcaggccgcactgcaggccgtcaactccgtccagtccggaaatcttgccctagcagctagtgctgccgctgtagacgccggaatggctatggcaggccagtccccagtcctccgaatcatagtcgagaatctcttttaccccgtaaccctggatgtcttgcaccagatcttttctaagttcggcactgtgctcaaaattataacatttaccaagaataatcagttccaggccttgctccagtacgcggatcccgtatccgctcaacacgctaagctttcgctggacggccagaacatctacaacgcctgctgcacactgcggattgatttttcaaaactgacgtcactcaacgtgaagtacaataacgacaaatcacgcgattatactcgacctgacctcccgtcaggagactctcagccgtcattggaccagactatggccgcagccttcggactgtccgtaccaaacgtacacggcgcattagccccacttgccatcccttccgccgcagctgcagccgctgctgccggtcggatcgcgatccccggattagccggagccggaaatagcgtgttactcgtcagcaaccttaaccccgaacgcgttactccccagagtctgttcattctttttggcgtgtatggcgatgtgcagagggtcaagatcctctttaacaagaaagagaacgccctggtccagatggctgatgggaaccaggcccagttggccatgtcccaccttaacggccataaactccacggcaaacctattaggatcaccctgagtaaacaccaaaacgttcagctgccgcgagaaggacaggaagatcaagggctaacaaaggattatggaaactctcctctgcataggttcaaaaagcctggcagcaagaatttccagaatatatttcctccaagcgccaccctgcacctttcgaacatcccgccttctgtttccgaagaggatctgaaggtcctattttcatctaacgggggagttgtaaaggggtttaagttcttccagaaggataggaagatggccctgattcagatgggctctgtggaagaagccgtgcaggctctcatcgatctccataatcacgacctgggggagaaccaccacttgcgcgtgtcatttagcaaaagcacaatttag

SEQ ID NO: 222521 - DNA, 594 bp, Artificial Sequence
  derived and/or modified sequence
atggatggaattgttccagacattgcggtagggacaaaacgggtcacgccccagtctctgttcatcttgtttggagtgtacggagacgtgcagcgcgtaaagatcctctttaataagaaggaaaatgcgttggtgcagatggcagacggaaatcaggcacagttggccatgtcacacctcaacgggcacaagctacatgggaagcccattagaattaccttgtctaagcaccagaatgttcagctgcccagggaaggccaagaagaccagggtctcaccaaagactacggcaacagtcccctacacagattcaagaaacccggttctaagaattttcagaacattttccccccaagcgccaccttgcacttgagtaacatacccccttcggtttcagaggaggacctgaaggtgctgttttcatcaaacggaggagtagtcaaaggcttcaaattctttcagaaggacagaaaaatggcgctaatccagatgggatccgttgaagaggcagtgcaagcacttatagatttacacaaccacgacttaggcgaaaaccatcacctgcgggtgagtttctccaagtcaacaatctag

SEQ ID NO: 222522 - DNA, 1596 bp, Artificial Sequence
  derived and/or modified sequence
atggacggcatcgtgcccgacatcgccgtgggcaccaagagaggcagcgacgagctgttcagcacctgcgtgaccaacggccccttcatcatgagcagcaacagcgccagcgccgccaacggcaacgacagcaagaagttcaagggcgacagcagaagcgccggcgtgcccagcagagtgatccacatcagaaagctgcccatcgacgtgaccgagggcgaggtgatcagcctgggcctgcccttcggcaaggtgaccaacctgctgatgctgaagggcaagaaccaggccttcatcgagatgaacaccgaggaggccgccaacaccatggtgaactactacaccagcgtgacccccgtgctgagaggccagcccatctacatccagttcagcaaccacaaggagctgaagaccgacagcagccccaaccaggccagagcccaggccgccctgcaggccgtgaacagcgtgcagagcggcaacctggccctggccgccagcgccgccgccgtggacgccggcatggccatggccggccagagccccgtgctgagaatcatcgtggagaacctgttctaccccgtgaccctggacgtgctgcaccagatcttcagcaagttcggcaccgtgctgaagatcatcaccttcaccaagaacaaccagttccaggccctgctgcagtacgccgaccccgtgagcgcccagcacgccaagctgagcctggacggccagaacatctacaacgcctgctgcaccctgagaatcgacttcagcaagctgaccagcctgaacgtgaagtacaacaacgacaagagcagagactacaccagacccgacctgcccagcggcgacagccagcccagcctggaccagaccatggccgccgccttcggcctgagcgtgcccaacgtgcacggcgccctggcccccctggccatccccagcgccgccgccgccgccgccgccgccggcagaatcgccatccccggcctggccggcgccggcaacagcgtgctgctggtgagcaacctgaaccccgagagagtgaccccccagagcctgttcatcctgttcggcgtgtacggcgacgtgcagagagtgaagatcctgttcaacaagaaggagaacgccctggtgcagatggccgacggcaaccaggcccagctggccatgagccacctgaacggccacaagctgcacggcaagcccatcagaatcaccctgagcaagcaccagaacgtgcagctgcccagagagggccaggaggaccagggcctgaccaaggactacggcaacagccccctgcacagattcaagaagcccggcagcaagaacttccagaacatcttcccccccagcgccaccctgcacctgagcaacatcccccccagcgtgagcgaggaggacctgaaggtgctgttcagcagcaacggcggcgtggtgaagggcttcaagttcttccagaaggacagaaagatggccctgatccagatgggcagcgtggaggaggccgtgcaggccctgatcgacctgcacaaccacgacctgggcgagaaccaccacctgagagtgagcttcagcaagagcaccatctag

SEQ ID NO: 222523 - DNA, 594 bp, Artificial Sequence
  derived and/or modified sequence
atggacggcatcgtgcccgacatcgccgtgggcaccaagagagtgaccccccagagcctgttcatcctgttcggcgtgtacggcgacgtgcagagagtgaagatcctgttcaacaagaaggagaacgccctggtgcagatggccgacggcaaccaggcccagctggccatgagccacctgaacggccacaagctgcacggcaagcccatcagaatcaccctgagcaagcaccagaacgtgcagctgcccagagagggccaggaggaccagggcctgaccaaggactacggcaacagccccctgcacagattcaagaagcccggcagcaagaacttccagaacatcttcccccccagcgccaccctgcacctgagcaacatcccccccagcgtgagcgaggaggacctgaaggtgctgttcagcagcaacggcggcgtggtgaagggcttcaagttcttccagaaggacagaaagatggccctgatccagatgggcagcgtggaggaggccgtgcaggccctgatcgacctgcacaaccacgacctgggcgagaaccaccacctgagagtgagcttcagcaagagcaccatctag

SEQ ID NO: 222524 - protein, 228 aa, Artificial Sequence
  derived and/or modified sequence
MADFDTYDDRAYSSFGGGRGSRGSAGGHGSRSQKELPTEPPYTAYVGNLPFNTVQGDIDAIFKDLSIRSVRLVRDKDTDKFKGFCYVEFDEVDSLKEALTYDGALLGDRSLRVDIAEGRKQDKGGFGFRKGGPDDRGFRDDFLGGRGGSRPGDRRTGPPMGSRFRDGPPLRGSNMDFREPTEEERAQRPRLQLKPRTVATPLNQVANPNSAIFGGARPREEVVQKEQE

SEQ ID NO: 222525 - DNA, 2503 bp, Artificial Sequence
  derived and/or modified sequence
ctggttcctctcggagcggagacggcaaatggcggacttcgacacctacgacgatcgggcctacagcagcttcggcggcggcagagggtcccgcggcagtgctggtggccatggttcccgtagccagaaggagttgcccacagagcccccctacacagcatacgtaggaaatctacctttcaatacggttcagggcgacatagatgctatctttaaggatctcagcataaggagtgtacggctagtcagagacaaagacacagataaatttaaaggattctgctatgtagaattcgatgaagtggattcccttaaggaagccttgacatacgatggtgcactgttgggcgatcggtcacttcgtgtggacattgcagaaggcagaaaacaagataaaggtggctttggattcagaaaaggtggaccagatgacagaggcttcagggatgacttcttagggggcaggggaggtagtcgcccaggcgaccggcgaacaggcccccccatgggcagccgcttcagagatggccctcccctccgtggatccaacatggatttcagagaacccacagaagaggaaagagcacagagaccacgactccagcttaaacctcgaacagtcgcgacgcccctcaatcaagtagccaatcccaactctgctatcttcgggggtgccaggcctagagaggaagtcgttcaaaaggagcaagaatgagcctgcggttgggagggaatggggcgtggggggttagagcaggaccacagcctggtgagtccccgggcagccgtcctgcagccgccactcctgcgcctgccattggcctcctcacagcggaaacacagcttgtgagtgcatgtcagctgttaacaagtggtttttagtacattctgggctttgctgtatctatctagtgcctgtttgtgcgtttttttctttcttccgctgcttccccattttccttctgtcctttttctcctgctccttgttttcccagcagcacatggggttcctcggaggagcagaggtggccgccgtgggggggcgtttgggctgcggtgctgcgtcatttttcctttgctttctctttactttagacactggcccaactccaggcgtttcctttcattccctcagtgcttctcttctgacctgcatgttgagttctgtattgctggggcttccaacaaaaaccagagtcactgacagagggaacagcagagaccttgttggtattcagctgtgatggatatagagaatcagaggcaccttgttttcacaactaggataaaaatatctgcagggtcctttccattcctatttagagggagtcctggctccatgaccccctcccgagtggactgtccaagcagataggctcacacgagaaacagtgaggctgaaagggggggctatggaagagcggtagggagtccacggagaagatgcagtgaatgcttgcatgcattcacacgtgtgtgtgtcccagctagttcactcctttcgccgtgcgtggtggaggctggcctctctggctgggtgcagtgaatggccagcgggtttcttttctgctgggccaaggcgctttgggggtggagggggtggtgctggtgctgcactgggctgactgcggcgctgacgcagcgtttccccccatccctgttgcctgtgtgttgtgtggatctgttcctagtataggcaacataatgagatactgtgcttcccacctccccttcagttcagagccaaaatgggtctagaatctggcactttactcatttcctttgataaattgtactatgcagagctgtcaggaaccttcagatagcagtagaggactgcagctgtctaggtctgcggccacatcttggggacacactggactgttcccatgtgcagggttcagcagttatgtgggagtgctaggggttaggcttttgagcttgaacgcctgcgtgtgaacagatgaaaaatccttcagtacccaagtcccagtctgtcctatggggagcagtttgggggcggccggcagcaggagcctgggaaagaggccctcgccaggtgatggcagggccagggtggcctggggcacccagcggaatgtgcttagtatttggtcaccagccgtcatcctgggcttttcctactgtgtcttgttacaaggcctcagcaatccacagaactctctctccttccttccacctgtcagcttctctgcttctgagataagaaccatttgtgtaacaccaacacttaacttcagaaagacatgcattatgtggtgtaatcaaacccgatgctttcagatgacctacttacatcttcaatgtggataagataaagaacaaaacacatgcatctaaactgctgggcaatccagttgacttttaaatgtaagaatggaattccaaacacttaacacattcagctatatgacagaaagtaaatctatggatatggtattttgtgaatgatcttttaaataaaagaaaaccttacgtaata

SEQ ID NO: 222526 - DNA, 687 bp, Artificial Sequence
  derived and/or modified sequence
atggctgacttcgacacatacgatgaccgagcatattctagtttcggggggggccggggttctcgtggatcggcgggcggccacggctcgcgcagtcagaaagagctaccaacagaacctccttatacagcctatgtggggaacctgccctttaataccgtccagggtgatatcgatgctatattcaaggacctgagtataaggtccgtgcggttagtgagggacaaagacactgacaaattcaaggggttttgctacgttgagtttgatgaggttgactccctgaaggaggcgctgacgtatgacggggccctactaggggataggtcactgcgggtggacatcgccgaggggaggaaacaggacaaaggaggttttggcttcagaaaagggggacccgacgaccgtgggtttcgagatgattttttgggggggcggggtgggtctaggcctggggacaggagaacagggccacctatgggaagtcgtttcagggacgggccccccctccgggggtccaacatggacttccgcgaacctaccgaggaggaaagagcccagcgaccccggctccagcttaaacctcggaccgtagctacacccctcaaccaggtggctaatccaaattccgctattttcggaggagcccggcctcgtgaggaggtggtgcagaaggaacaggagtag

SEQ ID NO: 222527 - DNA, 687 bp, Artificial Sequence
  derived and/or modified sequence
atggctgactttgacacctatgatgaccgggcctacagcagctttggaggcggccggggcagccggggcagcgctgggggccacggcagccgcagccagaaggagctgcccacagagcccccctacacagcctacgtgggcaacctgcccttcaacacagtgcagggcgacattgatgccatcttcaaggacctgagcatccgctctgtgcggctggtgcgggacaaggacacagacaagttcaagggcttctgctacgtggagtttgatgaggtggacagcctgaaggaggccctgacctatgatggagccctgctgggggacaggagcctgcgggtggacattgctgagggcaggaagcaggacaagggcggcttcggcttcaggaagggcggcccagatgaccggggcttcagagatgacttcctgggcggccggggcggcagcaggcctggggacagaagaacaggcccccccatgggcagccgcttcagagatggcccccccctgcggggcagcaacatggacttccgggagcccacagaggaggagcgggcccagaggccccggctgcagctgaagcccaggacagtggccacccccctgaaccaggtggccaaccccaacagcgccatctttggaggagcccggccccgggaggaggtggtgcagaaggagcaggagtag

SEQ ID NO: 222528 - DNA, 687 bp, Artificial Sequence
  derived and/or modified sequence
atggccgacttcgacacctacgacgaccgggcctacagcagcttcggcggcgggcgcggctcccgcgggtctgccggaggtcacggcagccggtctcagaaagaattgcctactgaacccccttacaccgcctatgttggtaatttgccattcaatacagtccagggggatatagacgcaatctttaaggatctgagtattcggagcgtcagactggtgcgcgacaaggatactgacaaatttaaggggttttgctacgtggagttcgacgaggtggactcactgaaagaggctcttacttacgatggggccctgttgggcgatcgctccttgcgggtggatatcgctgagggcaggaaacaagataaggggggctttggcttccgcaaggggggccccgacgatcggggttttcgggatgacttcttaggtggacgtggaggaagtcggcctggggaccggagaaccgggccccccatgggtagccggttccgggatggaccgcctctccgtggcagcaacatggatttccgagaaccaacagaagaggagcgggcccagagacctagactacaacttaagccgcgcacagtggcaactcccctgaaccaggtggccaacccaaactctgctatcttcggcggtgctagaccaagagaggaagtcgtgcagaaggaacaagaatag

SEQ ID NO: 222529 - DNA, 687 bp, Artificial Sequence
  derived and/or modified sequence
atggccgacttcgatacgtacgatgacagagcgtactcatcttttggcggaggccgaggcagtagaggaagtgccggtgggcacggctctcggtcccagaaggaattacccactgagcctccctacactgcctatgtcggcaatcttcccttcaatacggtccagggcgacatcgatgccatattcaaagatctctccattaggtccgtgcgccttgtgcgcgacaaagacacagacaaattcaagggattctgctacgttgagttcgatgaggtggatagtctcaaagaggctcttacctatgacggggctctgctgggagatcgtagtttacgggtggacatcgccgaaggtcggaagcaagacaaaggcggtttcggctttagaaaggggggacccgatgatcgtggattcagggacgacttcctcggaggtcggggaggctcacggccaggggacaggaggacggggcctcccatgggatcccggttccgagatggccctccactgaggggttcaaacatggattttagagagcccactgaggaggagagagcccagcgccctcggttgcagctgaagccacgtaccgtggctacccctcttaatcaggtcgctaatcctaactcagcaatattcggcggtgctagaccacgcgaggaggttgtgcagaaagaacaggaatag

SEQ ID NO: 222530 - DNA, 687 bp, Artificial Sequence
  derived and/or modified sequence
atggccgacttcgacacctacgacgacagagcctacagcagcttcggcggcggcagaggcagcagaggcagcgccggcggccacggcagcagaagccagaaggagctgcccaccgagcccccctacaccgcctacgtgggcaacctgcccttcaacaccgtgcagggcgacatcgacgccatcttcaaggacctgagcatcagaagcgtgagactggtgagagacaaggacaccgacaagttcaagggcttctgctacgtggagttcgacgaggtggacagcctgaaggaggccctgacctacgacggcgccctgctgggcgacagaagcctgagagtggacatcgccgagggcagaaagcaggacaagggcggcttcggcttcagaaagggcggccccgacgacagaggcttcagagacgacttcctgggcggcagaggcggcagcagacccggcgacagaagaaccggcccccccatgggcagcagattcagagacggcccccccctgagaggcagcaacatggacttcagagagcccaccgaggaggagagagcccagagacccagactgcagctgaagcccagaaccgtggccacccccctgaaccaggtggccaaccccaacagcgccatcttcggcggcgccagacccagagaggaggtggtgcagaaggagcaggagtag

SEQ ID NO: 222531 - protein, 908 aa, Artificial Sequence
  derived and/or modified sequence
MADGGGPKDAPSLRSSPGPAPRVPRAVGPSGGGGETPRTAALALRFDKPIKQAFYNTGAVLFVCLCCGAAVLVYFILEAFLRPLLWAVLCGTFLHPFKSSLTRLGRHWLQRLHRAHTPIVLAALLLPLCFVDYGVEALGEQALRRRRLLLLLGAGGPLLYGLYCLGSYLGVQVLLVHAATLICRGLDYFSSLWIWTLVVGYVLTVSFKWNASTERYLRAVSIPVWIILLFHLASLAGSWRIPVFLVIVFLMSVGTLYEKQNGKESSGAELPGQVISMAASTLANLAISITGYESSSEDQPSTQPAEAVDRGESAPTLSTSPSPSSPSPTSPSPTLGRRRPEIGTFLRKKKTSDIYFVSLVWAIVVMQIWLNLWIVQLLPVPIAVWILKKLVIHFGVVDFLEKRYHVWWGIIESFLKERQGALAPWPIVGLGKFLLKVDSKLWHWLNKKMIIWLEKMLDKIISIFIIFLLVIGTLLLALLLTAKVHQESVHMIEVTSNLINETLANHPEWANWLPEAQVVQRALNSAANNVYQYGREWITHKLHKILGDKVNNTAVIEKQVLELWDRLYHSWFVKNVTHSGRHKGQKLHVSRQNSWLGDILDWQDIVSFVHENIETFLSILESLWIVMSRNVSLLFTTVTTLLTILFYSGTALLNFVLSLIIFLTTLFYLLSSSDEYYKPVKWVISLTPLSQPGPSSNIIGQSVEEAIRGVFDASLKMAGFYGLYTWLTHTMFGINIVFIPSALAAILGAVPFLGTYWAAVPAVLDLWLTQGLGCKAILLLIFHLLPTYFVDTAIYSDISGGGHPYLTGLAVAGGAYYLGLEGAIIGPILLCILVVASNIYSAMLVSPTNSVPTPNQTPWPAQPQRTFRDISRSEIFSVDVVSSAVIFRKFKFDSEFSSAVALCPSSCA

SEQ ID NO: 222532 - protein, 879 aa, Artificial Sequence [sequence omitted]

SEQ ID NO: 222533 - DNA, 2640 bp, Artificial Sequence
  derived and/or modified sequence
atggccgacggcggcggccccaaggacgcccccagcctgagaagcagccccggccccgcccccagagtgcccagagccgtgggccccagcggcggcggcggcgagacccccagaaccgccgccctggccctgagattcgacaagcccatcaagcaggccttctacaacaccggcgccgtgctgttcgtgtgcctgtgctgcggcgccgccgtgctggtgtacttcatcctggaggccttcctgagacccctgctgtgggccgtgctgtgcggcaccttcctgcaccccttcaagagcagcctgaccagactgggcagacactggctgcagagactgcacagagcccacacccccatcgtgctggccgccctgctgctgcccctgtgcttcgtggactacggcgtggaggccctgggcgagcaggccctgagaagaagaagactgctgctgctgctgggcgccggcggccccctgctgtacggcctgtactgcctgggcagctacctgggcgtgcaggtgctgctggtgcacgccgccaccctgatctgcagaggcctggactacttcagcagcctgtggatctggaccctggtggtgggctacgtgctgaccgtgagcttcaagtggaacgccagcaccgagagatacctgagagccgtgagcatccccgtgtggatcatcctgctgttccacctggccagcctggccggcagctggagaatccccgtgttcctggtgatcgtgttcctgatgagcgtgggcaccctgtacgagaagcagaacggcaaggagagcagcggcgccgagctgcccggccaggtgatcagcatggccgccagcaccctggccaacctggccatcagcatcaccggctacgagagcagcagcgaggaccagcccagcacccagcccgccgaggccgtggacagaggcgagagcgcccccaccctgagcaccagccccagccccagcagccccagccccaccagccccagccccaccctgggcagaagaagacccgagatcggcaccttcctgagaaagaagaagaccagcgacatctacttcgtgagcctggtgtgggccatcgtggtgatgcagatctggctgaacctgtggatcgtgcagctgctgcccgtgcccatcgccgtgtggatcctgaagaagctggtgatccacttcggcgtggtggacttcctggagaagagataccacgtgtggtggggcatcatcgagagcttcctgaaggagagacagggcgccctggccccctggcccatcgtgggcctgggcaagttcctgctgaaggtggacagcaagctgtggcactggctgaacaagaagatgatcatctggctggagaagatgctggacaagatcatcagcatcttcatcatcttcctgctggtgatcggcaccctgctgctggccctgctgctgaccgccaaggtgcaccaggagagcgtgcacatgatcgaggtgaccagcaacctgatcaacgagaccctggccaaccaccccgagtgggccaactggctgcccgaggcccaggtggtgcagagagccctgaacagcgccgccaacaacgtgtaccagtacggcagagagtggatcacccacaagctgcacaagatcctgggcgacaaggtgaacaacaccgccgtgatcgagaagcaggtgctggagctgtgggacagactgtaccacagctggttcgtgaagaacgtgacccacagcggcagacacaagggccagaagctgcacgtgagcagacagaacagctggctgggcgacatcctggactggcaggacatcgtgagcttcgtgcacgagaacatcgagaccttcctgagcatcctggagagcctgtggatcgtgatgagcagaaacgtgagcctgctgttcaccaccgtgaccaccctgctgaccatcctgttctacagcggcaccgccctgctgaacttcgtgctgagcctgatcatcttcctgaccaccctgttctacctgctgagcagcagcgacgagtactacaagcccgtgaagtgggtgatcagcctgacccccctgagccagcccggccccagcagcaacatcatcggccagagcgtggaggaggccatcagaggcgtgttcgacgccagcctgaagatggccggcttctacggcctgtacacctggctgacccacaccatgttcggcatcaacatcgtgttcatccccagcgccctggccgccatcctgggcgccgtgcccttcctgggcacctactgggccgccgtgcccgccgtgctggacctgtggctgacccagggcctgggctgcaaggccatcctgctgctgatcttccacctgctgcccacctacttcgtggacaccgccatctacagcgacatcagcggcggcggccacccctacctgaccggcctggccgtggccggcggcgcctactacctgggcctggagggcgccatcatcggccccatcctgctgtgcatcctggtggtggccagcaacatctacagcgccatgctggtgagccccaccaacagcgtgcccacccccaaccagaccccctggcccgcccagccccagagaaccttcagagacatcagcgaggacctgaagagcagcgtgggctag

SEQ ID NO: 222534 - DNA, 2759 bp, Artificial Sequence
  derived and/or modified sequence
cgcccctcgggggcggctgtggcggaggaacgatggccgacggcggcggccctaaggacgcgccaagcctgcggagctctcccgggccggcgccgcgggtcccgcgcgcggtcgggccgagtggcggtggcggggagaccccgcggaccgcggcgctggcgctgcgcttcgacaagcccattaagcaggccttctacaacaccggggccgtgctgttcgtgtgcctgtgctgcggcgccgcggtgctggtctacttcatcctggaggccttcctgcggccgctgctctgggccgtgctatgcggcacttttctgcaccccttcaagagctcgctgacgcgcctgggccgccactggctgcagcgcctgcaccgcgcgcacacgcccatcgtcctggccgcgctgctcctgccgctctgcttcgtcgactacggcgtcgaggccctgggcgagcaggcgctgcgccgccgccgcctgctcctgctgctcggcgccggcggcccgctcctgtacggcctctactgcctcggcagctacttgggcgtgcaggtgctgctggtgcacgctgccacgctcatctgccgcgggctggactacttcagcagcctgtggatctggacgttggtggttggctatgtgttgactgtttcattcaagtggaatgcaagcactgaacgctacttgagagcagtttcaattcctgtctggattatattgctttttcatttagcatccctggctggctcatggagaattccagtattcctggttattgttttcctgatgtctgtgggtaccctctatgaaaaacagaatggaaaagagtcttctggggcagagttaccagggcaggttatctccatggcagcttctactctggcaaacttggccatctctatcacagggtatgaatcaagcagtgaagaccagccctccactcagcctgcagaagcagtggacaggggagaatccgctccaacgttgtccacctccccttcaccctcctccccttcacccacttccccttcacctactctgggcagacgaaggcctgaaataggaacgtttcttagaaagaagaaaactagtgacatctactttgtgtctctagtttgggccattgtcgtcatgcagatctggttgaacctgtggattgtgcagttgctgccagtgccgattgcagtctggatactcaaaaagcttgtcattcactttggagttgtggatttcctagagaaacgctaccatgtgtggtggggcattatagaaagcttcctgaaggagcggcagggagctctcgcgccttggcccattgtcgggcttggaaaattcttgttaaaagttgatagcaagctctggcactggctaaataagaagatgatcatctggttggagaagatgttagataaaataattagcattttcatcatatttttgttagtgataggaactcttcttttagccctactcctgactgcaaaggtacatcaagagagtgtacacatgattgaagtcacaagtaatttgattaatgaaactctagcaaatcaccctgagtgggcaaattggcttcctgaggctcaggtagtccaaagagccctgaattctgcggctaacaacgtgtatcagtatggacgagaatggataactcacaagctccataaaattctaggagataaggtgaacaatactgctgtaattgaaaagcaagtactagaactttgggacagactgtatcactcttggtttgtaaagaatgtaacacactctggaaggcacaaaggacagaagttgcatgtcagtcgtcagaatagctggctgggagacattctggactggcaggatattgtttcctttgttcacgagaacattgagacatttctttcgatcttggagtctctgtggatcgttatgagccggaatgtgagcctgctgttcaccactgtcactacactcttgaccatcctcttctacagcgggacagcccttctcaattttgtactctctctgataattttcctgaccacactattttatctattaagttccagtgatgagtactacaagccagtgaagtgggtgataagcctgactccactatctcagccaggtccttcttctaatattattggccagtctgtggaagaagctatcagaggggtgtttgatgcttccctcaaaatggctggcttctatggattgtatacctggctgactcatactatgtttggcatcaatattgtcttcataccatcagcattagcagcaatccttggagcagtgccattcctggggacatactgggcagcagtacctgcagttcttgacctgtggctgacacaagggttaggatgcaaggccattttactgttgatttttcatctcttgccaacatactttgtagatactgcaatctactctgacatatcaggaggtggccatccttacctgacaggcttggcagtggccggtggagcatactacctaggcctggaaggagcaatcatcggtcctattcttctctgcatacttgtggttgcttccaatatctatagtgccatgctagtgagtcccacgaattcagttcccacgccaaaccagaccccatggcctgctcagcctcagcggactttccgtgacatttctagatctgaaatcttcagtgttgatgtggtttcctctgcagtgatttttaggaagttcaaatttgacagcgagttcagctcagctgtggccctctgcccttccagctgtgcctag

SEQ ID NO: 222535 - DNA, 7980 bp, Artificial Sequence
  derived and/or modified sequence
cgcccctcgggggcggctgtggcggaggaacgatggccgacggcggcggccctaaggacgcgccaagcctgcggagctctcccgggccggcgccgcgggtcccgcgcgcggtcgggccgagtggcggtggcggggagaccccgcggaccgcggcgctggcgctgcgcttcgacaagcccattaagcaggccttctacaacaccggggccgtgctgttcgtgtgcctgtgctgcggcgccgcggtgctggtctacttcatcctggaggccttcctgcggccgctgctctgggccgtgctatgcggcacttttctgcaccccttcaagagctcgctgacgcgcctgggccgccactggctgcagcgcctgcaccgcgcgcacacgcccatcgtcctggccgcgctgctcctgccgctctgcttcgtcgactacggcgtcgaggccctgggcgagcaggcgctgcgccgccgccgcctgctcctgctgctcggcgccggcggcccgctcctgtacggcctctactgcctcggcagctacttgggcgtgcaggtgctgctggtgcacgctgccacgctcatctgccgcgggctggactacttcagcagcctgtggatctggacgttggtggttggctatgtgttgactgtttcattcaagtggaatgcaagcactgaacgctacttgagagcagtttcaattcctgtctggattatattgctttttcatttagcatccctggctggctcatggagaattccagtattcctggttattgttttcctgatgtctgtgggtaccctctatgaaaaacagaatggaaaagagtcttctggggcagagttaccagggcaggttatctccatggcagcttctactctggcaaacttggccatctctatcacagggtatgaatcaagcagtgaagaccagccctccactcagcctgcagaagcagtggacaggggagaatccgctccaacgttgtccacctccccttcaccctcctccccttcacccacttccccttcacctactctgggcagacgaaggcctgaaataggaacgtttcttagaaagaagaaaactagtgacatctactttgtgtctctagtttgggccattgtcgtcatgcagatctggttgaacctgtggattgtgcagttgctgccagtgccgattgcagtctggatactcaaaaagcttgtcattcactttggagttgtggatttcctagagaaacgctaccatgtgtggtggggcattatagaaagcttcctgaaggagcggcagggagctctcgcgccttggcccattgtcgggcttggaaaattcttgttaaaagttgatagcaagctctggcactggctaaataagaagatgatcatctggttggagaagatgttagataaaataattagcattttcatcatatttttgttagtgataggaactcttcttttagccctactcctgactgcaaaggtacatcaagagagtgtacacatgattgaagtcacaagtaatttgattaatgaaactctagcaaatcaccctgagtgggcaaattggcttcctgaggctcaggtagtccaaagagccctgaattctgcggctaacaacgtgtatcagtatggacgagaatggataactcacaagctccataaaattctaggagataaggtgaacaatactgctgtaattgaaaagcaagtactagaactttgggacagactgtatcactcttggtttgtaaagaatgtaacacactctggaaggcacaaaggacagaagttgcatgtcagtcgtcagaatagctggctgggagacattctggactggcaggatattgtttcctttgttcacgagaacattgagacatttctttcgatcttggagtctctgtggatcgttatgagccggaatgtgagcctgctgttcaccactgtcactacactcttgaccatcctcttctacagcgggacagcccttctcaattttgtactctctctgataattttcctgaccacactattttatctattaagttccagtgatgagtactacaagccagtgaagtgggtgataagcctgactccactatctcagccaggtccttcttctaatattattggccagtctgtggaagaagctatcagaggggtgtttgatgcttccctcaaaatggctggcttctatggattgtatacctggctgactcatactatgtttggcatcaatattgtcttcataccatcagcattagcagcaatccttggagcagtgccattcctggggacatactgggcagcagtacctgcagttcttgacctgtggctgacacaagggttaggatgcaaggccattttactgttgatttttcatctcttgccaacatactttgtagatactgcaatctactctgacatatcaggaggtggccatccttacctgacaggcttggcagtggccggtggagcatactacctaggcctggaaggagcaatcatcggtcctattcttctctgcatacttgtggttgcttccaatatctatagtgccatgctagtgagtcccacgaattcagttcccacgccaaaccagaccccatggcctgctcagcctcagcggactttccgtgacatttctgaagatctgaaatcttcagtaggttgatgtggtttcctctgcagtgatttttctaggaagttcaaatttgacagcgagttcagctcagctgtggccctctgcccttccagctgtgcctagcaagcaaaacccaggaaagaagcagaagcctcctggccttacatacagaatgcctggacaagagagaacttgctgcgggctgctttgtattttaaaacacagcttgagagttcagagttggtggtttgctcacttaactgttgttaagatggcttgaaaagtttcattttatacactggtaccctggcttgaaatttttccactttggttatctatgttactatattatatatttataaagttattttaagaactctaaactacctgctgttaaaagaatagatggtgtaattttttcctggtttaagaaatgtattgttaaacttttctaagacagtcacttttcaaggaagagggctttcacttttgagtgtgtagttgagtgagcaggaaaaatgaatcttctacccttctcccacaatgtattatacgctctttaagaaataataaatcataagtataagggtggggtggcttatttgatgttcagttttatattataaccctgggagatacaaagactgaagctcttcctcctcttccttttctcttcacgcttctttacactattgccaaattataaaacttggctgaccacgttgaagtgaaatacttattaagctgctatgaatggtaacagtatgataaaattcatgctgttattaggttttctccttccaggtggttgaagtgaaaaatctcaggtgtagcaatactctgatttgttaaatgtatccgtttcattatttggaactctgccaataagttagttttcagcagaattttgtatttatgtagtattttcccatctcttagcacagtgccttgcacatgactctaaatgaatgcttgttgaattgaattgcaactttaaaaatatctcagatatcacaataaccagcatagtgctttacattttacaaagtccttttgcacatactatttcacaagtacatcacatcagctttcatatagctttatattattttacatcagttttacactgatggagaagctaaggttcagaaaagtgaccaactcaaagtcgtaaagtgtagtaggatttggcctcagatctttgactccgttgtgtgcagattctgctgtattagtgttccttctaaatattgtatgcagttttcccagtgttacgagattggtgttgctatccatttgttgtgaatgaagacttgtcctatagtacatgacagggctgagagtggactgtagttcttagctgaaccctttctactgtttaaaacaatcatcaggcctatcctctgctcccaggggaatgtgggagagaaaagggttcttggccaggctgtaggtggtggctcacatctgtaatcccagcactttggaaggctgaggtgggtggattgcttgagcccagggatttgagatcagcctaggcaacatggcaaaaccccatctctacaaaaaaaaaaaaaaaaaaaaaaaaattagctgggcacggtggtgtggctatagtctgagctactcaggaggctgatgtatgaggatcacctgagtccaggaggtcgaggctgcagtgagccaagatggcgccactgcactccagcctgggtgagagagtgagacactgtcccaaggaaaaaaaaaagtgttggggggtagttcttaagcgttgaagatttcctttttggaaagtatttaaaggtagaaatattaataatttttcctaaaacatctccctaagaagtcactgataattataattagtttaaatttattcttacactacttaagaaaaatttcatttagaaaaggctaccatgagatcttttgactatatggagtagactgcatacagatctctttatttctattatgaatattttagcgattataatcagctattccactgagtattagatttggtcactaagtaactcatgtttttctttagtcaatcattcattcattcactaaaacatttgttgagagttggctaaactctagattctgtgccaggcactgtacagggtgatggagatcactcataagaaggcctcttgctcttagccagatcatatgtaatactaaatttaaattttttgcattaaaaggctaaaaaatcatttgtttttgttaattatatactggttgatttatagatgtaattagcacatattcataagagacaaatatatacaatgagttactatacatatacaaagtgattttagctgtataaagtgatattgcaaaaaactacagctaatgtttcttgctgggtaattattagcataaatatcaggttcttagaggtctttaagagaatactttagagctaccaaaattagcagcagtgatgtaatatcaccctgaaataccaggagcagaggtgccccagagtgcttcacagctatgatcaggaaacttgacctgccccattgctacagcaacggcataaggactaggaaggtccactagctggggaggtcttggaaccctccgagccagaaagaagcattccagcatgattcctcagatgcaatgaggaaggtttacagaattttcacagggcaacagagatcaagtggtatgaaaaggtaggagttttaagctcaagtctcaaagataacctacctttacattctcagtcagaatttgacccagaaagaggaagtttcttcaggaacagaccgtacgttgatgaagtagaagtcatttcagtaaaaacggagtacagaacttggtcataatatcttgcattttatagatttattaaagattagtttcaagttcacattcgctattcagttgtaaaccgaatggatgggaggggagaaaatacaagctctccacacaggtatgctcctctcttttctgagagagaaggcatgggattttcagcataaattccatgttatgtgagtgctgtttgagttctgaagttcctatcaatatctgttcctgcaagtgatctctgtaagaccaccttacatgctggtcttagttattgttaaaattgcaaggtttcttcacaccctctttgataagaagtgtttagctggcagagctttcccttgacttctgagtctagtgtgggttggcccatgacagtgggaagaaatccaacatgttacatggagaccttgtatgtaaacaaactctgtagcctttgaaagtggaactgctttttacagttaaagggctgctaaatggcttgcagatgagatcttctggctcaccttgatcttcacatgaacccattgtgacctatctggatttcctaggacctgtagtttccatttgggttatattagtgcctcaggaatgtgtcactactggtcaagcaatactcagaaattcaggctgtgaggggttagattagaggaaagtaatttaggtgagctatccagagctttcaacctcagggtttataggaaaaaaaaacaaaatacaaaaacccttaggacttctcatactctagccctgaccttgcagtctcctctgaggggcctcctaagacccttaaaataatattacaataggactttgagtgtgcatttcacagtggaaatagcctctggctagcattacttccaaatgctagttccagctaaaaacaagtactttttattagtttcttgtctttcaacattctgccatcaaaatatattcattttattaacttaccgattattgggaacctgcaaaaaaaaaaaaaaaaaaaaacacacatgctgtctgcagccactgtttggttatttttgatagtttaagagaattataaatcaagttgttctgtctactagagtcagaaattctgtgctagaatgggacttctaaaattaggtggtcctgtcactttctagagaaagacccaaattcataggtttaagtggcttgtctgacatacacatacagccagttagtaacagaattcagaatagaatagagttcttttttttctgtcagtccgttgttctacttctctttccttttcttcatggttgagcagcttttggcaaaatgtgttccatatagcagtagttccaagagatgttaatagatgtaagaaaaaaagtgtgtgtgtgttgggggtgggggattgcatggtcaattaaaatgaaggaatgctgagtttgtttccttactgtaggacttctaagagttttgaacatgctattacacattgtgaatttataaaaggggacaaacactgtttgaccttagactgcactccccttctttattcctcagagcatctcaaaggactacagggtcctttgagaaacatggcccttgatcaagtttacaactctttgagaagacatccctaatggaaatactgaatggcagatctattactgtggtaccatgtagtgtgtaataaatcttgaagtccagaaagcaagtatatttgctgtttagagctatacttaaggtatagagattcttttccacctgtggtgtgtaaaatcagtattgtgtttaattttgcaggtttttcaaggatcaactaatgtgcaaatacagtggtgatatattgatattacattttaataatgcttttgtatggcactttatagttttcagacaccttttgtaacagccctgtgagacagacaatattatccttattgtacagatgggggggctctggaggctctgaaaagtttttggtgatattcccctaagtttataccacaaaatgatggagccagaatttagttgcagaacttctgactccaagtccagagttctttactagacatctggtttcttactagctttttgctagctttttattttacagtgaaaagtatggaagcaaatcctgataattttggcttattatcaaatatcatttattttttattgcagagacccagcagatgtaactctcattgtagccatcccaaagaaaacccttctttgccctttgcagtgccacttatttaggtaactgaagtgtatttccagtacaatttgattttgaactaagatttgatatagagttgtaattgcttacataactctttgaaaatgtatcatccctgggttctcaggtgaaggaggcaattcaaaagtaaaaaagaatattcgaatacaataaataccctctgttctcacacaaatgctgtttcttagctaacttgctttgacaacctactgatgtaacttctttattaatgtgaaatatttatattttgaaataaaattactagtgttgaatgaa

SEQ ID NO: 222536 - DNA, 2640 bp, Artificial Sequence
  derived and/or modified sequence
atggctgatggtggaggaccaaaagacgcccctagtctccgaagttctcctggaccagctcccagggtgccaagggccgtcggaccgtctgggggaggcggtgaaaccccaagaactgccgcgcttgccctacgctttgataagccgataaagcaggcattctataacaccggtgctgtcctctttgtgtgtctgtgttgcggcgcggccgtactggtgtacttcattctggaggccttcttgcgtcctctgctgtgggccgtcctctgtggcacattccttcacccctttaagtcctctctgacacgcctgggacggcactggctgcaaagactccaccgcgcgcacacccctattgtgctggcggccctcctgttacccctgtgctttgtggattacggcgtcgaggcactgggggaacaagctctgcggaggcgtcggctgcttctcctcctcggcgccggggggcctctgctgtacgggctatattgcctgggcagctatctcggtgtacaagttctcttggtgcatgcggctaccctaatatgcagaggccttgactatttctcctctttgtggatttggacccttgttgtcgggtatgtcctcacagtatccttcaaatggaacgccagcacagagcgatatctgcgggctgtgagtataccggtgtggattatcctcttattccacctcgccagtctggctggttcttggaggattcccgtgtttttagtcatcgtttttctgatgagcgtgggtacgctttatgaaaaacaaaatggaaaggagtcttccggagctgagctgcctggccaagtcatatccatggccgcttcaaccttagccaacctcgctatctctatcactggttacgaatccagttccgaggatcaaccatccacccagccagcagaagccgtggaccggggagagtccgcccctacccttagtactagcccaagcccctcgtcaccatccccgactagtcctagccctacactgggcaggcggcggccggagattgggacttttttgcggaagaagaaaacttccgacatttattttgtcagtctcgtttgggccatagtagttatgcaaatttggctgaatctgtggatcgtacagctccttccggtgccgatcgcagtgtggatccttaagaagctggtgattcacttcggggtggttgatttcctggagaagaggtaccacgtttggtggggaattatcgaatcgtttctgaaggagcgacagggggcccttgcgccttggcctatcgtggggctcggcaaatttttgctgaaagttgattcaaaactttggcactggctgaacaaaaagatgatcatctggttagaaaagatgttggataaaattatctccatttttataatttttctcttggttattggcactctgcttctagcgcttctgctgaccgctaaggtccaccaggagtcggttcatatgattgaggtcacctccaatctgataaatgagacacttgcaaatcaccctgagtgggccaactggctgccagaggctcaggttgtccagcgagccctgaatagcgctgcaaacaatgtctaccagtatggtcgcgagtggatcacccataaactgcataagattctgggagacaaggtcaacaatacggccgtcattgaaaagcaggtgctggaactgtgggacaggctgtatcactcttggtttgttaagaatgtgacccattcagggagacacaagggacagaagttacatgtttcacgccagaattcatggctgggggatattctggattggcaggacatcgttagtttcgtgcatgaaaacatcgagacatttctgtctatcctggagtctctatggatagtaatgtctaggaacgtgagcctcttgtttacaaccgtcacaaccctgctgactatacttttctattcaggcactgctcttctgaactttgtgctctccctgattatattcctgaccaccttattttatctcctctcctctagtgacgagtactacaagcccgttaagtgggttatatctctgacacccctgtctcagcctggtcccagctcaaacattatcgggcagagcgttgaagaagcgattcgcggcgtgtttgacgcctctctcaaaatggcgggcttctatggtctgtacacatggctgacacacacaatgttcggtattaacattgttttcatcccatcagccctcgcagctatcctgggagccgtgccattcttgggcacctattgggcggccgtgccagccgttctggacctgtggctcactcaagggctcgggtgtaaggctatccttctgctcatcttccatctgcttcctacctacttcgtggataccgccatctactcagacatttccggcggaggacacccttatctgactggcctcgcagtggccggtggggcgtactacttgggcctcgaaggtgccattattggacccatattactgtgcatcctggtcgtggcctctaatatttactccgcaatgttagtgtcccccaccaactccgtcccaacaccaaaccaaaccccctggcccgcccagccacaaaggacatttagagatatctctgaggacctcaaatcaagtgtgggctag

SEQ ID NO: 222537 - DNA, 2640 bp, Artificial Sequence
  derived and/or modified sequence
atggctgatggcggcggccccaaggatgcccccagcctgcggagcagccctggccctgccccccgggtgcccagggctgtgggccccagcggcggcggcggggagacccccaggacagctgccctggccctgcgctttgacaagcccatcaagcaggccttctacaacacaggagctgtgctgtttgtgtgcctgtgctgcggggctgctgtgctggtgtacttcatcctggaggccttcctgcggcccctgctgtgggccgtgctgtgtggcaccttcctgcaccccttcaagagcagcctgacccggctgggccgccactggctgcagaggctgcaccgggcccacacccccatcgtgctggccgccctgctgctgcccctgtgctttgtggactatggagtggaggccctgggggagcaggccctgcggcggcggcggctgctgctgctgctgggcgctgggggccccctgctgtatggcctgtactgcctgggcagctacctgggcgtgcaggtgctgctggtgcacgccgccaccctcatctgccggggcctggactacttcagcagcctgtggatctggaccctggtggtgggctacgtgctgactgtgtccttcaagtggaatgccagcacagagcgctacctgcgggctgtgtccatccctgtgtggatcatcctgctcttccacctggccagcctggccggctcctggagaattcctgtgttcctggtgattgtgttcctgatgtctgtgggcaccctgtatgagaagcagaatggcaaggagagcagcggggctgagctgcccggccaggtgatctccatggccgccagcaccctggccaacctggccatcagcatcaccggctatgagagcagcagcgaggaccagcccagcacccagcctgctgaggccgtggacagaggagagagcgcccccaccctgagcaccagccccagccccagcagccccagccccaccagccccagccccaccctgggcagaagaagacctgagatcggcaccttcctgaggaagaagaagaccagtgacatctactttgtgtccctggtgtgggccatcgtggtgatgcagatctggctgaacctgtggatcgtgcagctgctgcctgtgcccatcgctgtgtggatcctgaagaagctggtgatccactttggagtggtggacttcctggagaagcgctaccacgtgtggtggggcatcatcgagagcttcctgaaggagcggcagggcgccctggccccctggcccatcgtgggcctgggcaagttcctgctgaaggtggacagcaagctgtggcactggctgaacaagaagatgatcatctggctggagaagatgctggacaagatcatcagcatcttcatcatcttcctgctggtgattggcaccctgctgctggccctgctgctgacagccaaggtgcaccaggagagcgtgcacatgattgaggtgaccagcaacctgatcaatgagaccctggccaaccaccctgagtgggccaactggctgcctgaggcccaggtggtgcagagggccctgaacagcgctgccaacaacgtgtaccagtatggccgggagtggatcacccacaagctgcacaagatcctgggggacaaggtgaacaacacagctgtgattgagaagcaggtgctggagctgtgggaccggctgtaccacagctggtttgtgaagaatgtgacccacagcggccgccacaagggccagaagctgcacgtgtcccggcagaacagctggctgggggacatcctggactggcaggacatcgtgtcctttgtgcatgaaaatattgagaccttcctgagcatcctggagagcctgtggatcgtgatgagcagaaatgtgtccctgctcttcaccaccgtgaccaccctgctgaccatcctcttctacagcggcacagccctgctgaactttgtgctgagcctcatcatcttcctgaccaccctcttctacctgctgagcagcagtgatgagtactacaagcctgtgaagtgggtgatcagcctgacccccctgagccagcccggccccagcagcaacatcatcggccagagcgtggaggaggccatccggggcgtgtttgatgccagcctgaagatggccggcttctacggcctgtacacctggctgacccacaccatgtttggcatcaacatcgtgttcatccccagcgccctggccgccatcctgggcgctgtgcccttcctgggcacctactgggccgctgtgcctgctgtgctggacctgtggctgacccagggcctgggctgcaaggccatcctgctgctgatcttccacctgctgcccacctactttgtggacacagccatctacagcgacatcagcggcggcggccacccctacctgaccggcctggccgtggccggcggggcctactacctgggcctggagggcgccatcatcggccccatcctgctgtgcatcctggtggtggccagcaacatctacagcgccatgctggtgagccccaccaacagcgtgcccacccccaaccagaccccctggccagcccagccccagaggaccttccgggacatcagcgaggacctgaagagctctgtgggctag

SEQ ID NO: 222538 - DNA, 2640 bp, Artificial Sequence
  derived and/or modified sequence
atggccgacggcggcggccccaaggacgcccccagcctgcggagcagcccaggccccgccccccgcgtgcctcgggcggtggggcccagcggaggcggcggcgaaacaccgcggacagccgcacttgccttacgtttcgataagcctattaagcaggctttctacaacaccggggccgtgctgttcgtttgcttgtgctgtggcgcggccgtactagtgtacttcattcttgaggcgttcctacgcccattgctctgggccgtactgtgtgggacttttctgcatccgtttaagtcttccctgactaggctcggaaggcattggctgcagaggctacaccgggcacacacgccgatcgtcctcgccgccctgctgctcccactgtgctttgtggactacggcgttgaggctctgggcgagcaagccctgaggcgacgccggcttctgctgctcttaggggctggaggtcctttgctgtacgggttgtactgcctgggatcttacctgggtgttcaagtgctgctcgtccacgccgcgacactgatctgtcgaggtctagactacttctcttccctgtggatttggacccttgtggtcgggtatgttctgactgtgagctttaaatggaatgccagtactgaacgctatctccgagcagtgtccatccctgtctggataattctactgttccatctggcctcactcgctggctcatggcgcattccagtgttcctggtaatagtattcctgatgagtgtcggaaccttgtatgagaagcagaacggtaaagagagctcgggagctgaactccccggacaagtcatcagcatggcagctagtaccctggccaacctggcaatctcaataactggctatgagtcaagcagcgaggaccagcccagcacacagccagctgaggcagtggataggggggaatcggctcctacactttctacaagtccttcaccgagttctccatcacccacctctccctccccgacgcttggtcgtcgcagaccggagatcgggacgttcctgcgcaaaaagaaaacctcagatatctacttcgtgtctctcgtgtgggcaatcgtcgtgatgcagatctggttaaacctgtggatcgtacagctcctaccagtccctatagccgtctggatacttaagaaacttgtaatccattttggcgttgttgacttcctagagaaacggtatcacgtgtggtggggtataatcgaaagctttcttaaggaacgacagggagcgctcgcaccgtggccaattgtaggcctcgggaagttccttctgaaggttgattctaaactgtggcactggctcaataaaaagatgattatctggttagagaagatgttggataaaattatcagtatcttcattattttcttattggtgattggcaccttattgctggcgctcctgttgaccgccaaagtccatcaggaatctgttcacatgatcgaggtaacctccaacttgattaatgaaacacttgcgaatcatccagaatgggcgaactggctgcccgaagcgcaggtcgttcagagagccctgaactctgccgctaacaatgtgtatcaatatggccgcgagtggataacacacaaactgcataagatcttaggagacaaagtgaacaacactgcagtgatagagaagcaagtcctggaactctgggacagactttatcattcttggtttgtcaagaatgtgacacattccggcaggcacaagggtcagaaactccatgtgtctcggcagaactcttggctgggagacatcctggactggcaggatatcgtttccttcgtgcacgaaaatatagaaacattcctatctattctggaaagcctgtggattgtcatgtcccgtaatgtcagcttactctttacaaccgttacaactctgctcactatcttattctattcaggaaccgccctcctgaatttcgtgctgtctctgatcatatttctgacgaccttattttatctgctctcatcctctgatgagtactacaaacctgtgaagtgggtcattagcttaaccccacttagccagcccggcccatccagtaatatcatcggccagtcagtggaagaagcaatcagaggggttttcgacgcatccctgaaaatggcgggtttctatggcctgtacacttggctgacacacactatgtttggcatcaacatcgtttttatacctagtgcccttgctgccatactgggcgctgtgccgttcctcggaacgtactgggccgcggtccctgccgttctggatctgtggctcacacaaggattgggctgtaaggcgatcctgttactaatattccacctgttgccgacttattttgtcgacacggccatttatagcgacatttctggaggcggacacccctacctgactggactggcagtggctgggggcgcttactacctcggtttggagggggcgatcatcggtccgattttgttgtgcattctcgtcgttgcaagcaatatctactccgcgatgctcgtgtccccaactaattctgttcccacccctaaccagaccccctggccggctcaacctcagaggactttcagggatatcagtgaagatttgaaaagctccgtgggatag

SEQ ID NO: 222539 - DNA, 2640 bp, Artificial Sequence
  derived and/or modified sequence
atggctgatggcggtggccctaaggatgctcctagcttgcggagcagcccgggacccgctcccagagtcccacgtgctgtgggcccatcgggagggggaggagagacaccacggacagcagcccttgcactgcggttcgacaagcccatcaagcaggctttttacaatacgggggcagttctgttcgtgtgcctgtgctgcggggctgctgtcctggtgtacttcattctggaggcatttctgcgtcctctgctgtgggcagtactgtgcggcactttcctccaccccttcaaaagtagtctgacacgcttagggaggcattggctccagcgcctgcatagagcacacacaccaattgtgttagcggcattgctcctccctctgtgtttcgtggactatggagtcgaggctctgggcgagcaagctctgagacgaagacggttattgctgctcctcggagcaggtgggcctctactgtacggcctctactgtctgggaagttatctgggcgtgcaggtactgctcgtccacgctgccaccctgatttgtaggggcctcgattatttctcgtcactctggatctggactttggtcgtcggctatgtgctaaccgtgagtttcaagtggaatgcctcaaccgagcgatatttgcgcgctgtttctattccagtgtggataatccttttatttcatctcgcctcactggctggctcctggcgtatcccagtcttcctggttattgtgttcttgatgtcagtgggaacattgtacgagaagcagaatggcaaagagtcttccggggcagaacttcctggacaggtcataagtatggctgcgagcaccctcgcaaacctggccatctccataaccggatatgagtcaagttccgaggaccaacccagcacgcagcccgcagaggccgtcgaccggggtgaaagtgcccctacactgtcaacgtccccaagccctagcagtcccagtccaacaagcccctccccaaccttaggccgtaggcgtcccgagattggcactttccttagaaaaaaaaagacaagtgatatctacttcgtttccctcgtgtgggcaatcgttgtcatgcagatttggttgaacctttggatagtgcagctgctcccagtgcctattgctgtgtggattctcaagaagcttgtgatccattttggcgtggttgacttcctcgaaaaacggtaccatgtttggtggggtattatcgaaagttttttgaaagagagacagggagcactggccccttggcctatcgtggggctgggcaaatttcttttgaaggtggactctaaactttggcattggctgaataaaaagatgattatttggctggagaagatgctcgataagatcatcagcatcttcatcatctttttgctggtaatcggtaccctattactcgccctgctgctgactgcgaaggtgcatcaggaatcggtgcatatgatcgaagtgacttcaaatctgatcaacgaaacgcttgctaaccaccccgaatgggccaattggctgcccgaggcccaggttgtgcaaagggctctcaattccgccgcaaataatgtgtatcagtacggacgggagtggattacgcacaaactccataagatcctgggtgataaagtgaacaataccgctgtaattgagaaacaagttttagagctctgggatcgcttataccattcgtggtttgtcaagaacgtaacacattccggaagacacaagggtcagaagcttcacgtctccaggcagaactcttggctgggtgacattcttgactggcaggacattgtttcttttgtgcacgaaaacatcgagaccttcctgtccattctggaatctctgtggatagtgatgtctaggaacgtcagtctcctcttcaccacggtgaccactctgcttaccattctgttttattcaggcacagccctgctgaactttgtcctgagtctgatcatctttctaaccacgctgttttacttgctctcgtcatcggatgaatattataaaccagtgaagtgggttatttctctcactccacttagtcagcctggtcctagtagcaatattattggccagtcggtggaggaggccattcggggagtcttcgacgcctctctcaagatggcaggcttctacggactctacacatggctgacccacaccatgtttggaattaacatcgtcttcatcccatctgccttggctgccattctgggagccgtgcctttcctaggtacatattgggcggcagtgcctgcagtcctggacctctggctgactcagggactcggttgtaaggcaatcctgctgctaatcttccacctgttgcctacttactttgttgataccgcaatctatagtgatatctccgggggtgggcacccctatcttacggggttggccgttgcaggcggagcatattacctcggactggagggggcaattattgggcctatactactgtgcatccttgtggtcgcctcgaatatatactctgcgatgctggttagtcctaccaatagtgtgcctacacccaaccagaccccatggccggctcagccacagcgtaccttccgtgatatatccgaagacctcaaatcaagtgtaggttag

SEQ ID NO: 222540 - DNA, 2727 bp, Artificial Sequence
  derived and/or modified sequence
atggcggacggaggtggcccgaaagacgcacctagcctccgctcatcccccgggcctgcccctcgtgtgcctcgtgctgtagggcctagtggtggtggaggagagactccacggaccgcagcacttgccctaaggttcgataagcccattaagcaagccttttacaatacaggggccgtgctcttcgtgtgcctgtgctgcggggcagccgttctggtatactttatcctggaagcctttctacggcctctcctttgggcagtcctgtgtggaaccttcctgcatccttttaaatcgtcgctgaccagactcggccgtcactggctgcagcgtctgcaccgggcgcatacaccgatcgtccttgctgccttgctcctccctctctgctttgtggactacggtgtagaggcgctcggggagcaggcgctgcgcaggcggaggctgttattacttctcggcgctggcggacccctcctgtatgggctgtattgcttgggtagttatctgggcgtgcaggtcttgctcgtccatgccgcaactctgatatgtaggggactggattatttctcttcgctctggatttggactctggttgtgggttatgtgctgaccgttagctttaagtggaacgcttcaacagagcggtacctgcgggctgtttctattcccgtgtggatcatactgctgttccatctggcttctctggctggcagctggaggattccagtgttcctggtgatcgttttcttaatgtccgtcggcacactgtacgaaaaacagaacggtaaggaaagctctggcgccgagctgcccggccaggtgatctccatggctgcatcgacactcgctaacttggcgatttctataactggctacgagtctagttctgaagaccagccctcaacccaacctgctgaagcagtcgatcggggagaaagcgcgccaacgctctcaaccagcccctctcctagtagcccctcacccacttcacctagtccaaccctcggcagacggcggcctgaaataggtacctttctcagaaagaagaagaccagcgatatctattttgtgagcctggtttgggccatagtggtaatgcagatttggcttaacctgtggatcgtccagctgctacctgtccccatcgcagtgtggatacttaaaaagctcgtcatccacttcggagtagtcgactttcttgaaaaaagatatcatgtctggtggggcatcatcgagtcattcttaaaggagcggcagggtgctttagcaccttggcctatcgttggactcggcaagttccttctgaaagttgattccaaactgtggcattggctcaacaagaaaatgataatctggctcgaaaagatgctggataaaattatctcaattttcattatatttcttctcgtgattggcacactgctgctagcccttctcctgacagcaaaggtccaccaagagagcgtacatatgatagaggtgacatcgaatctgattaacgaaacgttggccaaccatcctgagtgggcaaattggttacccgaagcacaggtcgtgcagcgcgctttaaatagcgccgccaacaacgtttatcaatatgggcgggagtggatcacacataaactgcacaagatcttaggcgacaaggtgaacaatactgcagtgatcgaaaagcaggtgttagagctgtgggacagactgtaccatagctggtttgtgaagaacgttacacattccgggagacataaaggtcaaaagctgcacgtgtcccggcagaacagctggcttggtgacattctcgattggcaggatatagtgagtttcgtgcatgagaatatagagaccttcctgagtattttggagagcctttggattgtcatgagtagaaatgtttccctgctgttcaccacggtcactacgttgcttaccatactgttctattccggtacagcgctcctgaattttgtcctcagtctcatcattttccttactaccctgttctatttgttgtcgtctagcgatgagtattacaagcccgtaaagtgggttattagcttgacgccgttgtcccagccagggccctcctcaaatattattgggcagtctgttgaagaagctattaggggagtgttcgacgccagcctgaagatggccggtttttacgggttatatacctggttaacccatacaatgttcgggattaatattgtttttatacctagcgcccttgcagccatactaggagctgttccattcctcggtacttattgggcagctgtccccgcagttctggacctgtggctgacacaggggctcgggtgcaaggccatcttgttactcattttccatttgctacctacttacttcgtggacactgccatctattcagatatatccgggggaggacatccttacttgaccggcctggcagtggcaggtggagcatactacttgggcctcgagggtgctattatagggcctattctgctgtgtatcctagtggtggcttctaatatatatagtgccatgctggtcagccccaccaactcagtgccaacccctaaccagacaccctggcctgcgcagcctcagagaacatttcgggacatcagccgctccgaaatattttctgtcgatgttgtgtctagcgcagttattttccgcaagttcaagttcgattccgaattctcctctgccgttgcattgtgcccttctagctgcgcatag

SEQ ID NO: 222541 - DNA, 2727 bp, Artificial Sequence
  derived and/or modified sequence
atggctgatggcggcggccccaaggatgcccccagcctgcggagcagccctggccctgccccccgggtgcccagggctgtgggccccagcggcggcggcggggagacccccaggacagctgccctggccctgcgctttgacaagcccatcaagcaggccttctacaacacaggagctgtgctgtttgtgtgcctgtgctgcggggctgctgtgctggtgtacttcatcctggaggccttcctgcggcccctgctgtgggccgtgctgtgtggcaccttcctgcaccccttcaagagcagcctgacccggctgggccgccactggctgcagaggctgcaccgggcccacacccccatcgtgctggccgccctgctgctgcccctgtgctttgtggactatggagtggaggccctgggggagcaggccctgcggcggcggcggctgctgctgctgctgggcgctgggggccccctgctgtatggcctgtactgcctgggcagctacctgggcgtgcaggtgctgctggtgcacgccgccaccctcatctgccggggcctggactacttcagcagcctgtggatctggaccctggtggtgggctacgtgctgactgtgtccttcaagtggaatgccagcacagagcgctacctgcgggctgtgtccatccctgtgtggatcatcctgctcttccacctggccagcctggccggctcctggagaattcctgtgttcctggtgattgtgttcctgatgtctgtgggcaccctgtatgagaagcagaatggcaaggagagcagcggggctgagctgcccggccaggtgatctccatggccgccagcaccctggccaacctggccatcagcatcaccggctatgagagcagcagcgaggaccagcccagcacccagcctgctgaggccgtggacagaggagagagcgcccccaccctgagcaccagccccagccccagcagccccagccccaccagccccagccccaccctgggcagaagaagacctgagatcggcaccttcctgaggaagaagaagaccagtgacatctactttgtgtccctggtgtgggccatcgtggtgatgcagatctggctgaacctgtggatcgtgcagctgctgcctgtgcccatcgctgtgtggatcctgaagaagctggtgatccactttggagtggtggacttcctggagaagcgctaccacgtgtggtggggcatcatcgagagcttcctgaaggagcggcagggcgccctggccccctggcccatcgtgggcctgggcaagttcctgctgaaggtggacagcaagctgtggcactggctgaacaagaagatgatcatctggctggagaagatgctggacaagatcatcagcatcttcatcatcttcctgctggtgattggcaccctgctgctggccctgctgctgacagccaaggtgcaccaggagagcgtgcacatgattgaggtgaccagcaacctgatcaatgagaccctggccaaccaccctgagtgggccaactggctgcctgaggcccaggtggtgcagagggccctgaacagcgctgccaacaacgtgtaccagtatggccgggagtggatcacccacaagctgcacaagatcctgggggacaaggtgaacaacacagctgtgattgagaagcaggtgctggagctgtgggaccggctgtaccacagctggtttgtgaagaatgtgacccacagcggccgccacaagggccagaagctgcacgtgtcccggcagaacagctggctgggggacatcctggactggcaggacatcgtgtcctttgtgcatgaaaatattgagaccttcctgagcatcctggagagcctgtggatcgtgatgagcagaaatgtgtccctgctcttcaccaccgtgaccaccctgctgaccatcctcttctacagcggcacagccctgctgaactttgtgctgagcctcatcatcttcctgaccaccctcttctacctgctgagcagcagtgatgagtactacaagcctgtgaagtgggtgatcagcctgacccccctgagccagcccggccccagcagcaacatcatcggccagagcgtggaggaggccatccggggcgtgtttgatgccagcctgaagatggccggcttctacggcctgtacacctggctgacccacaccatgtttggcatcaacatcgtgttcatccccagcgccctggccgccatcctgggcgctgtgcccttcctgggcacctactgggccgctgtgcctgctgtgctggacctgtggctgacccagggcctgggctgcaaggccatcctgctgctgatcttccacctgctgcccacctactttgtggacacagccatctacagcgacatcagcggcggcggccacccctacctgaccggcctggccgtggccggcggggcctactacctgggcctggagggcgccatcatcggccccatcctgctgtgcatcctggtggtggccagcaacatctacagcgccatgctggtgagccccaccaacagcgtgcccacccccaaccagaccccctggccagcccagccccagaggaccttccgggacatcagccgctctgagatcttctctgtggatgtggtgtcctctgctgtgatcttcaggaagttcaagtttgacagcgagttcagcagcgctgtggccctgtgccccagcagctgtgcctag

SEQ ID NO: 222542 - DNA, 2727 bp, Artificial Sequence
  derived and/or modified sequence
atggccgacggcggcggccccaaggacgcccccagcctgcggagctccccaggcccagccccccgggtaccccgtgctgtgggcccatccggcgggggtggcgaaacgcctcggacagctgccttggcgctccggtttgacaaacctatcaagcaggccttttataataccggtgctgtattatttgtgtgtctttgttgcggcgcagccgtgctcgtttacttcattctcgaggccttcctgaggcctcttctttgggccgttttgtgcggaacgtttctgcaccccttcaaatcatccttaacccggctcggcaggcattggctccagaggctgcacagagctcatactcccatcgtgctggctgctctgctcctgccactgtgttttgtggattacggggttgaggcactcggtgaacaagcactgcgccgtcgaaggttgcttctcctcttaggtgccggaggaccactcctatacggcctgtattgcctcggaagctatctgggtgtgcaggtcttgctcgtccatgcagctaccctcatttgccgcggccttgattattttagttccttgtggatatggaccctggtggtgggctacgtgctcacagtctcctttaagtggaacgccagtactgaaaggtatctcagggcagtgtcgatccctgtttggattatacttctctttcatttagccagcttagccgggagctggcggattccagtcttcctcgttatagtgttcctgatgtccgtgggaaccttgtacgaaaagcagaacggaaaagagtcgtccggtgccgagttacctgggcaagtgatttccatggctgcgtccactctggccaatcttgctatttccataactggatatgagagctcgtctgaagaccaaccaagtacccagcctgcagaggccgtggatcgcggcgagagcgcccctacactcagtacgagcccgtctccttcttcaccatcccccacgtccccctcaccgaccttagggcgtcggcgccccgagatcgggaccttcctgcggaagaaaaaaacttccgacatctattttgttagtcttgtgtgggccatagtggtgatgcagatatggctcaatctgtggatcgtgcaacttctgcctgtccctatcgctgtgtggattcttaaaaagcttgtcatccattttggagtcgtcgacttcctggagaaacggtatcatgtgtggtgggggattatcgagtcatttctaaaagagcgacagggcgctctggcaccatggccgatcgtcggtcttggaaagtttctgctgaaggttgatagtaagctttggcactggttgaataagaagatgattatctggctggagaaaatgctagacaaaattatctcaatcttcattatattcctgttggtgatcggcacattgctgctggccctgctgctaacggccaaggttcatcaagaaagcgtgcatatgatcgaagtgacctctaatctcattaatgagacccttgctaatcatcccgagtgggctaactggctcccagaagcccaagtggtccagagggcactcaattctgcagcaaacaacgtctatcagtacggccgcgagtggataacgcacaagctccataaaattttgggtgacaaagtcaataataccgccgtgattgagaagcaggtccttgaactctgggacagactctatcacagttggtttgtcaagaacgtgacccactctggacgtcataagggccagaaattgcatgtgtctaggcagaattcttggttgggggatatactcgactggcaggatatcgtgagtttcgtgcacgagaacatcgagacattcctctcaatcctggaaagcctgtggatcgtcatgtccaggaacgtttcactgctatttaccactgtcactacactgcttacgatcctcttttattccggtactgccctgctaaatttcgttctgtcgttgatcatcttcctgacgacactgttctacctgttgagtagcagcgacgaatattataaacctgtaaagtgggtcattagcctcactccactgtcgcagccgggaccaagcagcaatatcattggacagagtgttgaggaagcgatacgtggagtttttgacgcgagtctcaaaatggcaggcttttacggcctgtacacttggttaacacatacaatgttcggtatcaacattgtgttcattcctagcgctctcgcagctattttgggagccgttcctttcctgggaacttactgggctgccgttcctgccgtactggatctttggcttacgcagggcctcgggtgtaaagcaatcctgctattgattttccatctactacccacctactttgtggataccgccatttactccgatatatccgggggtggtcacccttaccttaccggcctggctgtggctgggggtgcctactacctgggcttggagggagcgatcatcggtcccatacttctctgtatcctagttgtcgccagcaatatctacagcgctatgctggtatctccaactaattcagtacccactcccaatcagacaccctggcccgcccagccacagcggaccttcagagacatcagccgcagtgaaatcttctctgtggatgtagtcagcagtgccgtgatttttaggaagtttaaattcgattcagagttctcctccgccgtggccctctgtccatcctcctgtgcttag

SEQ ID NO: 222543 - DNA, 2727 bp, Artificial Sequence
  derived and/or modified sequence
atggcggacgggggaggacccaaggatgcgcctagcttgcgatcctcacccggaccagccccacgtgtgccgagggccgtaggtccttcaggaggaggtggtgagacaccacgcactgctgcactggcccttaggtttgataagcccataaaacaggctttttacaatacgggggctgtattgttcgtttgcctgtgctgcggcgctgccgttttggtatactttatcttggaggcttttctcagacccctcctgtgggccgttctctgcgggaccttcctgcacccctttaagtcatccctgaccaggctgggcaggcattggctccagaggctccatagggcccacacccctatagtacttgcagcactactccttcccctctgtttcgtcgactatggcgttgaggctttaggtgaacaggccctgcggaggaggcgcttgctgcttcttctgggcgcagggggacccctgttatatggcttatactgtctgggttcataccttggcgttcaggtgctgctggtgcacgctgccaccctgatctgcagagggttagattacttctcctcactctggatctggactctggtagtcggctatgtacttacggtgtcattcaagtggaacgcatctacagaacgctacctacgagcggtgagtatccccgtgtggataatcttattgttccatctcgcctccctagcgggatcttggcgcatccctgtttttctggttattgtcttcctgatgtcagtgggtacgctgtacgaaaagcagaatggcaaggagtcgtctggggcagagctccccggtcaggtcatcagtatggccgcttccacacttgcaaaccttgccatttctatcacaggctacgaaagcagctcagaggatcagccttctactcaacctgctgaagcggtggatcggggtgagagcgcaccaacactgtccacatctccctctccatcttccccgtcgcctaccagccctagtcccacacttggccgacgaaggcctgagatcggcacatttctgcgaaagaaaaagacgtctgatatctacttcgtctctttagtatgggcaattgtcgttatgcaaatttggctcaacctctggatagtgcagctgctgccagtcccaatcgctgtgtggatcctgaagaagctagtgattcattttggcgtggtggattttttggagaaaaggtaccatgtgtggtggggcatcatcgagagcttcctcaaagagaggcaaggtgctctggcgccatggccaattgtcggtctggggaaattccttctgaaggtggattcaaaactctggcattggctgaataaaaaaatgataatttggctggaaaagatgctggacaaaatcatctcgatttttataatttttctgctggtcatcggaacacttctgctggctctgctgctcacagctaaagtacaccaggagtctgtgcatatgatagaagtgacttctaacctcatcaatgagaccttagctaatcatcctgaatgggcaaactggctcccagaggcccaggtggtccagcgggctctcaactccgcagccaacaacgtttaccagtacgggagagaatggattacccacaagctgcataaaattctaggagataaggtgaacaacaccgcagttattgagaagcaggtgctggagttgtgggataggctgtaccactcgtggttcgtgaagaatgtgacacactctggacgacacaagggacaaaagctgcatgttagccgccagaatagttggctgggcgacatattggactggcaagatattgtgtcgtttgtgcatgagaacatcgaaactttcttgagtatactggagagcctgtggatagtgatgagccgcaatgtgtctcttctattcacaactgtcactacactgttgaccatcctgttttattccggaaccgcactgcttaactttgtcctgtccctaataattttccttaccacactgttctatttgttgagcagtagcgatgagtactataagcccgtaaaatgggtgatctcactaacaccactgagccagcccggaccctccagcaatatcatcggccagtccgttgaagaagcgatcagaggcgtttttgatgcgtcacttaaaatggcgggattctacggtttgtacacctggcttacacacaccatgtttggcataaatatcgttttcatcccatcagcacttgcagcaattttgggggctgtaccgtttttgggaacatattgggccgctgtccccgctgtgctggacttgtggcttacgcaggggcttgggtgtaaggcgatattgctcctcattttccatttgttgccaacttattttgtcgatacggcaatctacagtgatatctctggaggtgggcacccgtatctgaccggactggcagtggccggaggagcttattacctcggactggagggtgctattatcggcccaatcctcttatgcatcctagtggtggctagcaacatctattccgcaatgctcgtgtcccccacaaactccgtgcccactccaaaccaaaccccctggcccgctcagccacagcgcacattccgggacatctcacgcagtgaaatcttttctgtggacgtggtatcttcagctgttatcttccggaaatttaagttcgatagcgaattcagctccgctgtggccttgtgtcccagtagttgcgcctag

SEQ ID NO: 222544 - DNA, 2727 bp, Artificial Sequence
  derived and/or modified sequence
atggccgacggcggcggccccaaggacgcccccagcctgagaagcagccccggccccgcccccagagtgcccagagccgtgggccccagcggcggcggcggcgagacccccagaaccgccgccctggccctgagattcgacaagcccatcaagcaggccttctacaacaccggcgccgtgctgttcgtgtgcctgtgctgcggcgccgccgtgctggtgtacttcatcctggaggccttcctgagacccctgctgtgggccgtgctgtgcggcaccttcctgcaccccttcaagagcagcctgaccagactgggcagacactggctgcagagactgcacagagcccacacccccatcgtgctggccgccctgctgctgcccctgtgcttcgtggactacggcgtggaggccctgggcgagcaggccctgagaagaagaagactgctgctgctgctgggcgccggcggccccctgctgtacggcctgtactgcctgggcagctacctgggcgtgcaggtgctgctggtgcacgccgccaccctgatctgcagaggcctggactacttcagcagcctgtggatctggaccctggtggtgggctacgtgctgaccgtgagcttcaagtggaacgccagcaccgagagatacctgagagccgtgagcatccccgtgtggatcatcctgctgttccacctggccagcctggccggcagctggagaatccccgtgttcctggtgatcgtgttcctgatgagcgtgggcaccctgtacgagaagcagaacggcaaggagagcagcggcgccgagctgcccggccaggtgatcagcatggccgccagcaccctggccaacctggccatcagcatcaccggctacgagagcagcagcgaggaccagcccagcacccagcccgccgaggccgtggacagaggcgagagcgcccccaccctgagcaccagccccagccccagcagccccagccccaccagccccagccccaccctgggcagaagaagacccgagatcggcaccttcctgagaaagaagaagaccagcgacatctacttcgtgagcctggtgtgggccatcgtggtgatgcagatctggctgaacctgtggatcgtgcagctgctgcccgtgcccatcgccgtgtggatcctgaagaagctggtgatccacttcggcgtggtggacttcctggagaagagataccacgtgtggtggggcatcatcgagagcttcctgaaggagagacagggcgccctggccccctggcccatcgtgggcctgggcaagttcctgctgaaggtggacagcaagctgtggcactggctgaacaagaagatgatcatctggctggagaagatgctggacaagatcatcagcatcttcatcatcttcctgctggtgatcggcaccctgctgctggccctgctgctgaccgccaaggtgcaccaggagagcgtgcacatgatcgaggtgaccagcaacctgatcaacgagaccctggccaaccaccccgagtgggccaactggctgcccgaggcccaggtggtgcagagagccctgaacagcgccgccaacaacgtgtaccagtacggcagagagtggatcacccacaagctgcacaagatcctgggcgacaaggtgaacaacaccgccgtgatcgagaagcaggtgctggagctgtgggacagactgtaccacagctggttcgtgaagaacgtgacccacagcggcagacacaagggccagaagctgcacgtgagcagacagaacagctggctgggcgacatcctggactggcaggacatcgtgagcttcgtgcacgagaacatcgagaccttcctgagcatcctggagagcctgtggatcgtgatgagcagaaacgtgagcctgctgttcaccaccgtgaccaccctgctgaccatcctgttctacagcggcaccgccctgctgaacttcgtgctgagcctgatcatcttcctgaccaccctgttctacctgctgagcagcagcgacgagtactacaagcccgtgaagtgggtgatcagcctgacccccctgagccagcccggccccagcagcaacatcatcggccagagcgtggaggaggccatcagaggcgtgttcgacgccagcctgaagatggccggcttctacggcctgtacacctggctgacccacaccatgttcggcatcaacatcgtgttcatccccagcgccctggccgccatcctgggcgccgtgcccttcctgggcacctactgggccgccgtgcccgccgtgctggacctgtggctgacccagggcctgggctgcaaggccatcctgctgctgatcttccacctgctgcccacctacttcgtggacaccgccatctacagcgacatcagcggcggcggccacccctacctgaccggcctggccgtggccggcggcgcctactacctgggcctggagggcgccatcatcggccccatcctgctgtgcatcctggtggtggccagcaacatctacagcgccatgctggtgagccccaccaacagcgtgcccacccccaaccagaccccctggcccgcccagccccagagaaccttcagagacatcagcagaagcgagatcttcagcgtggacgtggtgagcagcgccgtgatcttcagaaagttcaagttcgacagcgagttcagcagcgccgtggccctgtgccccagcagctgcgcctag

SEQ ID NO: 222545 - protein, 375 aa, Artificial Sequence
  derived and/or modified sequence
MDELQDVQLTEIKPLLNDKNGTRNFQDFDCQEHDIETTHGVVHVTIRGLPKGNRPVILTYHDIGLNHKSCFNAFFNFEDMQEITQHFAVCHVDAPGQQEGAPSFPTGYQYPTMDELAEMLPPVLTHLSLKSIIGIGVGAGAYILSRFALNHPELVEGLVLINVDPCAKGWIDWAASKLSGLTTNVVDIILAHHFGQEELQANLDLIQTYRMHIAQDINQDNLQLFLNSYNGRRDLEIERPILGQNDNKSKTLKCSTLLVVGDNSPAVEAVVECNSRLNPINTTLLKMADCGGLPQVVQPGKLTEAFKYFLQGMGYIPSASMTRLARSRTHSTSSSLGSGESPFSRSVTSNQSDGTQESCESPDVLDRHQTMEVSC

SEQ ID NO: 222546 - DNA, 1128 bp, Artificial Sequence
  derived and/or modified sequence
atggacgagctgcaggacgtgcagctgaccgagatcaagcccctgctgaacgacaagaacggcaccagaaacttccaggacttcgactgccaggagcacgacatcgagaccacccacggcgtggtgcacgtgaccatcagaggcctgcccaagggcaacagacccgtgatcctgacctaccacgacatcggcctgaaccacaagagctgcttcaacgccttcttcaacttcgaggacatgcaggagatcacccagcacttcgccgtgtgccacgtggacgcccccggccagcaggagggcgcccccagcttccccaccggctaccagtaccccaccatggacgagctggccgagatgctgccccccgtgctgacccacctgagcctgaagagcatcatcggcatcggcgtgggcgccggcgcctacatcctgagcagattcgccctgaaccaccccgagctggtggagggcctggtgctgatcaacgtggacccctgcgccaagggctggatcgactgggccgccagcaagctgagcggcctgaccaccaacgtggtggacatcatcctggcccaccacttcggccaggaggagctgcaggccaacctggacctgatccagacctacagaatgcacatcgcccaggacatcaaccaggacaacctgcagctgttcctgaacagctacaacggcagaagagacctggagatcgagagacccatcctgggccagaacgacaacaagagcaagaccctgaagtgcagcaccctgctggtggtgggcgacaacagccccgccgtggaggccgtggtggagtgcaacagcagactgaaccccatcaacaccaccctgctgaagatggccgactgcggcggcctgccccaggtggtgcagcccggcaagctgaccgaggccttcaagtacttcctgcagggcatgggctacatccccagcgccagcatgaccagactggccagaagcagaacccacagcaccagcagcagcctgggcagcggcgagagccccttcagcagaagcgtgaccagcaaccagagcgacggcacccaggagagctgcgagagccccgacgtgctggacagacaccagaccatggaggtgagctgctag

SEQ ID NO: 222547 - DNA, 1128 bp, Artificial Sequence
  derived and/or modified sequence
atggacgaactccaagatgtgcagctgaccgagatcaagccgctgttaaatgataagaacggtactaggaatttccaggatttcgactgtcaggagcacgatattgagactacacacggggtggtgcacgtgactatccgtggtctacctaagggcaaccggcctgtcatcctgacctaccacgacatcggactgaatcataagagttgttttaatgcgtttttcaatttcgaggatatgcaggagatcacccagcacttcgcagtctgccacgttgacgcgccgggtcagcaagaaggggcccctagctttcctactggatatcagtacccaacaatggatgaattggctgaaatgctaccgcctgttctgacccacctatccctcaaaagtatcattggaatcggcgtaggcgctggagcctacatcctttcaagatttgctcttaaccaccctgaactcgtcgagggcctggttttgatcaatgtggacccttgcgctaaaggatggatcgactgggccgcatcaaaactgtctggcctcaccacgaatgtggtggatattattctagcccaccacttcggtcaggaggaactgcaagccaatctcgatctcatccagacgtaccggatgcacatcgcgcaggatatcaaccaggataatctccagctgttcctcaattcttacaacggccgccgggacctggagattgaaagacccatcctaggccagaacgataataaatccaaaactctcaagtgctcaacccttctggtggttggggacaacagccctgctgtggaagcagtggtggagtgtaacagccggctcaaccctattaacaccacactcctgaaaatggccgactgtggtgggttgccacaagtcgtgcagcccggaaaattaactgaagcttttaaatactttcttcagggcatggggtacatcccttccgcctcaatgacccgcctcgcgcgctcacgcacccactccacaagcagcagcttggggagcggtgaatccccttttagccgcagcgtgacgtccaatcagagtgacggaactcaggagtcttgcgagagccctgacgttcttgacaggcaccaaacaatggaggtgtcatgctag

SEQ ID NO: 222548 - DNA, 1128 bp, Artificial Sequence
  derived and/or modified sequence
atggatgagctgcaggatgtgcagctgacagagatcaagcccctgctgaatgacaagaatggcaccaggaacttccaggactttgactgccaggagcatgacatcgagaccacccatggagtggtgcacgtgaccatccggggcctgcccaagggcaacagacctgtgatcctgacctaccatgacatcggcctgaaccacaagagctgcttcaatgccttcttcaactttgaggacatgcaggagatcacccagcactttgctgtgtgccacgtggatgcccctggccagcaggagggcgcccccagcttccccaccggctaccagtaccccaccatggatgagctggccgagatgctgccccctgtgctgacccacctgagcctgaagagcatcattggaattggagtgggcgctggggcctacatcctgagcagatttgccctgaaccaccctgagctggtggagggcctggtgctgatcaacgtggacccctgtgccaagggctggattgactgggccgccagcaagctgagcggcctgaccaccaacgtggtggacatcatcctggcccaccacttcggccaggaggagctgcaggccaacctggacctgatccagacctacaggatgcacatcgcccaggacatcaaccaggacaacctgcagctgttcctgaacagctacaacggccggcgggacctggagattgagcggcccatcctgggccagaatgacaacaagagcaagaccctgaagtgcagcaccctgctggtggtgggggacaacagccctgctgtggaggccgtggtggagtgcaacagccggctgaaccccatcaacaccaccctgctgaagatggctgactgtggcggcctgccccaggtggtgcagcccgggaagctgacagaggccttcaagtacttcctgcagggcatgggctacatccccagcgcctccatgacccggctggcccggagcaggacccacagcaccagcagcagcctgggcagcggggagagccccttcagccgctctgtgaccagcaaccagagtgatggcacccaggagagctgtgagagcccagatgtgctggacagacaccagaccatggaggtgtcctgctag

SEQ ID NO: 222549 - DNA, 1128 bp, Artificial Sequence
  derived and/or modified sequence
atggacgagctgcaggacgtgcagctgaccgagatcaagcccctgcttaacgataaaaacgggactcgcaacttccaggactttgattgccaggagcacgacatcgaaactacccatggggtggtacatgttaccatccgtggtttgcctaagggcaatcgtcccgttatcctgacctatcatgatataggtctcaatcacaagtcatgttttaatgcattcttcaattttgaagacatgcaggagataactcaacacttcgccgtgtgccacgtggatgcacctggccaacaggaaggggctccaagcttccccacagggtaccagtatcccacaatggacgagttggccgagatgctacctccagttttgacacaccttagtttgaagagcatcatcggaatcggagttggtgctggggcctatattctgtctcgctttgctctaaatcatcctgagctcgtggaaggactcgttctgatcaatgttgatccttgtgccaagggctggatagattgggctgcaagtaagttatcaggcctaacaacaaacgtggttgacattatcttggcccaccatttcggccaggaggaacttcaggccaacctggatctcatacagacttaccgcatgcacatcgcacaggatattaatcaagacaatcttcagctatttttgaactcatacaacggccggcgggatctggaaattgagcgacccattttggggcagaacgacaacaagtccaaaacattgaagtgtagcaccctgcttgtggttggcgacaactcaccagctgtggaggctgtggtggagtgtaattctaggctgaacccaattaacaccacactcttgaagatggcagactgtggcgggctaccacaagtcgttcaacccggcaaactcaccgaagcctttaagtacttcctccaggggatgggctatattccttctgcatctatgaccaggcttgcccggtccaggactcactccaccagctcaagtctgggctcgggcgaatcccctttcagccgaagtgtcaccagcaaccaatcagatgggacccaggagtcttgtgaatctcccgatgtgctggacaggcatcagacgatggaagtatcctgttag

SEQ ID NO: 222550 - DNA, 2964 bp, Artificial Sequence
  derived and/or modified sequence
gctgctgcactgacggcgggtgcccgcgcctcagagttactgatttattcttgagattcctctactctcgttatctgacctcatggatgaacttcaggatgttcagctcacagagatcaaaccacttctaaatgataagaatggtacaagaaacttccaggactttgactgtcaggaacatgatatagaaacaactcatggtgtggtccacgtcactataagaggcttacccaaaggaaacagaccagttatactaacatatcatgacattggcctcaaccataaatcctgtttcaatgcattctttaactttgaggatatgcaagagatcacccagcactttgctgtctgtcatgtggatgccccaggccagcaggaaggtgcaccctctttcccaacagggtatcagtaccccacaatggatgagctggctgaaatgctgcctcctgttcttacccacctaagcctgaaaagcatcattggaattggagttggagctggagcttacatcctcagcagatttgcactcaaccatccagagcttgtggaaggccttgtgctcattaatgttgacccttgcgctaaaggctggattgactgggcagcttccaaactctctggcctgacaaccaatgttgtggacattattttggctcatcactttgggcaggaagagttacaggccaacctggacctgatccaaacctacagaatgcatattgcccaagacatcaaccaagacaacctgcagctcttcttgaattcctacaatggacgcagagacctggagatcgaaagacccatactgggccaaaatgataacaaatcaaaaacattaaagtgttctactttactggtggtaggggacaattcgcctgcagttgaggctgtggtcgaatgcaattcccgcctgaaccctataaatacaactttgctaaagatggcggactgtgggggactgccccaggtagttcagcctgggaagctcaccgaggccttcaagtactttttgcagggaatgggctacataccatctgccagcatgactcggctcgcccgatcacgaacccactcaacctcgagtagcctcggctctggagaaagtcccttcagccggtctgtcaccagcaatcagtcagatggaactcaagaatcctgtgagtcccctgatgtcctggacagacaccagaccatggaggtgtcctgctaagcagatgctcctcccctggaccattgcaagtccatccttcaaatgaccactccataatataacatttcatccagtaaactggcctctactatctttaactcatgcatggccactgaacctctctctagtagcctggatttatcattctctctgcctgcccacccccttttttgtatagcccaagaaccacttccatgccatactgtaacattccaacatctttagctgatcagatctctccatatcctctcttgccagctttttcccgtgctcccccaactatgtatcagataagattctttgatcccgactctgtgtgtgcgagcacgcgtgtctgtgtttgtgtgtgcatagttctgtggttttagacacgctttcttgtagtgcttctgcaaaaaacaaaaaagggacttattttgcattctcaatggtgtttttaagggaattaggcagaacagatttctaggttgggtaggccactgcattctcttttgtttgcaaattggtcaacaaaatttgcaaagtgatttcaggagagagcagctttgaggaatgtggaaaatcataattgccgtctggaccattgattgattgtgaccagtagcagaagggtgcctgttacatagagaggctccttctgtccaaatgaatttctgtatactcttctataaataaaagggaggaatatattctgctggaagcccatgaaccatcgctgaggttctgatacaacatagagttttttccaaggagtgaatgtggtttaattactggactctcttagcacaggaaggtggaaacaaaatgccaggcctctgctctgaagagcaaaactgctgtcgctgcagtatctgataccagacatccacatatccacaagaagtgcctcttaggtctgtgacagagagtgtgtctccattcctcagttcccagaaaggggagaggtttggcctaaaaagcatgtagatgggggagaaatgggtggggggagaggaacagccattaacacagtatcatgtttaacaagtatagccttgatttcagtagatgtaatggaagccaaattaaattgatacagaacccatttctcagagtctttttttttttttgagacagagtctcgctgttacccaggctggagtgcaatggcgcaaacttggctcactgcaacctctgccccctgggttcaagcgattctcctgcctcagcctcccgagtagctgagactacaggcacctgccaccatacccagctaagttatgtatttttagtagagatggagtttcaccatgttggccaggctggtctcaaactcctgacctcaggtgatccacctgcctcagcctcccaaagtgctgggattacaggcatgagtcattgctcccagccattagaaagattgttaatcctatgaactcccttttgtaggagagaaagggccaatctgtaggggtagccctgtccaggtaaagttgttttcagcctcatgtctactgttaggtgagggagtcacagccagacagagagtattgctggagggtgagagaattgtggagaccaactaccacatagcaagagcccagctcttgggagcattgagatgtaagctcagggttacacagttccaaatcttgggaaggggcttttcagacagactgtttgctttctgctgagataaggaatgcatcactctgccagagtatgactttttacagattattaaataaagctgcatatgtctcattgttacctga

SEQ ID NO: 222551 - DNA, 1128 bp, Artificial Sequence
  derived and/or modified sequence
atggatgaattacaggatgttcagctcacagaaattaagccactgctaaatgacaagaacggcacccgcaattttcaggattttgactgccaggagcatgacatagaaaccacccatggcgtggtacatgttaccattagggggctccctaagggtaaccggcctgtaatcctcacgtatcacgatattggtcttaatcataagtcttgcttcaatgcgttttttaactttgaagatatgcaggagattacccagcactttgccgtttgtcacgtcgatgccccaggacaacaggagggcgctcctagctttcccaccgggtatcagtatccaacaatggacgagctggctgaaatgctcccgccagtactgacccacctgtcactcaaaagtatcatcggaattggggtgggcgcaggggcatatattctgagccggtttgctctgaaccacccagagctggtggaagggttggtgctgatcaacgtggacccatgtgcaaaaggctggatcgattgggccgcatccaaactctctggcctgaccaccaacgtcgtggacatcattctcgcacaccattttgggcaagaagagctacaagcaaatctggacttaatccagacctaccgtatgcacattgcccaggacattaaccaggacaacttacagctgttcctgaattcgtacaacggtcggcgtgatcttgagatcgaacgtcctatcctgggtcagaacgacaataagtctaagaccttaaaatgctccaccctgttagtagtgggcgataactcccctgcggtggaagcggtagttgagtgtaacagcagactcaaccccataaacacaaccttgctaaagatggccgactgtggcggtttgcctcaggtggtccagcccggaaagttgactgaagccttcaagtacttcttgcaagggatgggatatatcccaagcgcctcaatgacccggttagcgcgatcccggacacattcgacttcgtcgagtctcgggagcggggagtctccattcagccgaagcgtcacctccaaccagtccgatggaacacaagagtcctgtgagtcacctgatgtgctggaccgacaccagactatggaagtttcatgttag

SEQ ID NO: 222552 - protein, 234 aa, Artificial Sequence
  derived and/or modified sequence
MNHLPEDMENALTGSQSSHASLRNIHSINPTQLMARIESYEGREKKGISDVRRTFCLFVTFDLLFVTLLWIIELNVNGGIENTLEKEVMQYDYYSSYFDIFLLAVFRFKVLILAYAVCRLRHWWAIALTTAVTSAFLLAKVILSKLFSQGAFGYVLPIISFILAWIETWFLDFKVLPQEAEEENRLLIVQDASERAALIPGGLSDGQFYSPPESEAGSEEAEEKQDSEKPLLEL

SEQ ID NO: 222553 - protein, 206 aa, Artificial Sequence
  derived and/or modified sequence
MNHLPEDMENALTGSQSSHASLRNIHSINPTQLMARIESYEGREKKGISDVRRTFCLFVTFDLLFVTLLWIIELNVNGGIENTLEKEVMQYDYYSSYFDIFLLAVFRFKVLILAYAVCRLRHWWAIALTTAVTSAFLLAKVILSKLFSQGAFGYVLPIISFILAWIETWFLDFKVLPQEAEEENRLLIVQDASERAALIPGGLSDG

SEQ ID NO: 222554 - protein, 184 aa, Artificial Sequence
  derived and/or modified sequence
MNHLPEDMENALTGSQSSHASLRNIHSINPTQLMARIESYEGREKKGISDVRRTFCLFVTFDLLFVTLLWIIELNVNGGIENTLEKEVMQYDYYSSYFDIFLLAVFRFKVLILAYAVCRLRHWWAIALTTAVTSAFLLAKVILSKLFSQGAFGYVLPIISFILAWIETWFLDFKVLPQEAEEEN

SEQ ID NO: 222555 - protein, 172 aa, Artificial Sequence
  derived and/or modified sequence
MNHLPEDMENALTGSQSSHASLRNIHSINPTQLMARIESYEGREKKGISDVRRTFCLFVTFDLLFVTLLWIIELNVNGGIENTLEKEVMQYDYYSSYFDIFLLAVFRFKVLILAYAVCRLRHWWAIALTTAVTSAFLLAKVILSKLFSQGAFGYVLPIISFILAWIETWFLD

SEQ ID NO: 222556 - protein, 227 aa, Artificial Sequence
  derived and/or modified sequence
MENALTGSQSSHASLRNIHSINPTQLMARIESYEGREKKGISDVRRTFCLFVTFDLLFVTLLWIIELNVNGGIENTLEKEVMQYDYYSSYFDIFLLAVFRFKVLILAYAVCRLRHWWAIALTTAVTSAFLLAKVILSKLFSQGAFGYVLPIISFILAWIETWFLDFKVLPQEAEEENRLLIVQDASERAALIPGGLSDGQFYSPPESEAGSEEAEEKQDSEKPLLEL

SEQ ID NO: 222557 - DNA, 705 bp, Artificial Sequence
  derived and/or modified sequence
atgaaccacctgcccgaggacatggagaacgccctgaccggcagccagagcagccacgccagcctgagaaacatccacagcatcaaccccacccagctgatggccagaatcgagagctacgagggcagagagaagaagggcatcagcgacgtgagaagaaccttctgcctgttcgtgaccttcgacctgctgttcgtgaccctgctgtggatcatcgagctgaacgtgaacggcggcatcgagaacaccctggagaaggaggtgatgcagtacgactactacagcagctacttcgacatcttcctgctggccgtgttcagattcaaggtgctgatcctggcctacgccgtgtgcagactgagacactggtgggccatcgccctgaccaccgccgtgaccagcgccttcctgctggccaaggtgatcctgagcaagctgttcagccagggcgccttcggctacgtgctgcccatcatcagcttcatcctggcctggatcgagacctggttcctggacttcaaggtgctgccccaggaggccgaggaggagaacagactgctgatcgtgcaggacgccagcgagagagccgccctgatccccggcggcctgagcgacggccagttctacagcccccccgagagcgaggccggcagcgaggaggccgaggagaagcaggacagcgagaagcccctgctggagctgtag

SEQ ID NO: 222558 - DNA, 621 bp, Artificial Sequence
  derived and/or modified sequence
atgaaccacctgcccgaggacatggagaacgccctgaccggcagccagagcagccacgccagcctgagaaacatccacagcatcaaccccacccagctgatggccagaatcgagagctacgagggcagagagaagaagggcatcagcgacgtgagaagaaccttctgcctgttcgtgaccttcgacctgctgttcgtgaccctgctgtggatcatcgagctgaacgtgaacggcggcatcgagaacaccctggagaaggaggtgatgcagtacgactactacagcagctacttcgacatcttcctgctggccgtgttcagattcaaggtgctgatcctggcctacgccgtgtgcagactgagacactggtgggccatcgccctgaccaccgccgtgaccagcgccttcctgctggccaaggtgatcctgagcaagctgttcagccagggcgccttcggctacgtgctgcccatcatcagcttcatcctggcctggatcgagacctggttcctggacttcaaggtgctgccccaggaggccgaggaggagaacagactgctgatcgtgcaggacgccagcgagagagccgccctgatccccggcggcctgagcgacggctag

SEQ ID NO: 222559 - DNA, 555 bp, Artificial Sequence
  derived and/or modified sequence
atgaaccacctgcccgaggacatggagaacgccctgaccggcagccagagcagccacgccagcctgagaaacatccacagcatcaaccccacccagctgatggccagaatcgagagctacgagggcagagagaagaagggcatcagcgacgtgagaagaaccttctgcctgttcgtgaccttcgacctgctgttcgtgaccctgctgtggatcatcgagctgaacgtgaacggcggcatcgagaacaccctggagaaggaggtgatgcagtacgactactacagcagctacttcgacatcttcctgctggccgtgttcagattcaaggtgctgatcctggcctacgccgtgtgcagactgagacactggtgggccatcgccctgaccaccgccgtgaccagcgccttcctgctggccaaggtgatcctgagcaagctgttcagccagggcgccttcggctacgtgctgcccatcatcagcttcatcctggcctggatcgagacctggttcctggacttcaaggtgctgccccaggaggccgaggaggagaactag

SEQ ID NO: 222560 - DNA, 519 bp, Artificial Sequence
  derived and/or modified sequence
atgaaccacctgcccgaggacatggagaacgccctgaccggcagccagagcagccacgccagcctgagaaacatccacagcatcaaccccacccagctgatggccagaatcgagagctacgagggcagagagaagaagggcatcagcgacgtgagaagaaccttctgcctgttcgtgaccttcgacctgctgttcgtgaccctgctgtggatcatcgagctgaacgtgaacggcggcatcgagaacaccctggagaaggaggtgatgcagtacgactactacagcagctacttcgacatcttcctgctggccgtgttcagattcaaggtgctgatcctggcctacgccgtgtgcagactgagacactggtgggccatcgccctgaccaccgccgtgaccagcgccttcctgctggccaaggtgatcctgagcaagctgttcagccagggcgccttcggctacgtgctgcccatcatcagcttcatcctggcctggatcgagacctggttcctggactag

SEQ ID NO: 222561 - DNA, 684 bp, Artificial Sequence
  derived and/or modified sequence
atggagaacgccctgaccggcagccagagcagccacgccagcctgagaaacatccacagcatcaaccccacccagctgatggccagaatcgagagctacgagggcagagagaagaagggcatcagcgacgtgagaagaaccttctgcctgttcgtgaccttcgacctgctgttcgtgaccctgctgtggatcatcgagctgaacgtgaacggcggcatcgagaacaccctggagaaggaggtgatgcagtacgactactacagcagctacttcgacatcttcctgctggccgtgttcagattcaaggtgctgatcctggcctacgccgtgtgcagactgagacactggtgggccatcgccctgaccaccgccgtgaccagcgccttcctgctggccaaggtgatcctgagcaagctgttcagccagggcgccttcggctacgtgctgcccatcatcagcttcatcctggcctggatcgagacctggttcctggacttcaaggtgctgccccaggaggccgaggaggagaacagactgctgatcgtgcaggacgccagcgagagagccgccctgatccccggcggcctgagcgacggccagttctacagcccccccgagagcgaggccggcagcgaggaggccgaggagaagcaggacagcgagaagcccctgctggagctgtag

SEQ ID NO: 222562 - DNA, 705 bp, Artificial Sequence
  derived and/or modified sequence
atgaaccacctgcccgaggatatggagaatgctttgaccggctcccagagctcacacgcatccctccgcaacatccattcaatcaaccccactcagctgatggcgagaatcgaaagttatgaaggccgggaaaaaaaaggaatcagtgacgtgaggcggacattctgcctgtttgtcactttcgatcttctgtttgtgacactcctctggattattgaattgaacgtgaacggggggatcgaaaatactttagagaaggaggtgatgcaatatgattattattctagctatttcgatatctttttactggccgttttcaggtttaaagttctgattctcgcttacgccgtgtgcagattgaggcactggtgggcaatcgcccttaccacagctgtgacaagtgctttcttgctagcaaaggtgattctcagtaagctgttttcccagggagcctttggatacgtactccctatcatcagctttatcctcgcctggatcgaaacatggttcctggacttcaaggtactgcctcaggaagcagaggaagaaaataggctccttatcgtgcaggacgcttctgagcgggcagccctgattcctggaggactgagcgacggtcaattttactccccacccgagtcagaggctggatcggaagaagcggaggagaaacaggattccgagaagcccttgttagagctgtag

SEQ ID NO: 222563 - DNA, 705 bp, Artificial Sequence
  derived and/or modified sequence
atgaatcacttgcctgaggacatggaaaatgctttaactggttcccaatccagtcacgcgagcctgcgtaatatacacagcataaacccgactcagctgatggcacggatcgaaagttacgaaggccgagaaaaaaaaggtatctccgatgtgaggcggactttctgtctctttgtcacttttgatctgctatttgtgacactgctctggataatcgaattgaatgttaatgggggtattgaaaacactctggagaaggaggtgatgcaatatgactattatagctcgtactttgatatattcctgcttgcagtctttcgtttcaaggtgcttattctggcctatgcagtgtgtcgcttacggcattggtgggccatagctctgactacagctgtaacctcagctttcttactggcaaaggtgatcctgagcaagctatttagccagggagcgtttgggtacgttctcccaataatcagctttatcctagcatggatcgagacttggtttttagatttcaaagtccttccccaagaagcagaagaggaaaacaggctgctgatcgtgcaggacgccagcgaacgagccgccctgatcccaggcgggctatctgatgggcagttttacagtccccccgagagcgaggcaggatctgaggaggctgaggagaagcaggattcggagaagccgctgttggaactgtag

SEQ ID NO: 222564 - DNA, 621 bp, Artificial Sequence
  derived and/or modified sequence
atgaatcaccttcccgaggacatggaaaacgccctcacaggtagccagtcctcccatgccagcctgcgcaatattcacagtatcaaccccacccagctgatggcacgaatcgagagttatgaggggcgcgagaagaaaggaatcagcgacgttcgacgcaccttctgtctgttcgttacattcgaccttctgtttgtcacgcttctctggatcatcgagctcaacgtgaatggcggtatcgagaacaccctcgagaaagaagtgatgcagtacgactactactcctcctattttgacatctttctgctggctgtctttagatttaaagtgctgatcctggcgtacgccgtctgcagattgcgacactggtgggccatcgcgctgacaaccgccgtcacctccgccttcctgctagcgaaagtgattctgagcaagctgttttcgcaaggggcctttgggtatgttctgcccattatttctttcatccttgcctggatcgagacatggttccttgattttaaagtgctgccgcaagaggccgaggaagaaaaccgtttactgattgtacaagatgcatcagagagagcggccctgattcctggggggttgtcggatggatag

SEQ ID NO: 222565 - DNA, 555 bp, Artificial Sequence
  derived and/or modified sequence
atgaaccacctccccgaggacatggaaaacgccctgacagggagccagtcatctcacgcatctctgcgaaatatccattcaatcaacccaacccagctcatggccaggattgagtcatacgaaggccgagagaagaaaggaatatctgacgttcgtagaacattttgcctgtttgtcaccttcgacctcctctttgtaactcttttgtggattatcgaacttaacgtgaacggcggcatcgagaacacactggagaaagaggtgatgcagtacgattactattcatcttacttcgacatattcctcctcgctgtcttcaggttcaaagtgcttattttagcctatgctgtctgtaggctgcgccactggtgggcaattgcccttactacggctgtcacttctgcatttctcctggccaaggtgattctgagcaaactgttcagccaaggcgccttcggctacgtactgccaatcatctcatttattctggcatggatcgagacttggtttctggatttcaaggtgttgccacaggaagccgaggaagagaactag

SEQ ID NO: 222566 - DNA, 519 bp, Artificial Sequence
  derived and/or modified sequence
atgaatcatctgcccgaggacatggagaatgcgctgacgggctctcagagcagccacgcttcactgcggaatatacacagcatcaatccaacccaactcatggcaagaatcgaatcttacgaaggtagggagaagaaggggatctccgacgtgcgacggaccttctgccttttcgtcaccttcgatctcttgtttgtgactcttctgtggatcattgaactgaatgtgaacggaggcatagaaaatacgctagaaaaggaagtgatgcagtatgactactactcgagttattttgatattttcctgttagccgtgttccgctttaaagtgctgatcttggcatacgctgtttgtcgcttacgccattggtgggcaatagcgctgactaccgcagttacctcagctttcttgctggctaaagtaatactgagtaaattattttcccagggcgcctttggatatgtgcttcctatcattagtttcatcttggcatggattgagacatggttcctggattag

SEQ ID NO: 222567 - DNA, 684 bp, Artificial Sequence
  derived and/or modified sequence
atggagaacgccttaacagggagtcagtcctctcatgcctccctgaggaatattcatagtatcaaccctactcagcttatggcaaggatcgagtcctatgaggggagagagaagaaaggcataagcgatgttaggagaacattctgcctgttcgtcacgttcgatctccttttcgtgaccctgctgtggataattgaactgaacgttaacggcggaattgagaataccttggagaaggaggtcatgcagtacgactactactcgagctacttcgatatcttcctgctcgctgtgtttcgctttaaggtgctcatcctcgcatacgcagtatgccggcttagacattggtgggctatcgcacttaccaccgccgtgacatctgcattcctgttggctaaagtgatacttagcaagctgttttcccagggggcctttggctacgtcctccctatcatcagttttattctggcgtggattgaaacctggtttctcgactttaaggtcttgcctcaggaagccgaggaagagaacaggttattaatcgtgcaggacgctagcgaacgggctgcgcttattccaggtggcctaagcgatggccaattctattccccaccagagtctgaggctggctccgaggaggcagaggagaagcaggactcagaaaagcctctgctggagctctag

SEQ ID NO: 222568 - DNA, 705 bp, Artificial Sequence
  derived and/or modified sequence
atgaaccacctgcctgaggacatggagaatgccctgaccggcagccagagcagccacgccagcctgaggaacatccacagcatcaaccccacccagctgatggccagaattgagagctatgagggccgggagaagaagggcatcagtgatgtgcggaggaccttctgcctgtttgtgacctttgacctgctgtttgtgaccctgctgtggatcatcgagctgaatgtgaatggaggcatcgagaacaccctggagaaggaggtgatgcagtatgactactacagcagctactttgacatcttcctgctggccgtgttccgcttcaaggtgctgatcctggcctatgctgtgtgccgcctgcggcactggtgggccatcgccctgaccacagctgtgaccagcgccttcctgctggccaaggtgatcctgagcaagctgttcagccagggcgccttcggctacgtgctgcccatcatctccttcatcctggcctggattgagacctggttcctggacttcaaggtgctgccccaggaggccgaggaggagaaccggctgctgattgtgcaggatgccagcgagcgggccgccctgatccctgggggcctgagtgatggccagttctacagccccccagagagcgaggccggcagcgaggaggccgaggagaagcaggacagcgagaagcccctgctggagctgtag

SEQ ID NO: 222569 - DNA, 621 bp, Artificial Sequence
  derived and/or modified sequence
atgaaccacctgcctgaggacatggagaatgccctgaccggcagccagagcagccacgccagcctgaggaacatccacagcatcaaccccacccagctgatggccagaattgagagctatgagggccgggagaagaagggcatcagtgatgtgcggaggaccttctgcctgtttgtgacctttgacctgctgtttgtgaccctgctgtggatcatcgagctgaatgtgaatggaggcatcgagaacaccctggagaaggaggtgatgcagtatgactactacagcagctactttgacatcttcctgctggccgtgttccgcttcaaggtgctgatcctggcctatgctgtgtgccgcctgcggcactggtgggccatcgccctgaccacagctgtgaccagcgccttcctgctggccaaggtgatcctgagcaagctgttcagccagggcgccttcggctacgtgctgcccatcatctccttcatcctggcctggattgagacctggttcctggacttcaaggtgctgccccaggaggccgaggaggagaaccggctgctgattgtgcaggatgccagcgagcgggccgccctgatccctgggggcctgagtgatggatag

SEQ ID NO: 222570 - DNA, 555 bp, Artificial Sequence
  derived and/or modified sequence
atgaaccacctgcctgaggacatggagaatgccctgaccggcagccagagcagccacgccagcctgaggaacatccacagcatcaaccccacccagctgatggccagaattgagagctatgagggccgggagaagaagggcatcagtgatgtgcggaggaccttctgcctgtttgtgacctttgacctgctgtttgtgaccctgctgtggatcatcgagctgaatgtgaatggaggcatcgagaacaccctggagaaggaggtgatgcagtatgactactacagcagctactttgacatcttcctgctggccgtgttccgcttcaaggtgctgatcctggcctatgctgtgtgccgcctgcggcactggtgggccatcgccctgaccacagctgtgaccagcgccttcctgctggccaaggtgatcctgagcaagctgttcagccagggcgccttcggctacgtgctgcccatcatctccttcatcctggcctggattgagacctggttcctggacttcaaggtgctgccccaggaggccgaggaggagaactag

SEQ ID NO: 222571 - DNA, 519 bp, Artificial Sequence
  derived and/or modified sequence
atgaaccacctgcctgaggacatggagaatgccctgaccggcagccagagcagccacgccagcctgaggaacatccacagcatcaaccccacccagctgatggccagaattgagagctatgagggccgggagaagaagggcatcagtgatgtgcggaggaccttctgcctgtttgtgacctttgacctgctgtttgtgaccctgctgtggatcatcgagctgaatgtgaatggaggcatcgagaacaccctggagaaggaggtgatgcagtatgactactacagcagctactttgacatcttcctgctggccgtgttccgcttcaaggtgctgatcctggcctatgctgtgtgccgcctgcggcactggtgggccatcgccctgaccacagctgtgaccagcgccttcctgctggccaaggtgatcctgagcaagctgttcagccagggcgccttcggctacgtgctgcccatcatctccttcatcctggcctggattgagacctggttcctggactag

SEQ ID NO: 222572 - DNA, 684 bp, Artificial Sequence
  derived and/or modified sequence
atggagaatgccctgaccggcagccagagcagccacgccagcctgaggaacatccacagcatcaaccccacccagctgatggcccgcatcgagagctatgagggccgggagaagaagggcatcagtgatgtgcggaggaccttctgcctgtttgtgacctttgacctgctgtttgtgaccctgctgtggatcatcgagctgaatgtgaatggaggcatcgagaacaccctggagaaggaggtgatgcagtatgactactacagcagctactttgacatcttcctgctggccgtgttccgcttcaaggtgctgatcctggcctatgctgtgtgccgcctgcggcactggtgggccatcgccctgaccacagctgtgaccagcgccttcctgctggccaaggtgatcctgagcaagctgttcagccagggcgccttcggctacgtgctgcccatcatctccttcatcctggcctggattgagacctggttcctggacttcaaggtgctgccccaggaggccgaggaggagaaccggctgctgattgtgcaggatgccagcgagagagctgccctgatccctgggggcctgagtgatggccagttctacagccccccagagagcgaggccggcagcgaggaggccgaggagaagcaggacagcgagaagcccctgctggagctgtag

SEQ ID NO: 222573 - DNA, 705 bp, Artificial Sequence
  derived and/or modified sequence
atgaaccacctgcccgaggacatggagaacgccctgaccggcagccagtcttcacatgcctccttgcgtaacatacactctatcaaccccacgcagctaatggcgcgcatcgaatcttacgagggccgcgagaaaaaaggtatcagtgacgtccggcgcaccttttgcctttttgtcaccttcgacctactctttgtcaccttactatggattatagagcttaatgttaatggcgggattgagaataccctcgaaaaggaggtgatgcagtatgactactactctagctacttcgacatctttctcttagccgtcttcaggtttaaagtgctcatactggcgtatgctgtatgcaggcttagacactggtgggcgattgcactgacaaccgcggtcacaagtgcttttctgctcgcaaaagtgatattgtccaagctcttttcccaaggtgcatttgggtacgtgttgcctattatcagctttatcttagcttggattgaaacttggttcctggactttaaagtccttccccaggaggctgaggaggagaatcggctgctgatagttcaagacgcatccgagagagcagcgttgatacccggtggactgagcgatggccagttttacagcccacctgaatctgaggccgggtcagaggaagcagaggagaaacaagattcagagaagccactgctagagctctag

SEQ ID NO: 222574 - DNA, 705 bp, Artificial Sequence
  derived and/or modified sequence
atgaaccacctgcccgaggacatggagaacgccctgaccggcagccagtcatcacacgccagcctgaggaatatacattctattaatccgacacagcttatggccagaatcgagtcatacgaaggacgtgagaaaaagggaatttctgacgtgcggagaaccttctgtctgttcgtgacctttgatctgctgttcgtgacgttattatggatcatcgaactgaacgtgaatggcgggatcgagaatacattggagaaagaagtgatgcagtatgattactattcatcctattttgatatcttcttgttagctgtttttagattcaaggtcctgatattggcctacgccgtctgcagactgcggcactggtgggcgatcgccctgacaaccgcagtgaccagcgcattcctgctggctaaggtgatcctatcaaagctttttagccaaggtgccttcggttacgtcctgccaatcatttcctttattctggcttggattgaaacttggttcctcgatttcaaggtccttccccaggaggccgaagaggagaatcgcctcctgattgtgcaggacgcgtctgagcgcgcagcgcttatcccaggaggtttgagcgatggtcagttctattctccccccgaaagtgaagcaggctcggaggaggccgaggagaaacaggattccgaaaagcccctcctggagctgtag

SEQ ID NO: 222575 - DNA, 621 bp, Artificial Sequence
  derived and/or modified sequence
atgaaccacctgcccgaggacatggagaacgccctgaccggcagccagagttcccatgccagtctgcgcaatattcacagcatcaaccccacacaactgatggcccggattgaaagctacgagggtcgagaaaagaagggaatatctgacgtgaggaggacgttctgcctttttgtcacatttgatctcctgtttgttaccctcctctggattattgagcttaacgttaacggcggcatcgaaaacaccctggaaaaagaagtgatgcaatacgattactatagcagctacttcgacatcttcctgctagccgtcttcagattcaaggttctgattttagcctacgccgtatgcagattgaggcactggtgggccattgcattgacaacggctgtaacaagtgcctttttactcgccaaggttatattatcaaaactgttttctcagggcgcgttcggttatgtgttgcctatcatctcttttatcctggcatggatcgagacgtggttcctcgacttcaaggtgctgccacaggaagccgaggaggagaaccggttactgatcgtgcaggatgcatctgaacgcgcagctcttatacctgggggactaagcgacgggtag

SEQ ID NO: 222576 - DNA, 555 bp, Artificial Sequence
  derived and/or modified sequence
atgaaccacctgcccgaggacatggagaacgccctgaccggcagccagtcatcccacgccagtctccgtaatattcacagcatcaatccaacacaactgatggcacggattgaaagctatgaagggagggaaaaaaaggggatctcagacgtgaggaggacattctgtctgtttgtcaccttcgacctcctatttgttacccttctatggattattgagcttaacgtgaatggaggaattgagaataccctcgaaaaggaggtaatgcagtatgactattacagctcttacttcgacatctttctactggcagtctttaggttcaaagtacttatactcgcttacgcagtctgcaggttgcgccattggtgggctatcgcactcactactgccgtgacatctgccttcctgttggcaaaggtcatcttatccaagcttttctcccagggtgcctttggatatgtgctgccgataatcagttttatcctcgcttggattgaaacttggttccttgacttcaaggtcctacctcaggaagccgaggaagagaactag

SEQ ID NO: 222577 - DNA, 519 bp, Artificial Sequence
  derived and/or modified sequence
atgaaccacctgcccgaggacatggagaacgccctgaccggcagccaatcctcacacgcatctctccggaatatccatagcatcaacccaacacaactgatggccagaattgagtcctatgaggggagagagaaaaaaggcatctccgatgtcaggagaacattttgtctgtttgtcacgttcgatctcttattcgtaactctgctgtggataatagagttaaacgtaaatggaggtatcgagaataccctggaaaaggaggtaatgcagtatgactattactcctcttattttgacatctttctgctggcagtgtttagattcaaggtgcttattcttgcctacgctgtatgtaggcttcgccattggtgggccattgcattaaccactgccgtcacgtccgctttcttgctggcgaaagtaatcctctccaagctgttcagccagggcgctttcggatacgtgctgcccattataagcttcatcctggcctggatcgagacttggttcctggactag

SEQ ID NO: 222578 - DNA, 684 bp, Artificial Sequence
  derived and/or modified sequence
atggagaacgccctgaccggcagccagagcagccacgccagcctgcggaacattcacagcatcaatcccacccagctcatggctcgcatcgagtcatatgagggacgtgagaaaaagggcatttctgacgtgcggcgcaccttctgcctgtttgtcactttcgacctactattcgttactctgctctggattatagagctgaacgtaaacggcggcatcgagaacaccttggaaaaagaagtgatgcagtacgactactacagtagttactttgacattttcctgctggccgtcttccgcttcaaggtgctcatcttggcctatgcagtgtgcaggctgaggcactggtgggccatagctttaaccactgccgttacatctgcatttctgttggctaaagtcattttgtcgaaactgttttctcagggagcattcgggtatgtgctccctatcatttcctttatcctggcttggattgagacctggttcctcgatttcaaggtgctgccccaagaagcagaggaggaaaatagattactgatcgtccaggacgcctccgaaagagccgctctcattcctggaggcctttccgatggccagttttacagcccacctgaaagcgaggctggaagcgaggaggcggaggagaagcaagattcagaaaagcccctcctcgaactctag

SEQ ID NO: 222579 - DNA, 705 bp, Artificial Sequence
  derived and/or modified sequence
atgaatcatctgcccgaagacatggaaaacgccctgaccggctcacagagcagtcatgcctcgcttcgcaacattcattcgatcaatcccacgcagctcatggcgaggatcgagtcttacgaagggcgtgaaaaaaaaggaatttcggacgtgcgaaggacgttttgcttgtttgtgacatttgatctgctatttgtaacattattatggattatcgagttgaacgttaacggtggaattgagaacactctggagaaagaagtcatgcaatacgattattatagcagctatttcgatatttttctgttggccgtatttaggttcaaggttcttattctggcctatgcagtgtgccgcctgcgacactggtgggctattgcgcttacgactgcggtgacaagtgcattcctcctggcgaaagtgattttgagcaaactgttctctcagggggcatttggatatgtgctccccattatatcattcatcttagcctggatcgaaacttggtttctggactttaaagtgctaccacaagaggcagaggaagaaaatcgtttactgatcgtgcaggatgcctctgagcgggctgctctcatcccaggcggactatctgatggccagttctactcaccgcctgagtcagaagcaggatcagaagaggcagaagagaaacaggactccgaaaaaccgctgctggaactgtag

SEQ ID NO: 222580 - DNA, 705 bp, Artificial Sequence
  derived and/or modified sequence
atgaaccacctgcctgaggatatggagaatgcgttaaccggatcccagtcctcacacgcctccctgaggaatattcacagcattaaccccacacagttgatggcacggattgagtcctacgaaggaagagagaagaaaggaatcagtgatgtcagaaggaccttctgcttgttcgtgacgttcgatctgctttttgtaacactcctctggattatcgagctcaacgttaacggaggcatcgaaaacactttggagaaggaagtcatgcagtacgattattattcgtcatattttgatattttcctcctggcagtgtttcgcttcaaagttctcatcttagcctacgctgtgtgcaggttgcggcattggtgggccatcgcactgaccacggccgtgacgagcgcctttcttttggcaaaagtgatactgagcaagctgttttcccaaggggcatttggatatgtcctgcccatcatctccttcatcctggcttggatagagacctggttcctcgactttaaagtcctcccgcaagaagcagaggaggaaaaccggctgcttatcgtgcaggatgcttccgaacgggcagcgctgatccccggaggactgtctgatggacagttctatagcccaccagagagcgaggcaggaagtgaagaggcagaggagaagcaggacagcgagaagccgctccttgaactgtag

SEQ ID NO: 222581 - DNA, 621 bp, Artificial Sequence
  derived and/or modified sequence
atgaatcatctgcccgaggacatggagaacgctctaacggggtcacagtctagtcatgcctctctccgtaacatccacagcataaatccgacgcagctgatggccagaatcgagtcttacgagggccgtgaaaaaaaaggaattagcgatgtccggaggacattctgtctgttcgtgacatttgatcttcttttcgtaaccctgctgtggataatcgagctcaacgttaacggagggattgagaacaccctcgagaaagaagttatgcagtatgactactattcctcctatttcgatattttcctgttggcggtgtttcggtttaaagtcttgatcctcgcctatgcagtgtgccgattgagacattggtgggccatcgcattaaccacagctgttacctccgcctttctactggcaaaggtcattcttagcaaactgttctcacagggtgccttcgggtacgtccttccaatcatcagtttcatcctcgcatggattgaaacctggttcttggatttcaaagtgctacctcaagaggctgaggaagagaaccggctacttattgtccaggatgcatcagagagggcggcattgatcccgggtggtctcagcgatgggtag

SEQ ID NO: 222582 - DNA, 555 bp, Artificial Sequence
  derived and/or modified sequence
atgaaccacctccccgaggatatggagaacgccctgacagggagtcagtctagtcacgctagtctgagaaacattcacagcatcaatcctacacagttgatggctagaatcgagtcctatgagggaagggaaaaaaaaggtatctccgatgtgcgcagaactttctgtctcttcgtcacatttgacctgctgttcgtgaccctgttgtggatcatcgagctcaacgttaacggcggaatagaaaacacactggaaaaagaagtgatgcagtacgactattacagctcctattttgacatcttcttgctggcagtgttcagattcaaggtgttgatcttagcatacgccgtctgccggctgaggcactggtgggccatcgcactaacgacagcagttacgtcggcctttctgttagcgaaagtcattctgtctaaactgtttagccagggcgcttttgggtacgtcctacccatcatcagtttcatcctagcttggatcgagacctggtttctggacttcaaagtgttgcctcaggaggcggaggaagagaactag

SEQ ID NO: 222583 - DNA, 519 bp, Artificial Sequence
  derived and/or modified sequence
atgaatcacttacctgaggatatggaaaatgccctcaccggttcccagagttcccatgccagcctgaggaacattcactcaattaatccgacacagcttatggcaagaatcgaatcatatgaaggaagggaaaagaagggaattagcgatgtaagacggaccttctgtctgttcgtcacattcgatttactatttgtgacactgctgtggataattgagctcaatgtaaacgggggaatcgagaacacactggagaaggaggttatgcagtatgattactattcctcttacttcgatatctttctgttggccgttttccgctttaaggtgctaattcttgcctacgctgtgtgtcggctgagacattggtgggcaatcgccctcactacggcggtgacatcggctttcctcctggccaaagtcattctatcaaaattatttagtcagggcgcatttggctatgttttgcccatcatcagcttcatcctagcctggatcgaaacatggttcctcgattag

SEQ ID NO: 222584 - DNA, 684 bp, Artificial Sequence
  derived and/or modified sequence
atggagaacgccctcactggctctcagagcagtcacgcctctctcaggaacatacatagcatcaatccaacacagctcatggcacggatagaaagttatgagggcagagagaagaaaggtattagcgatgtgcggaggaccttctgcctgttcgttacattcgacctcctgttcgttaccctcctgtggattattgagttaaatgttaatggaggaatagagaataccctagagaaggaagttatgcagtatgattattattcaagctacttcgacattttccttctggccgttttcagattcaaagtgctcatcctggcctacgcagtgtgccgcctgcgtcattggtgggctatcgctctgaccacagccgtgacgagcgccttcctgttagccaaagtaattctgtccaaacttttttctcagggggcatttggatatgtgctgccgatcatctctttcattttggcttggattgaaacgtggtttctagacttcaaagtgctgccccaggaggccgaggaagaaaatcgtctgttgatcgtgcaggatgcttccgaacgggcagcactgatacctgggggactgtctgatgggcaattttattcaccacccgaatctgaagccggaagcgaggaggcggaagagaaacaggacagcgaaaagccgctgctcgagctatag

SEQ ID NO: 222585 - DNA, 705 bp, Artificial Sequence
  derived and/or modified sequence
atgaatcacttgcccgaagatatggaaaatgctctaaccggctcacagtcgtctcacgcttccttgagaaacatacattccatcaaccccactcagttaatggctaggatcgagtcatacgaagggcgggaaaaaaaggggatctccgatgttcgaaggaccttttgtctattcgtgactttcgatctgttattcgtaactttactttggatcatcgagctgaacgtaaacggtggtatcgaaaacacactggaaaaggaggtaatgcagtatgactactattcctcttactttgacatattcctgctggctgtgttccggtttaaagtgctcattctggcatatgccgtttgtcgacttcgccattggtgggccatcgctctgacgactgctgttacctctgctttcctgctagcgaaggtgattctgtcaaaactgttcagccagggagctttcggctatgtcctccccatcatatcctttattctggcgtggatcgagacatggttcctggactttaaggtgctgcctcaagaggccgaggaagagaaccgcctgcttatcgtacaggatgcctccgagcgcgccgcattgattcccggaggcctgagtgacgggcaattttattcaccccctgaatctgaggccgggtcagaggaggcagaagagaaacaagatagcgaaaagcctctcctcgagctctag

SEQ ID NO: 222586 - DNA, 705 bp, Artificial Sequence
  derived and/or modified sequence
atgaaccacctccccgaagatatggaaaacgcgctgacggggtctcaaagttctcacgcaagtctccgaaatatccactctatcaatcccacgcagctcatggcgagaatcgagtcttacgaggggagagagaaaaagggcattagcgatgttcgtaggaccttttgtcttttcgtgacctttgacctactgtttgtgacattgttatggataattgaactcaacgttaatggaggtattgagaatacactcgaaaaagaagtaatgcagtatgactactactcttcctactttgacattttcctgctggccgtgttccgctttaaagtccttatcctggcctacgccgtgtgtagattacgacactggtgggccatcgctctcacaactgcagtcacttccgcctttcttttagccaaggtcatcctttccaaactgttctctcaaggggcttttgggtacgtgctacctatcattagctttatcttagcatggatcgagacttggttccttgatttcaaggttctcccccaggaagcagaggaagaaaatcgactgctaatcgttcaagatgcatctgagcgtgccgccctaattcctggaggattatcagacggtcagttttattctcccccggaaagcgaggcaggtagcgaagaagccgaagaaaagcaggattccgagaaacccctgttggaactctag

SEQ ID NO: 222587 - DNA, 1728 bp, Artificial Sequence
  derived and/or modified sequence
gtgtgcgtcgacgtcagcgtgctgacgtcacgggccggaggtcccggggctgctgggtgcgggcggtgggctgcgcgttgtccgctggactgggtcccggtcacgccccgccaagccccgcccctcaggccggggcgcgaccgcggatccgcagttcccgggccagcctggggcggccggccaggaaccacccgttaaggtgtcttctctttagggatggtgaggttggaaaaaggctcctgtaaccctcctccaggatgaaccacctgccagaagacatggagaacgctctcaccgggagccagagctcccatgcttctctgcgcaatatccattccatcaaccccacacaactcatggccaggattgagtcctatgaaggaagggaaaagaaaggcatatctgatgtcaggaggactttctgtttgtttgtcacctttgacctcttattcgtaacattactgtggataatagagttaaatgtgaatggaggcattgagaacacattagagaaggaggtgatgcagtatgactactattcttcatattttgatatatttcttctggcagtttttcgatttaaagtgttaatacttgcatatgctgtgtgcagactgcgccattggtgggcaatagcgttgacaacggcagtgaccagtgcctttttactagcaaaagtgatcctttcgaagcttttctctcaaggggcttttggctatgtgctgcccatcatttcattcatccttgcctggattgagacgtggttcctggatttcaaagtgttacctcaagaagcagaagaagaaaacagactcctgatagttcaggatgcttcagagagggcagcacttatacctggtggtctttctgatggtcagttttattcccctcctgaatccgaagcaggatctgaagaagctgaagaaaaacaggacagtgagaaaccacttttagaactatgagtactacttttgttaaatgtgaaaaaccctcacagaaagtcatcgaggcaaaaagaggcaggcagtggagtctccctgtcgacagtaaagttgaaatggtgacgtccactgctggctttattgaacagctaataaagatttatttattgtaatacctcacagacgttgtaccatatccatgcacatttagttgcctgcctgtggctggtaaggtaatgtcatgattcatcctctcttcagtgagactgagcctgatgtgttaacaaataggtgaagaaagtcttgtgctgtattcctaatcaaaagacttaatatattgaagtaacacttttttagtaagcaagatacctttttatttcaattcacagaatggaatttttttgtttcatgtctcagatttattttgtatttcttttttaacactctacatttcccttgttttttaactcatgcacatgtgctctttgtacagttttaaaaagtgtaataaaatctgacatgtcaatgtggctagttttatttttcttgttttgcattatgtgtatggcctgaagtgttggacttgcaaaaggggaagaaaggaattgcgaatacatgtaaaatgtcaccagacatttgtattatttttatcatgaaatcatgtttttctctgattgttctgaaatgttctaaatactcttattttgaatgcacaaaatgacttaaaccattcatatcatgtttcctttgcgttcagccaatttcaattaaaatgaactaaattata

SEQ ID NO: 222588 - DNA, 1365 bp, Artificial Sequence
  derived and/or modified sequence
ccggggcgcgaccgcggatccgcagttcccgggccagcctggggcggccggccaggaaccacccgttaagatggaatcactgaattcatcacttgacacagtactagtttggataagtttagcaaggtgtcttctctttagggatggtgaggttggaaaaaggctcctgtaaccctcctccaggatgaaccacctgccagaagacatggagaacgctctcaccgggagccagagctcccatgcttctctgcgcaatatccattccatcaaccccacacaactcatggccaggattgagtcctatgaaggaagggaaaagaaaggcatatctgatgtcaggaggactttctgtttgtttgtcacctttgacctcttattcgtaacattactgtggataatagagttaaatgtgaatggaggcattgagaacacattagagaaggaggtgatgcagtatgactactattcttcatattttgatatatttcttctggcagtttttcgatttaaagtgttaatacttgcatatgctgtgtgcagactgcgccattggtgggcaatagcgttgacaacggcagtgaccagtgcctttttactagcaaaagtgatcctttcgaagcttttctctcaaggggcttttggctatgtgctgcccatcatttcattcatccttgcctggattgagacgtggttcctggatttcaaagtgttacctcaagaagcagaagaagaaaacagactcctgatagttcaggatgcttcagagagggcagcacttatacctggtggtctttctgatggtcagttttattcccctcctgaatccgaagcaggatctgaagaagctgaagaaaaacaggacagtgagaaaccacttttagaactatgagtactacttttgttaaatgtgaaaaaccctcacagaaagtcatcgaggcaaaaagaggcaggcagtggagtctccctgtcgacagtaaagttgaaatggtgacgtccactgctggctttattgaacagctaataaagatttatttattgtaatacctcacagacgttgtaccatatccatgcacatttagttgcctgcctgtggctggtaaggtaatgtcatgattcatcctctcttcagtgagactgagcctgatgtgttaacaaataggtgaagaaagtcttgtgctgtattcctaatcaaaagacttaatatattgaagtaacacttttttagtaagcaagatacctttttatttcaattcacagaatggaatttttttgtttcatgtctcagatttattttgtatttcttttttaacactctacatttcccttgttttttaactcatgcacatgtgctctttgtacagtttt

SEQ ID NO: 222589 - DNA, 857 bp, Artificial Sequence
  derived and/or modified sequence
cggccggccaggaaccacccgttaagatggatccatgtaggccccaccgtttttgcctgtaaaaagagtcagaaagatcaggctggcaaagtcaattgcctccaggctaggtgaagattgaggccaactggagagtgcgtgccccactgaaagtggtcagcagcttggctttattatcatggtgtcttctctttagggatggtgaggttggaaaaaggctcctgtaaccctcctccaggatgaaccacctgccagaagacatggagaacgctctcaccgggagccagagctcccatgcttctctgcgcaatatccattccatcaaccccacacaactcatggccaggattgagtcctatgaaggaagggaaaagaaaggcatatctgatgtcaggaggactttctgtttgtttgtcacctttgacctcttattcgtaacattactgtggataatagagttaaatgtgaatggaggcattgagaacacattagagaaggaggtgatgcagtatgactactattcttcatattttgatatatttcttctggcagtttttcgatttaaagtgttaatacttgcatatgctgtgtgcagactgcgccattggtgggcaatagcgttgacaacggcagtgaccagtgcctttttactagcaaaagtgatcctttcgaagcttttctctcaaggggcttttggctatgtgctgcccatcatttcattcatccttgcctggattgagacgtggttcctggatttcaaagtgttacctcaagaagcagaagaagaaaacagactcctgatagttcaggatgcttcagagagggcagcacttatacctggtggtctttctgatggt

SEQ ID NO: 222590 - DNA, 784 bp, Artificial Sequence
  derived and/or modified sequence
ttcccgggccagcctggggcggccggccaggaaccacccgttaagaattaactcctagaattctgacaggcggtagtgctttgcaagctttgtgttaagagctgctactggggaatatgttgttgctgtaccttccactagggtggcattgatctcattaagacagaaattatgtgtcttctctttagggatggtgaggttggaaaaaggctcctgtaaccctcctccaggatgaaccacctgccagaagacatggagaacgctctcaccgggagccagagctcccatgcttctctgcgcaatatccattccatcaaccccacacaactcatggccaggattgagtcctatgaaggaagggaaaagaaaggcatatctgatgtcaggaggactttctgtttgtttgtcacctttgacctcttattcgtaacattactgtggataatagagttaaatgtgaatggaggcattgagaacacattagagaaggaggtgatgcagtatgactactattcttcatattttgatatatttcttctggcagtttttcgatttaaagtgttaatacttgcatatgctgtgtgcagactgcgccattggtgggcaatagcgttgacaacggcagtgaccagtgcctttttactagcaaaagtgatcctttcgaagcttttctctcaaggggcttttggctatgtgctgcccatcatttcattcatccttgcctggattgagacgtggttcctggatttcaaagtgttacctcaagaagcagaagaagaaaaca

SEQ ID NO: 222591 - DNA, 859 bp, Artificial Sequence
  derived and/or modified sequence
tggggcggccggccaggaaccacccgttaagggtcttactctgttgcccaggctggagtgcagtggcaccatctcagctcactggagcgtctgcctccaggttcaagtgattctcctgcctcagcatcccaagtagctgggactacaggtgtgcactaccactcctgtctaatgtttgtattttttggtagagacagggtttccctatgttggccagtctggtcttgaactgctggcctcaagtgatctgcccgcctcggcctcctaaagtgctgggattacaggtgtcttctctttagggatggtgaggttggaaaaaggctcctgtaaccctcctccaggatgaaccacctgccagaagacatggagaacgctctcaccgggagccagagctcccatgcttctctgcgcaatatccattccatcaaccccacacaactcatggccaggattgagtcctatgaaggaagggaaaagaaaggcatatctgatgtcaggaggactttctgtttgtttgtcacctttgacctcttattcgtaacattactgtggataatagagttaaatgtgaatggaggcattgagaacacattagagaaggaggtgatgcagtatgactactattcttcatattttgatatatttcttctggcagtttttcgatttaaagtgttaatacttgcatatgctgtgtgcagactgcgccattggtgggcaatagcgttgacaacggcagtgaccagtgcctttttactagcaaaagtgatcctttcgaagcttttctctcaaggggcttttggctatgtgctgcccatcatttcattcatccttgcctggattgagacgtggttcctggatt

SEQ ID NO: 222592 - DNA, 1664 bp, Artificial Sequence
  derived and/or modified sequence
tcacgggccggaggtcccggggctgctgggtgcgggcggtgggctgcgcgttgtccgctggactgggtcccggtcacgccccgccaagccccgcccctcaggccggggcgcgaccgcggatccgcagttcccgggccagcctggggcggccggccaggaaccacccgttaaggtgtcttctctttagggatggtgaggttggaaaaaggctcctgtaaccctcctccaggatgaaccacctgccagaagacatggagaacgctctcaccgggagccagagctcccatgcttctctgcgcaatatccattccatcaaccccacacaactcatggccaggattgagtcctatgaaggaagggaaaagaaaggcatatctgatgtcaggaggactttctgtttgtttgtcacctttgacctcttattcgtaacattactgtggataatagagttaaatgtgaatggaggcattgagaacacattagagaaggaggtgatgcagtatgactactattcttcatattttgatatatttcttctggcagtttttcgatttaaagtgttaatacttgcatatgctgtgtgcagactgcgccattggtgggcaatagcgttgacaacggcagtgaccagtgcctttttactagcaaaagtgatcctttcgaagcttttctctcaaggggcttttggctatgtgctgcccatcatttcattcatccttgcctggattgagacgtggttcctggatttcaaagtgttacctcaagaagcagaagaagaaaacagactcctgatagttcaggatgcttcagagagggcagcacttatacctggtggtctttctgatggtcagttttattcccctcctgaatccgaagcaggatctgaagaagctgaagaaaaacaggacagtgagaaaccacttttagaactatgagtactacttttgttaaatgtgaaaaaccctcacagaaagtcatcgaggcaaaaagaggcaggcagtggagtctccctgtcgacagtaaagttgaaatggtgacgtccactgctggctttattgaacagctaataaagatttatttattgtaatacctcacagacgttgtaccatatccatgcacatttagttgcctgcctgtggctggtaaggtaatgtcatgattcatcctctcttcagtgagactgagcctgatgtgttaacaaataggtgaagaaagtcttgtgctgtattcctaatcaaaagacttaatatattgaagtaacacttttttagtaagcaagatacctttttatttcaattcacagaatggaatttttttgtttcatgtctcagatttattttgtatttcttttttaacactctacatttcccttgttttttaactcatgcacatgtgctctttgtacagttttaaaaagtgtaataaaatctgacatgtcaatgtggctagttttatttttcttgttttgcattatgtgtatggcctgaagtgttggacttgcaaaaggggaagaaaggaattgcgaatacatgtaaaatgtcaccagacatttgtattatttttatcatgaaatcatgtttttctctgattgttctgaaatgttctaaatactcttattttgaatgcacaaaatgacttaaaccattcatatcatgtttcctttg

SEQ ID NO: 222593 - protein, 489 aa, Artificial Sequence
  derived and/or modified sequence
MDDDLMLALRLQEEWNLQEAERDHAQESLSLVDASWELVDPTPDLQALFVQFNDQFFWGQLEAVEVKWSVRMTLCAGICSYEGKGGMCSIRLSEPLLKLRPRKDLVETLLHEMIHAYLFVTNNDKDREGHGPEFCKHMHRINSLTGANITVYHTFHDEVDEYRRHWWRCNGPCQHRPPYYGYVKRATNREPSAHDYWWAEHQKTCGGTYIKIKEPENYSKKGKGKAKLGKEPVLAAENKDKPNRGEAQLVIPFSGKGYVLGETSNLPSPGKLITSHAINKTQDLLNQNHSANAVRPNSKIKVKFEQNGSSKNSHLVSPAVSNSHQNVLSNYFPRVSFANQKAFRGVNGSPRISVTVGNIPKNSVSSSSQRRVSSSKISLRNSSKVTESASVMPSQDVSGSEDTFPNKRPRLEDKTVFDNFFIKKEQIKSSGNDPKYSTTTAQNSSSSSSQSKMVNCPVCQNEVLESQINEHLDWCLEGDSIKVKSEESL

SEQ ID NO: 222594 - protein, 187 aa, Artificial Sequence
  derived and/or modified sequence
MKKTLLHEMIHAYLFVTNNDKDREGHGPEFCKHMHRINSLTGANITVYHTFHDEVDEYRRHWWRCNGPCQHRPPYYGYVKRATNREPSAHDYWWAEHQKTCGGTYIKIKEPENYSKKGKGKAKLGKEPVLAAENKDKPNRGEAQLVIPFSGKGYVLGETSNLPSPGKLITSHAINKTQDLLNQNHSA

SEQ ID NO: 222595 - DNA, 1470 bp, Artificial Sequence
  derived and/or modified sequence
atggacgacgacctgatgctggccctgagactgcaggaggagtggaacctgcaggaggccgagagagaccacgcccaggagagcctgagcctggtggacgccagctgggagctggtggaccccacccccgacctgcaggccctgttcgtgcagttcaacgaccagttcttctggggccagctggaggccgtggaggtgaagtggagcgtgagaatgaccctgtgcgccggcatctgcagctacgagggcaagggcggcatgtgcagcatcagactgagcgagcccctgctgaagctgagacccagaaaggacctggtggagaccctgctgcacgagatgatccacgcctacctgttcgtgaccaacaacgacaaggacagagagggccacggccccgagttctgcaagcacatgcacagaatcaacagcctgaccggcgccaacatcaccgtgtaccacaccttccacgacgaggtggacgagtacagaagacactggtggagatgcaacggcccctgccagcacagacccccctactacggctacgtgaagagagccaccaacagagagcccagcgcccacgactactggtgggccgagcaccagaagacctgcggcggcacctacatcaagatcaaggagcccgagaactacagcaagaagggcaagggcaaggccaagctgggcaaggagcccgtgctggccgccgagaacaaggacaagcccaacagaggcgaggcccagctggtgatccccttcagcggcaagggctacgtgctgggcgagaccagcaacctgcccagccccggcaagctgatcaccagccacgccatcaacaagacccaggacctgctgaaccagaaccacagcgccaacgccgtgagacccaacagcaagatcaaggtgaagttcgagcagaacggcagcagcaagaacagccacctggtgagccccgccgtgagcaacagccaccagaacgtgctgagcaactacttccccagagtgagcttcgccaaccagaaggccttcagaggcgtgaacggcagccccagaatcagcgtgaccgtgggcaacatccccaagaacagcgtgagcagcagcagccagagaagagtgagcagcagcaagatcagcctgagaaacagcagcaaggtgaccgagagcgccagcgtgatgcccagccaggacgtgagcggcagcgaggacaccttccccaacaagagacccagactggaggacaagaccgtgttcgacaacttcttcatcaagaaggagcagatcaagagcagcggcaacgaccccaagtacagcaccaccaccgcccagaacagcagcagcagcagcagccagagcaagatggtgaactgccccgtgtgccagaacgaggtgctggagagccagatcaacgagcacctggactggtgcctggagggcgacagcatcaaggtgaagagcgaggagagcctgtag

SEQ ID NO: 222596 - DNA, 1470 bp, Artificial Sequence
  derived and/or modified sequence
atggacgacgatctcatgctggccttgcgtttacaggaggagtggaatctccaggaagctgaacgagaccatgcccaggagtcactatctctggtagacgcgagctgggaactggtcgaccccacccctgacctgcaggcgctgttcgtacagttcaacgaccagtttttttggggccaactagaagccgtagaagtgaagtggtcagtcaggatgacactgtgtgctggcatttgttcttacgaaggtaaggggggcatgtgctccatccgtctcagtgagccgttactcaagctccgtcccaggaaggaccttgtggaaaccctgctacacgagatgatccatgcctacctgtttgtaaccaacaatgataaagatagagaaggccatggccctgaattctgtaaacatatgcaccgcatcaacagtctgacaggggcgaatattaccgtgtaccatacatttcacgatgaagtggacgaataccgcagacattggtggcgatgtaacggcccctgccagcaccgcccaccgtattatggctacgtgaagcgtgctactaatcgggaaccctccgcgcacgattactggtgggcggaacatcaaaagacctgtggggggacctacattaaaataaaggaacctgagaattactctaaaaaaggaaaagggaaggccaaactcggcaaggaacctgttctggccgctgagaacaaggataagcctaatcgaggcgaagcacagctagtgattcctttttctgggaagggatacgtgctgggcgaaacatctaacttaccaagtcccgggaagctgatcacttctcacgcaatcaacaagacgcaggatcttctgaaccagaaccactccgccaacgctgtcaggccgaatagcaagatcaaggtgaaattcgaacaaaatggttcttcgaagaacagccatctagtgtccccagccgtgtccaactcacaccagaatgtattgagcaactatttccctcgtgtgagtttcgctaaccagaaagcttttcgcggcgtcaatggaagtcctcggatctctgtgacagtgggaaacatacccaaaaatagcgtcagcagctcgtcccagcgacgcgtgtccagttctaagatttcattgcgaaacagtagcaaagtaacggaatccgcaagtgtcatgccttcacaagacgtaagtgggtccgaggatacctttccaaataagaggccgagactcgaggacaagacggtgtttgacaactttttcattaagaaggaacagatcaagagctccgggaatgaccccaaatacagtactacaaccgcccagaatagctctagctccagttcccagagcaagatggtgaactgtcctgtctgtcaaaacgaggtgctggagtcccagatcaatgagcacttagactggtgcctcgaaggcgattccatcaaagtgaagagcgaagagtcattatag

SEQ ID NO: 222597 - DNA, 1470 bp, Artificial Sequence
  derived and/or modified sequence
atggatgatgacctgatgctggccctgcggctgcaggaggagtggaacctgcaggaggccgagcgggaccacgcccaggagagcctgagcctggtggatgcctcctgggagctggtggaccccaccccagacctgcaggccctgtttgtgcagttcaatgaccagttcttctggggccagctggaggccgtggaggtgaagtggagcgtgaggatgaccctgtgtgccggcatctgcagctatgagggcaagggcggcatgtgcagcatccggctgtctgagcccctgctgaagctgcggcccaggaaggacctggtggagaccctgctgcacgagatgattcatgcctacctgtttgtgaccaacaatgacaaggaccgggagggccacggccctgagttctgcaagcacatgcaccgcatcaacagcctgactggagccaacatcaccgtgtaccacaccttccatgatgaggtggatgagtacagaagacactggtggcgctgcaatggcccctgccagcacaggcctccctactacggctacgtgaagagggccaccaaccgggagcccagcgcccatgactactggtgggccgagcaccagaagacctgtggcggcacctacatcaagatcaaggagcctgagaactacagcaagaagggcaagggcaaggccaagctgggcaaggagcctgtgctggccgctgagaacaaggacaagcccaacagaggagaggcccagctggtgatccccttcagcggcaagggctacgtgctgggggagaccagcaacctgcccagccctgggaagctgatcaccagccacgccatcaacaagacccaggacctgctgaaccagaaccacagcgccaatgctgtgcggcccaacagcaagatcaaggtgaagtttgagcagaatggcagcagcaagaacagccacctggtgtccccagctgtgagcaacagccaccagaatgtgctgagcaactacttcccccgggtgtcctttgccaaccagaaggccttccggggcgtgaatggcagcccccgcatctctgtgacagtgggcaacatccccaagaacagcgtgagcagcagcagccagaggagagtgagcagcagcaagatcagcctgaggaacagcagcaaggtgacagagagcgcctctgtgatgcccagccaggatgtgtctggcagcgaggacaccttccccaacaagaggccccggctggaggacaagacagtgtttgacaacttcttcatcaagaaggagcagatcaagagcagtggaaatgaccccaagtacagcaccaccacagcccagaacagcagcagcagcagcagccagagcaagatggtgaactgccctgtgtgccagaatgaggtgctggagagccagatcaatgagcacctggactggtgcctggagggggacagcatcaaggtgaagtctgaggagagcctgtag

SEQ ID NO: 222598 - DNA, 1470 bp, Artificial Sequence
  derived and/or modified sequence
atggacgacgacctgatgctggccctgcggctgcaggaggagtggaatttgcaggaggctgaacgagatcacgcccaggaatcactaagtctggtggacgcatcctgggaattggtagatcccaccccagatctgcaagctctttttgtgcaatttaacgaccagttcttctggggacagctcgaggctgtggaagtgaagtggagtgttaggatgaccctgtgcgccggaatatgctcttatgaaggaaaaggaggaatgtgtagtatccggcttagtgagcctctgctgaaattgcggccacggaaagatctggtggaaaccctgttgcacgagatgatccacgcgtatttgtttgttaccaacaatgataaagaccgagagggccacggacctgagttctgcaaacacatgcaccgtattaactctcttacgggtgccaacatcaccgtatatcacacatttcacgacgaggtggatgaatatcgaagacattggtggagatgtaatggcccttgtcagcacaggcctccatactatgggtacgttaaaagagccacaaatagggagcctagcgcccatgattactggtgggcagaacaccaaaagacgtgtggagggacttatatcaaaatcaaagagccagagaattacagcaagaagggcaaggggaaggctaagctaggtaaagagccagtgctggccgctgagaacaaagacaaaccaaacaggggcgaagcacagctcgttatccctttcagtggaaagggttacgtactgggggaaactagcaacctgccttcccccggcaagctaattaccagccatgctatcaataaaacccaagacctcctgaaccagaaccattcggccaacgctgtccgccctaactctaaaatcaaggttaagtttgagcagaatgggtcatcaaagaactctcacctggtgtcccctgccgtgtctaactctcatcaaaatgttctgagcaattacttcccacgagtaagctttgcaaaccagaaggcctttcggggcgtgaatggctctccccggatctcagtgacagtgggtaacatccccaagaatagcgtctcaagcagctctcagaggagagtaagctcctctaagatctccctcaggaattcatccaaggtgaccgagagcgcgagcgtaatgccctcacaggacgtttcaggcagcgaagacacatttcccaacaagcgcccccgcctcgaggacaaaactgtgtttgacaacttcttcattaaaaaggaacaaatcaaatcttcagggaatgacccaaagtactctacaactacggcgcaaaacagttccagcagctcatcccagtctaaaatggtgaactgtcccgtgtgtcagaatgaagtcctggagtcacagatcaatgaacacctggattggtgtctcgaaggtgatagtatcaaggtgaagagcgaggagagcttatag

SEQ ID NO: 222599 - DNA, 1470 bp, Artificial Sequence
  derived and/or modified sequence
atggatgatgacctgatgctcgccctgcggctgcaggaggagtggaacctccaggaggccgagagggatcatgcgcaggaaagcctaagcctcgtagatgcaagttgggaattggtcgaccctactccggacttgcaggctttgttcgtgcaattcaatgatcaatttttctgggggcaactcgaggctgtggaggtgaagtggtcggttcgaatgacactgtgcgctggcatttgtagttatgagggcaaggggggtatgtgtagcatcagactgagcgagccactgctcaagctgcggccaagaaaggaccttgttgagaccctgctccatgaaatgatccacgcttatctcttcgtgacgaataacgataaggaccgagaaggccatgggcctgagttttgcaaacacatgcaccggattaacagcctgaccggcgctaacataacagtgtatcataccttccatgatgaagtggacgagtatcgccgtcactggtggcgctgcaatggcccttgccagcaccgtcccccttactacggttacgtgaagcgcgctaccaatcgcgaaccctccgcgcacgactactggtgggccgaacaccagaagacctgcgggggaacctatattaagattaaagaacccgagaactactctaaaaagggtaaaggtaaggctaagttaggaaaggagcctgtgctggcggctgagaataaagataaaccaaatcgtggcgaggcccagttggtcattccattctctgggaaaggatatgtgcttggggagacctcaaatctgccgagcccgggtaaactgataacgtctcacgccatcaataaaactcaagaccttcttaatcagaaccactccgccaatgcggtgcgcccaaactcaaagattaaagtaaaattcgagcagaacggctccagcaagaactctcacctggtgtctcctgcagtgtccaactcccaccagaatgtccttagcaattattttccgagggtgagcttcgccaatcagaaagctttcagaggcgtgaacggaagccctagaatttccgtaaccgtgggaaatataccaaaaaacagcgtttcctcaagtagtcagcgaagggtgagcagtagtaagatttcgctgcggaacagctctaaagttaccgaaagcgcaagtgttatgccatctcaggatgttagtgggtccgaggacacctttccaaacaagagacctcgactggaggataagaccgtgtttgataacttcttcattaagaaggagcagatcaagtccagcggcaatgatccgaagtattcaacaacaacggcccaaaactccagcagcagctccagccagtcaaagatggtgaactgccctgtttgtcagaatgaagtgcttgagagccagatcaatgaacacttggactggtgcttagagggcgatagtataaaggtcaagagtgaggagagtctctag

SEQ ID NO: 222600 - DNA, 3468 bp, Artificial Sequence
  derived and/or modified sequence
tgaggtttgaaataaccggcaaagagtaaaggctgaaactagcttcctgaaagcttcgtagggcccgagccctgtgagcccaggttctgcgcccactaggaggtgtcatgctgactgctttttttaaagccctagaatcttggcttcggcgtttggggtaagctccgttctcgttctcaagcgcgtttccgcgaactctcgcgggattgacgggccgtctcgagagccggcatctcctaggagctagtcctggtcctcggctaggcggcttggggtcgcggcgtaactggggagccagcctgacgccggcggaccccgcctgtgatcctggcaacgatggatgatgacttgatgttggcactgcggcttcaggaggagtggaacttgcaggaggcggagcgcgatcatgcccaggagtccctgtcgctagtggacgcgtcgtgggagttggtggaccccacaccggacttgcaggcactgtttgttcagtttaacgaccaattcttctggggccagctggaggccgtcgaggtgaagtggagcgtgcgaatgaccctgtgtgctgggatatgcagctatgaagggaagggtggaatgtgttccatccgtctcagcgaaccccttttgaagttgaggccaagaaaggatcttgtagagaccctcctgcatgaaatgatacatgcctatttatttgtcactaataacgacaaagaccgagaagggcatggtccagaattttgtaaacatatgcatcgcatcaacagcctgactggagccaatataacggtataccatacttttcacgatgaggtggatgagtatcggcgacactggtggcgctgcaatgggccgtgccagcacaggccaccgtattacggctatgtcaaacgagctactaacagggaaccctctgctcatgactattggtgggctgagcaccagaaaacctgtggaggcacttacataaaaatcaaggaaccagagaattactcaaaaaaaggcaaaggaaaggcaaaactaggaaaggaaccagtattggccgcagagaataaagataaacccaacagaggtgaggcccagctagtaatcccttttagtgggaaaggatatgttctaggagaaacaagcaatttaccttcacctgggaaactgatcacttcacatgccattaataaaacccaagatcttttaaatcaaaaccattcagcaaatgctgtaagacctaattctaaaatcaaggtgaaatttgaacagaatggttcaagtaaaaattctcatctggtctcccctgctgttagtaacagtcaccaaaatgttctaagcaactactttcctagagtatcatttgccaaccaaaaggctttcagaggtgtgaatggatctccaaggataagtgtaacagttggcaacatccctaaaaactcagtctcttctagttctcagagaagggtttcatcttctaagatatccctaagaaattcttcaaaagtaacggaatcagcatctgtgatgccatcccaggatgtgagtgggtctgaagatacattcccaaataaacgacctaggctagaagataagactgtttttgacaatttttttatcaagaaagagcaaataaaaagcagtggtaatgatccaaagtatagtacaaccacagctcagaattccagcagttcatccagtcagagcaaaatggttaattgcccagtttgtcagaatgaagttctggagtctcagattaatgagcacttggactggtgccttgaaggtgacagcatcaaagtcaaaagcgaagaaagtctttgaaaaaggtttcaaagtctcaagtaccacctgtattatctcactaatgtgctatgtcagccagtcaggaagttctggttaatactaagatttgtaggttataatctagttcacataaccaatagaaagtgtcctattttatatatacgcatataagattgtaattttaagatgttttgtgtctcagggtgctacattcactcttgccttaggtatactgtaacccaggttctgcctgtcgtgtataagttttagatacttttgttctttcttgctcttaaggattttaaaaacctgttaatctttttatttgtatactttcctaaaaatattcatatggggaatcctgtcaggtgtttggttatattgactatttattaatagtattagaactcattccctgaactgatgtaaatcttcatagtgtcagacatactgaccaaaaccacaatctagactacaaagtatattgttttagagtactcaaattgtattatttattaatttttttgtttgcaaaatcttaacaggaactgtattttctatattttaaagaattttatttgtcccacttttactaaacagtggcagcagattttaagttaaagaatatggaatatagtaaaataagtaaatttcttttggaatatttttagtaacaaatagccactataattctgtaggccaaattttatattgagtttagctgttttctcaaaatttagcagagtggttaaaattctgtgctgataagtaactgatacatataacataaacataacaaagttgcctagttgatgtaacagtggaaagttatctggaaatagtattttgaactttaagccaagtttaaaacattataataaaaggaataccatttgtgcattttaagtaatcttttttaaaaaaaatattttccatgttatagggaaaggacaaagagacttttatcagtttgctttttgtcttgtggctgtacatgctgttggcatagccctaacacagttgttcacaagttttcttttttcttgttgcaattttccttcactttgttgtaatacaggtgcacaaatcttaagtgcacagctgggtaaacttttacagtgttcacctgtgtaactaccacccggatcaagttagagaacacttccattgccacagaaggcttcctataggtgtctgttcccagttgatacccatgaccctcaccacctccagaggtccccactgttttcaccccatcgtcgcagattattttttaattttataatgtagtatctttgttcctatgtatagcaggagttcattttcattgctcttgcatttgtatgaatatactagaatttattcatccattctaatgttaatggacatttgaattatttccagtttggggctgttaagcataatgctgctaagaacattcttatcttttctgttgggtatatatacaggaatggaattgctgagtcacggggtatatttctgtttagctttagtaaattctgccagtttacactcctaccagcaatgtatgagagttttagttgttcaccattcataacactgttagcagcccttttcgttttagactggttggctgttcacaaattttgatattccttaaagcattaaaacattttaataaatacttataaataggta

SEQ ID NO: 222601 - protein, 669 aa, Artificial Sequence
  derived and/or modified sequence
MGTALVYHEDMTATRLLWDDPECEIERPERLTAALDRLRQRGLEQRCLRLSAREASEEELGLVHSPEYVSLVRETQVLGKEELQALSGQFDAIYFHPSTFHCARLAAGAGLQLVDAVLTGAVQNGLALVRPPGHHGQRAAANGFCVFNNVAIAAAHAKQKHGLHRILVVDWDVHHGQGIQYLFEDDPSVLYFSWHRYEHGRFWPFLRESDADAVGRGQGLGFTVNLPWNQVGMGNADYVAAFLHLLLPLAFEFDPELVLVSAGFDSAIGDPEGQMQATPECFAHLTQLLQVLAGGRVCAVLEGGYHLESLAESVCMTVQTLLGDPAPPLSGPMAPCQSALESIQSARAAQAPHWKSLQQQDVTAVPMSPSSHSPEGRPPPLLPGGPVCKAAASAPSSLLDQPCLCPAPSVRTAVALTTPDITLVLPPDVIQQEASALREETEAWARPHESLAREEALTALGKLLYLLDGMLDGQVNSGIAATPASAAAATLDVAVRRGLSHGAQRLLCVALGQLDRPPDLAHDGRSLWLNIRGKEAAALSMFHVSTPLPVMTGGFLSCILGLVLPLAYGFQPDLVLVALGPGHGLQGPHAALLAAMLRGLAGGRVLALLEENSTPQLAGILARVLNGEAPPSLGPSSVASPEDVQALMYLRGQLEPQWKMLQCHPHLVA

SEQ ID NO: 222602 - DNA, 2687 bp, Artificial Sequence
  derived and/or modified sequence
ggctcggggcgccgaggcttccgcgcccgctggttcctcgctccggggcggagctcgcgatagcgaccgggagcagggcgcggggcgggacccaggtccgaggcgaggaagccggaagccaggcgcggggagcctcccccttcgactgcagcctcgctccgtgccttctgcgcgcctgggatcccggagcctgcctaggttctgtgcgctcccgcccaggccggtgcccgccgcccgcctgcgccccaggcaggtcccaggcctccggctgctcccggccgaaggtggggacaggcagtggcaggcaccactagcgagggcgtttgggaacccagggtgaccacggcgcagccatggggaccgcgcttgtgtaccatgaggacatgacggccacccggctgctctgggacgaccccgagtgcgagatcgagcgtcctgagcgcctgaccgcagccctggatcgcctgcggcagcgcggcctggaacagaggtgtctgcggttgtcagcccgcgaggcctcggaagaggagctgggcctggtgcacagcccagagtatgtatccctggtcagggagacccaggtcctaggcaaggaggagctgcaggcgctgtccggacagttcgacgccatctacttccacccgagtacctttcactgcgcgcggctggccgcaggggctggactgcagctggtggacgctgtgctcactggagctgtgcaaaatgggcttgccctggtgaggcctcccgggcaccatggccagagggcggctgccaacgggttctgtgtgttcaacaacgtggccatagcagctgcacatgccaagcagaaacacgggctacacaggatcctcgtcgtggactgggatgtgcaccatggccaggggatccagtatctctttgaggatgaccccagcgtcctttacttctcctggcaccgctatgagcatgggcgcttctggcctttcctgcgagagtcagatgcagacgcagtggggcggggacagggcctcggcttcactgtcaacctgccctggaaccaggttgggatgggaaacgctgactacgtggctgccttcctgcacctgctgctcccactggcctttgagtttgaccctgagctggtgctggtctcggcaggatttgactcagccatcggggaccctgaggggcaaatgcaggccacgccagagtgcttcgcccacctcacacagctgctgcaggtgctggccggcggccgggtctgtgccgtgctggagggcggctaccacctggagtcactggcggagtcagtgtgcatgacagtacagacgctgctgggtgacccggccccacccctgtcagggccaatggcgccatgtcagagtgccctagagtccatccagagtgcccgtgctgcccaggccccgcactggaagagcctccagcagcaagatgtgaccgctgtgccgatgagccccagcagccactccccagaggggaggcctccacctctgctgcctgggggtccagtgtgtaaggcagctgcatctgcaccgagctccctcctggaccagccgtgcctctgccccgcaccctctgtccgcaccgctgttgccctgacaacgccggatatcacattggttctgccccctgacgtcatccaacaggaagcgtcagccctgagggaggagacagaagcctgggccaggccacacgagtccctggcccgggaggaggccctcactgcacttgggaagctcctgtacctcttagatgggatgctggatgggcaggtgaacagtggtatagcagccactccagcctctgctgcagcagccaccctggatgtggctgttcggagaggcctgtcccacggagcccagaggctgctgtgcgtggccctgggacagctggaccggcctccagacctcgcccatgacgggaggagtctgtggctgaacatcaggggcaaggaggcggctgccctatccatgttccatgtctccacgccactgccagtgatgaccggtggtttcctgagctgcatcttgggcttggtgctgcccctggcctatggcttccagcctgacctggtgctggtggcgctggggcctggccatggcctgcagggcccccacgctgcactcctggctgcaatgcttcgggggctggcagggggccgagtcctggccctcctggaggagaactccacaccccagctagcagggatcctggcccgggtgctgaatggagaggcacctcctagcctaggcccttcctctgtggcctccccagaggacgtccaggccctgatgtacctgagagggcagctggagcctcagtggaagatgttgcagtgccatcctcacctggtggcttgaaatcggccaaggtgggagcatttacaccgcagaaatgacaccgcacgccagcgccccgcggccgcgatccggaccccaagcccacggctccctcgactctggggcacggaaccccgcccactcccaatccccgcgccccgccctctcccacccgtgcttcccccgctccacccctcacctcacctcgcccccgccccacccatcgcgccccggcccgtcccatcgaggcccatgcaacccacgctcggtcccgttccggcccctgcgccccgctgcgcttcgctccccgcccttgcgccgttagtaaacatcgctcaaacgaaa

SEQ ID NO: 222603 - DNA, 2010 bp, Artificial Sequence
  derived and/or modified sequence
atgggcacggccttagtgtaccacgaagatatgaccgctactagacttctgtgggatgatccggagtgtgagattgagcgtcctgaaagacttaccgctgccctggacagactgcgtcagcgaggtctcgaacaacgctgtctaagattgagcgcaagagaagcaagtgaagaagagcttgggctcgtccacagtccagaatatgtaagtctggtacgcgagacccaggtgctaggcaaagaggagcttcaggccctaagtgggcagttcgatgccatttactttcacccctccacatttcactgcgcacgtctcgcagccggagccggactccagctcgtggatgccgtgctcaccggcgccgtacaaaacggcttggctctggtccggccacccggacaccacggccagagagccgcagctaacggattttgcgtgttcaataatgtcgctatcgcagccgcccatgccaaacagaagcatgggttgcaccggatcctagtggtggattgggacgtgcaccatggtcagggcatccagtacctgttcgaggacgatccgagcgtcttgtacttttcatggcacaggtacgagcatggcaggttctggcccttccttcgtgagtcagatgctgacgctgttggaaggggccaaggcctgggatttaccgtcaatctcccatggaaccaagtaggtatgggcaacgcagactacgtcgcagcattcctgcacctcctgctgcctcttgcttttgagtttgatcctgagctggtcctggtatccgccggctttgattccgccataggagaccccgagggccagatgcaggccacccctgaatgtttcgcacatctgactcagctgctccaggtccttgcgggtggacgtgtctgcgcagttctagaaggcggctaccacctggaaagtctcgcagagtcagtatgtatgaccgtacagacactgttgggggaccccgctcctcctctttccggcccgatggcaccttgccaaagcgccctcgagagtatacagtccgctcgggccgcgcaggcaccgcactggaagtctttgcagcaacaggatgtgaccgcagttcctatgtcaccctcatcccactcacctgaaggtcgacccccccctctgttacctggtggcccagtgtgtaaagccgctgcttctgccccctcaagcttactggaccagccgtgcctttgcccggccccttccgtgcgcaccgctgtggctttaacaaccccagatataacactggtgctgccccctgatgtaattcagcaggaggcctctgccctgcgcgaggaaacggaggcgtgggcaagaccccacgagagcctagctagggaggaggcgctcacggcattagggaagctgctgtatttgctagacgggatgctcgatgggcaagtgaatagcggtatcgcggccacaccggcctctgcagcggccgcaacactcgacgtcgctgtgaggcgaggattatcccacggtgcgcagcggttgctttgcgtggccttagggcaactggataggcccccagacttagcacacgacggacgctcattgtggctgaatatcaggggaaaagaggccgcggctctgtcaatgttccacgtctctaccccactgcccgttatgaccgggggctttctaagctgcatcttggggctagtcctgcctctggcttacggcttccagcctgacttggtactcgtggccttgggtccgggtcacggcctgcaaggtcctcacgccgctttgcttgcagcaatgctcaggggcttggccggggggagagtgcttgccttgcttgaggaaaactcaaccccccagctcgccgggatcctggctcgggtgctcaacggggaggcgcctccatctctaggcccaagcagtgtggcgtcaccggaagatgtgcaggcccttatgtatttgcgcgggcagttagaaccccagtggaagatgctgcagtgtcatccacatctcgtcgcatag

SEQ ID NO: 222604 - DNA, 2010 bp, Artificial Sequence
  derived and/or modified sequence
atgggcacagccctggtgtaccacgaggacatgacagccacccggctgctgtgggatgatcctgaatgtgaaattgaaagacctgagcggctgacagctgccctggaccggctgcggcagaggggcctggagcagcgctgcctgcggctgagcgcccgggaggccagcgaggaggagctgggcctggtgcacagcccagaatatgtgtccctggtgcgggagacccaggtgctgggcaaggaggagctgcaggccctgagcggccagtttgatgccatctacttccaccccagcaccttccactgtgcccggctggccgccggggccggcctgcagctggtggatgctgtgctgactggagctgtgcagaatggcctggccctggtgcggcccccaggccaccacggccagagagctgctgccaacggcttctgtgtgttcaacaacgtggccatcgccgccgcccacgccaagcagaagcacggcctgcaccgcatcctggtggtggactgggatgtgcaccacggccagggcatccagtacctgtttgaagatgaccccagcgtgctgtacttctcctggcacagatatgaacatggccgcttctggcccttcctgcgggagagtgatgctgatgctgtgggccggggccagggcctgggcttcaccgtgaacctgccctggaaccaggtgggcatgggaaatgctgactatgtggccgccttcctgcacctgctgctgcccctggcctttgaatttgatcctgagctggtgctggtgtctgctggctttgacagcgccatcggggaccctgagggccagatgcaggccaccccagagtgctttgcccacctgacccagctgctgcaggtgctggccggcggccgggtgtgtgctgtgctggagggcggctaccacctggagagcctggccgagagcgtgtgcatgacagtgcagaccctgctgggggaccctgccccacccctgagcggccccatggccccctgccagagcgccctggagagcatccagagcgcccgggccgcccaggccccccactggaagagcctgcagcagcaggatgtgacagctgtgcccatgagccccagcagccacagccctgagggccggcccccacccctgctgcccggcggccctgtgtgcaaggctgctgccagcgcccccagcagcctgctggaccagccctgcctgtgcccagcccccagcgtgaggacagctgtggccctgaccaccccagacatcaccctggtgctgcccccagatgtgatccagcaggaggccagcgccctgcgggaggagacagaggcctgggcccggccccatgagagcctggcccgggaggaggccctgacagccctgggcaagctgctgtacctgctggatggcatgctggatggccaggtgaacagcggcattgctgccaccccagccagcgctgctgctgccaccctggatgtggccgtgcggcggggcctgagccatggagcccagaggctgctgtgtgtggccctgggccagctggaccggcccccagacctggcccatgatggccgcagcctgtggctgaacatccggggcaaggaggccgccgccctgtccatgtttcatgtgtccacccccctgcctgtgatgactggaggcttcctgagctgcatcctgggcctggtgctgcccctggcctacggcttccagcctgacctggtgctggtggccctgggccctggccacggcctgcagggcccccacgccgccctgctggccgccatgctgcggggcctggccggcggccgggtgctggccctgctggaggagaacagcaccccccagctggccggcatcctggcccgggtgctgaatggagaggccccacccagcctgggccccagctctgtggccagcccagaagatgtgcaggccctgatgtacctgcggggccagctggagccccagtggaagatgctgcagtgccacccccacctggtggcctag

SEQ ID NO: 222605 - DNA, 2010 bp, Artificial Sequence
  derived and/or modified sequence
atgggcaccgccctggtgtaccacgaggacatgaccgccacccggttgctgtgggatgaccccgaatgcgagatcgagcgcccagagaggctgacagcagcgcttgaccggctgcggcagcgaggtctcgagcagaggtgcctgcgactcagcgccagagaagcttcagaggaggagctgggccttgtccatagcccggagtatgttagtctcgtgagagagacccaagtgttgggcaaggaggaactgcaagcattgagcggacagttcgacgccatatactttcatccgtccacctttcattgtgcccgcctcgccgctggagctggtctgcagcttgtggacgcagtgctgacaggagctgtacagaacggtctagcacttgtacgtccaccagggcaccatgggcaaagggcagccgccaacggtttctgtgttttcaacaatgtcgctatagcagcagcccatgccaagcagaaacatgggctccacagaatacttgtggtcgactgggatgtgcatcacggccagggcatccagtatctttttgaggacgaccctagcgttttatatttcagctggcaccgctatgagcatgggagattctggcccttcctgcgcgagtcagatgccgacgccgtggggcgaggtcaggggctcggctttaccgtgaatctaccatggaaccaggtcggaatggggaatgctgactacgtcgcggcattcttgcacttgctgctcccactggcgttcgagttcgatcctgagttggtcctggtgagtgcgggatttgactcggcaatcggggacccagagggacagatgcaagctactcctgaatgttttgcccaccttacccagctcctgcaggtgttggccggaggaagagtttgcgcagtactagagggcgggtatcatctagagagcctggcagagagtgtctgcatgacagtacaaactctcctgggcgaccccgctccacccctgtccggccctatggccccctgtcagtctgctctagagagtatacaatctgctcgggccgctcaggccccccattggaaaagcctgcagcaacaggatgtcaccgcagtgccaatgagcccatccagccatagtccagagggacgaccaccacccctcctgccgggaggcccagtttgcaaggccgcagcctctgctccgtcgtctctgctggaccaaccttgtctctgcccagccccatctgttcggaccgcggttgcactgactacccctgacataacccttgttctcccacccgatgtcattcagcaagaggcctccgcattgagggaagagaccgaagcctgggcccggccccatgaatcactcgcccgcgaagaagcgttgacagctctcggaaagctgctctacctcctggacgggatgcttgacggccaggtgaattctggaatcgctgcaacacctgccagcgccgcagcagcaaccttagacgtggccgttcggcggggccttagtcacggcgcccaacggttactatgtgttgcgctggggcaattggacagaccccccgatctggctcatgacggaaggagcctgtggctcaacatccgcggtaaggaagctgcggctctgagtatgttccacgtctcaactcccctgcctgttatgaccggtgggttcctctcatgcatattgggattggtcctccctctcgcttatggatttcagccggacctggttctcgttgctctaggacctgggcacggactgcaaggaccccacgctgcgcttcttgccgctatgctaagaggcctggccggcggacgcgtgctggcacttctcgaggagaacagtacaccacagttggcaggtatattagcgcgcgtgcttaatggggaagcacctccgtcactgggccccagctcggtagcttcgcccgaggacgtgcaagccttgatgtacctacgcgggcagcttgagccacagtggaagatgctgcaatgccacccccaccttgtagcctag

SEQ ID NO: 222606 - DNA, 2010 bp, Artificial Sequence
  derived and/or modified sequence
atgggtacagccctggtataccacgaagatatgactgccacaagacttttatgggacgaccccgagtgtgaaatcgaacgccctgaaaggctgaccgcggctctcgacaggctcaggcaaagagggctggaacagaggtgtctgcgattaagcgcacgggaggctagcgaggaggaattgggtttggttcattcaccagaatacgtgagcctggtccgcgaaacccaggttctcggcaaggaggaactccaggcactgtccgggcaatttgacgcgatttattttcacccctccactttccactgcgccagactagctgccggagccggactgcagctggtggacgcggtgctgaccggggctgtccagaacggactggctttggttaggccaccaggtcaccacggtcaacgagccgcagcaaatggtttctgtgtgtttaataacgtggccattgcggcagctcacgcaaaacagaagcatggcctccaccgcattttagtggtggactgggatgtacatcatggacagggcatccaatatctctttgaagacgatcctagcgtcctgtacttcagctggcaccggtacgagcacggaaggttttggcccttcctgcgagaatctgacgcggacgctgttgggcgtggacagggcctcggtttcactgtgaatctgccatggaaccaggtcgggatgggcaacgccgactacgttgccgcattcctacatctcctcttgcccctggcattcgaatttgatccagaacttgtgctcgtatctgccggattcgattccgcgattggtgaccctgagggccagatgcaggcaaccccagagtgcttcgcgcacctgacgcaactgcttcaggtcctggcaggtgggcgtgtctgcgcagttttagagggcggataccatcttgaaagcctggccgaatccgtttgcatgaccgtgcagaccctgttaggcgatccagcacctcctttatcaggcccaatggctccctgtcagtcggcactggagagcattcagtccgcccgtgctgcccaggcccctcattggaagagtctgcagcagcaggacgtcacagccgtcccaatgtccccatcctctcactcccctgagggtcggcctccccctttgctccctggaggacccgtgtgtaaggccgcagcatcagcgccatcatcgctgctggatcagccttgtctctgccccgcacccagcgttcgcaccgccgtagctctaaccaccccagacatcacattagtgctgccgccagacgtgatacagcaagaagcttcggctctcagagaagagactgaagcttgggccagaccgcatgagtcacttgcgagagaagaggcactgacagctctcgggaagctcctctacctgctcgatggtatgctggatggtcaagtgaatagcggcatcgccgctacacccgcttccgccgcagccgcaactctggacgttgccgtgcggaggggactgtcacatggcgcacagaggctcctgtgcgttgctctggggcagctcgaccggccaccagatcttgctcacgatgggaggtctctctggctcaacattagaggcaaggaggctgcggctctgtctatgttccacgtttcgactcctcttccagtgatgacaggtggttttcttagttgcattctagggctggtcttaccactcgcctacggcttccagcctgacctggtcctagttgctctggggccagggcatggactccaagggccacacgccgctctccttgcagctatgctccgtggcctcgcaggaggtagagtgctagctctgctggaggagaactcaaccccgcagctggccggaatactggcacgggtgctcaatggggaagccccaccgagcctggggccttccagtgtggccagtcccgaggacgtgcaagcacttatgtacttgcgcggtcaactggaaccgcagtggaagatgttgcagtgtcacccccaccttgtggcttag

SEQ ID NO: 222607 - DNA, 2010 bp, Artificial Sequence
  derived and/or modified sequence
atgggcaccgccctggtgtaccacgaggacatgaccgccaccagactgctgtgggacgaccccgagtgcgagatcgagagacccgagagactgaccgccgccctggacagactgagacagagaggcctggagcagagatgcctgagactgagcgccagagaggccagcgaggaggagctgggcctggtgcacagccccgagtacgtgagcctggtgagagagacccaggtgctgggcaaggaggagctgcaggccctgagcggccagttcgacgccatctacttccaccccagcaccttccactgcgccagactggccgccggcgccggcctgcagctggtggacgccgtgctgaccggcgccgtgcagaacggcctggccctggtgagaccccccggccaccacggccagagagccgccgccaacggcttctgcgtgttcaacaacgtggccatcgccgccgcccacgccaagcagaagcacggcctgcacagaatcctggtggtggactgggacgtgcaccacggccagggcatccagtacctgttcgaggacgaccccagcgtgctgtacttcagctggcacagatacgagcacggcagattctggcccttcctgagagagagcgacgccgacgccgtgggcagaggccagggcctgggcttcaccgtgaacctgccctggaaccaggtgggcatgggcaacgccgactacgtggccgccttcctgcacctgctgctgcccctggccttcgagttcgaccccgagctggtgctggtgagcgccggcttcgacagcgccatcggcgaccccgagggccagatgcaggccacccccgagtgcttcgcccacctgacccagctgctgcaggtgctggccggcggcagagtgtgcgccgtgctggagggcggctaccacctggagagcctggccgagagcgtgtgcatgaccgtgcagaccctgctgggcgaccccgccccccccctgagcggccccatggccccctgccagagcgccctggagagcatccagagcgccagagccgcccaggccccccactggaagagcctgcagcagcaggacgtgaccgccgtgcccatgagccccagcagccacagccccgagggcagacccccccccctgctgcccggcggccccgtgtgcaaggccgccgccagcgcccccagcagcctgctggaccagccctgcctgtgccccgcccccagcgtgagaaccgccgtggccctgaccacccccgacatcaccctggtgctgccccccgacgtgatccagcaggaggccagcgccctgagagaggagaccgaggcctgggccagaccccacgagagcctggccagagaggaggccctgaccgccctgggcaagctgctgtacctgctggacggcatgctggacggccaggtgaacagcggcatcgccgccacccccgccagcgccgccgccgccaccctggacgtggccgtgagaagaggcctgagccacggcgcccagagactgctgtgcgtggccctgggccagctggacagaccccccgacctggcccacgacggcagaagcctgtggctgaacatcagaggcaaggaggccgccgccctgagcatgttccacgtgagcacccccctgcccgtgatgaccggcggcttcctgagctgcatcctgggcctggtgctgcccctggcctacggcttccagcccgacctggtgctggtggccctgggccccggccacggcctgcagggcccccacgccgccctgctggccgccatgctgagaggcctggccggcggcagagtgctggccctgctggaggagaacagcaccccccagctggccggcatcctggccagagtgctgaacggcgaggccccccccagcctgggccccagcagcgtggccagccccgaggacgtgcaggccctgatgtacctgagaggccagctggagccccagtggaagatgctgcagtgccacccccacctggtggcctag

SEQ ID NO: 222608 - protein, 467 aa, Artificial Sequence
  derived and/or modified sequence
MRPQELPRLAFPLLLLLLLLLPPPPCPAHSATRFDPTWESLDARQLPAWFDQAKFGIFIHWGVFSVPSFGSEWFWWYWQKEKIPKYVEFMKDNYPPSFKYEDFGPLFTAKFFNANQWADIFQASGAKYIVLTSKHHEGFTLWGSEYSWNWNAIDEGPKRDIVKELEVAIRNRTDLRFGLYYSLFEWFHPLFLEDESSSFHKRQFPVSKTLPELYELVNNYQPEVLWSDGDGGAPDQYWNSTGFLAWLYNESPVRGTVVTNDRWGAGSICKHGGFYTCSDRYNPGHLLPHKWENCMTIDKLSWGYRREAGISDYLTIEELVKQLVETVSCGGNLLMNIGPTLDGTISVVFEERLRQMGSWLKVNGEAIYETHTWRSQNDTVTPDVWYTSKPKEKLVYAIFLKWPTSGQLFLGHPKAILGATEVKLLGHGQPLNWISLEQNGIMVELPQLTIHQMPCKWGWALALTNVI

SEQ ID NO: 222609 - protein, 165 aa, Artificial Sequence
  derived and/or modified sequence
MRPQELPRLAFPLLLLLLLLLPPPPCPAHSATRFDPTWESLDARQLPAWFDQAKFGIFIHWGVFSVPSFGSEWFWWYWQKEKIPKYVEFMKDNYPPSFKYEDFGPLFTAKFFNANQWADIFQASGAKYIVLTSKHHEATCRDSFMWRKSFDEYWAHTRWHHFCSF

SEQ ID NO: 222610 - protein, 109 aa, Artificial Sequence
  derived and/or modified sequence
QLVETVSCGGNLLMNIGPTLDGTISVVFEERLRQMGSWLKVNGEAIYETHTWRSQNDTVTPDVWYTSKPKEKLVYAIFLKWPTSGQLFLGHPKAILGATEVRGNFTLFL

SEQ ID NO: 222611 - DNA, 1690 bp, Artificial Sequence
  derived and/or modified sequence
cagcgctcccgaggccgcgggagcctgcagagaggacagccggcctgcgccgggacatgcggccccaggagctccccaggctcgcgttcccgttgctgctgttgctgttgctgctgctgccgccgccgccgtgccctgcccacagcgccacgcgcttcgaccccacctgggagtccctggacgcccgccagctgcccgcgtggtttgaccaggccaagttcggcatcttcatccactggggagtgttttccgtgcccagcttcggtagcgagtggttctggtggtattggcaaaaggaaaagataccgaagtatgtggaatttatgaaagataattaccctcctagtttcaaatatgaagattttggaccactatttacagcaaaattttttaatgccaaccagtgggcagatatttttcaggcctctggtgccaaatacattgtcttaacttccaaacatcatgaaggctttaccttgtgggggtcagaatattcgtggaactggaatgccatagatgaggggcccaagagggacattgtcaaggaacttgaggtagccattaggaacagaactgacctgcgttttggactgtactattccctttttgaatggtttcatccgctcttccttgaggatgaatccagttcattccataagcggcaatttccagtttctaagacattgccagagctctatgagttagtgaacaactatcagcctgaggttctgtggtcggatggtgacggaggagcaccggatcaatactggaacagcacaggcttcttggcctggttatataatgaaagcccagttcggggcacagtagtcaccaatgatcgttggggagctggtagcatctgtaagcatggtggcttctatacctgcagtgatcgttataacccaggacatcttttgccacataaatgggaaaactgcatgacaatagacaaactgtcctggggctataggagggaagctggaatctctgactatcttacaattgaagaattggtgaagcaacttgtagagacagtttcatgtggaggaaatcttttgatgaatattgggcccacactagatggcaccatttctgtagtttttgaggagcgactgaggcaaatggggtcctggctaaaagtcaatggagaagctatttatgaaacccatacctggcgatcccagaatgacactgtcaccccagatgtgtggtacacatccaagcctaaagaaaaattagtctatgccatttttcttaaatggcccacatcaggacagctgttccttggccatcccaaagctattctgggggcaacagaggtgaaactactgggccatggacagccacttaactggatttctttggagcaaaatggcattatggtagaactgccacagctaaccattcatcagatgccgtgtaaatggggctgggctctagccctgactaatgtgatctaaagtgcagcagagtggctgatgctgcaagttatgtctaaggctaggaactatcaggtgtctataattgtagcacatggagaaagcaaatgtaaaactggataagaaaattattttggcagttcagccctttccctttttcccactaaattttttcttaaattacccatgtaaccattttaactctccagtgcactttgccattaaagtctcttcacattgatttgtttcca

SEQ ID NO: 222612 - DNA, 646 bp, Artificial Sequence
  derived and/or modified sequence
cagcgctcccgaggccgcgggagcctgcagagaggacagccggcctgcgccgggacatgcggccccaggagctccccaggctcgcgttcccgttgctgctgttgctgttgctgctgctgccgccgccgccgtgccctgcccacagcgccacgcgcttcgaccccacctgggagtccctggacgcccgccagctgcccgcgtggtttgaccaggccaagttcggcatcttcatccactggggagtgttttccgtgcccagcttcggtagcgagtggttctggtggtattggcaaaaggaaaagataccgaagtatgtggaatttatgaaagataattaccctcctagtttcaaatatgaagattttggaccactatttacagcaaaattttttaatgccaaccagtgggcagatatttttcaggcctctggtgccaaatacattgtcttaacttccaaacatcatgaagcaacttgtagagacagtttcatgtggaggaaatcttttgatgaatattgggcccacactagatggcaccatttctgtagtttttgaggagcgactgaggcaaatggggtcctggctaaaagtcaatggagaagctatttatgaaacccatacctggcgatcccagaatgacactgtca

SEQ ID NO: 222613 - DNA, 1503 bp, Artificial Sequence
  derived and/or modified sequence
agagaggacagccggcctgcgccgggacatgcggccccaggagctccccaggctcgcgttcccgttgctgctgttgctgttgctgctgctgccgccgccgccgtgccctgcccacagcgccacgcgcttcgaccccacctgggagtccctggacgcccgccagctgcccgcgtggtttgaccaggccaagttcggcatcttcatccactggggagtgttttccgtgcccagcttcggtagcgagtggttctggtggtattggcaaaaggaaaagataccgaagtatgtggaatttatgaaagataattaccctcctagtttcaaatatgaagattttggaccactatttacagcaaaattttttaatgccaaccagtgggcagatatttttcaggcctctggtgccaaatacattgtcttaacttccaaacatcatgaagcaacttgtagagacagtttcatgtggaggaaatcttttgatgaatattgggcccacactagatggcaccatttctgtagtttttgaggagcgactgaggcaaatggggtcctggctaaaagtcaatggagaagctatttatgaaacccatacctggcgatcccagaatgacactgtcaccccagatgtgtggtacacatccaagcctaaagaaaaattagtctatgccatttttcttaaatggcccacatcaggacagctgttccttggccatcccaaagctattctgggggcaacagaggtaagagggaattttaccttattcctttaaattgctgattagaacatcttgatgcaaacattaacttttaaggggagccttataactgtttcacttatacttcataaaaggaattgtaaatgagctccagccaagcattgtggctcacactgtaattccagcactttgggaggctaaggcaggaggatgtcttgaggccagaagtttgagactagcctgggcaacatagcaagacccctgtctacaaaaattttttttaaagttagctgagcatggtggcacgcacctgtagtcctagttactcaggaggctgaggcaggaggattgcttgagcccagtaggtcaagactacagtaagctatgactgcaccacttcagcctgtctctgaaaaaataaaataaaatataataaaataaaatgaatttcaccaatgacagtgtttggtcaaaatctttgaaactttttgtttcccagaaaactaagctgataaaacagctgcagtatctctatgcatatcactgtaaaatagacattattcttcacagtcattttacgttgttcaagttcactgcatgcatccaaaatgattcttctcataaaactagaattcggatgctttccctgacaccccaccccagaacatatctgaatacaagatgtcatgactctactattttatgtttataaaacattttggagaaagttagagattaatctaactgttgaaaccaccagatctggcattgagttcattctgatata

SEQ ID NO: 222614 - DNA, 737 bp, Artificial Sequence
  derived and/or modified sequence
caacttgtagagacagtttcatgtggaggaaatcttttgatgaatattgggcccacactagatggcaccatttctgtagtttttgaggagcgactgaggcaaatggggtcctggctaaaagtcaatggagaagctatttatgaaacccatacctggcgatcccagaatgacactgtcaccccagatgtgtggtacacatccaagcctaaagaaaaattagtctatgccatttttcttaaatggcccacatcaggacagctgttccttggccatcccaaagctattctgggggcaacagaggtaagagggaattttaccttattcctttaaattgctgattagaacatcttgatgcaaacattaacttttaaggggagccttataactgtttcacttatacttcataaaaggaattgtaaatgagctccagccaagcattgtggctcacactgtaattccagcactttgggaggctaaggcaggaggatgtcttgaggccagaagtttgagactagcctgggcaacatagcaagacccctgtctacaaaaattttttttaaagttagctgagcatggtggcacgcacctgtagtcctagttactcaggaggctgaggcaggaggattgcttgagcccagtaggtcaagactacagtaagctatgactgcaccacttcagcctgtctctgaaaaaataaaataaaatataataaaataaaatgaatttcaccaatgaca

SEQ ID NO: 222615 - DNA, 1404 bp, Artificial Sequence
  derived and/or modified sequence
atgaggccccaggagctgcctaggttggccttccccctgttgctacttttgcttctgctactgccacctcccccatgcccagcccactcagctactcgctttgatcctacttgggaatctttggacgcacggcagttaccggcctggttcgatcaggctaaattcggaatcttcatccactggggcgttttttctgtaccgtctttcggaagcgagtggttttggtggtattggcagaaagagaaaatccctaagtatgtcgagttcatgaaagataattatccacccagcttcaagtacgaagacttcggacccttgttcaccgctaaatttttcaatgccaaccagtgggcagacatcttccaagctagtggggctaaatacatagttctaactagtaagcaccatgaaggttttacgttatgggggagcgagtacagctggaactggaacgccatcgatgaaggccccaagcgggacattgtgaaagaactggaagttgcaattagaaaccgcaccgatctccggttcgggctgtattattctctcttcgagtggttccacccgctgttccttgaagatgaatcaagttcgttccataagaggcagtttcccgtttcaaaaacacttcccgagctgtatgagctcgtgaataactaccagcccgaggtcttgtggtccgacggagatggaggcgccccggatcagtactggaactcgactgggtttctggcatggctgtacaacgaaagtccagtgcggggaaccgtcgtgaccaatgatagatggggcgcaggcagcatctgtaagcatggaggcttctacacttgctcagatcggtacaatccaggacaccttctacctcataaatgggagaattgcatgacgattgataagctttcttggggatatcggagggaagccggaatcagtgactatttaacaatcgaagagttggtgaaacagctggtagagaccgtgtcttgtggagggaatctcctaatgaacatcgggcccactctcgatggcacgatctctgtagttttcgaagagcgcctgaggcaaatggggagttggctgaaggtcaatggagaggccatttacgagacccacacctggaggtctcagaatgataccgtgactcccgatgtgtggtatacttctaagcctaaggagaaactggtgtacgccattttcctgaaatggcctacctctggacagctattcctgggccaccccaaagccatccttggggcgactgaggtcaagctgctgggtcatggccaacccctaaactggatcagtctcgagcagaacggcataatggtggaactgccacagctcaccattcaccagatgccatgtaagtggggctgggccctcgcgctgacaaatgtaatttag

SEQ ID NO: 222616 - DNA, 498 bp, Artificial Sequence
  derived and/or modified sequence
atgaggccacaagagctccctcgtctggcgttccccctgctcttgctattgttactcctgttacccccacccccatgtccagcccacagcgccacaagatttgaccctacatgggaaagccttgacgcaagacagctgccggcatggtttgatcaggctaaatttggcatcttcatccactggggagtgttcagtgtccctagttttggcagcgagtggttttggtggtactggcaaaaagaaaagatccccaaatacgtggaattcatgaaggacaactatccaccctcattcaaatacgaggactttggcccattgttcaccgcaaagtttttcaacgcaaatcaatgggccgacattttccaggccagtggcgctaaatacatagtgctgacctccaaacaccatgaggcaacatgcagagacagcttcatgtggagaaaatcattcgatgagtattgggcacataccagatggcatcacttctgctctttttag

SEQ ID NO: 222617 - DNA, 498 bp, Artificial Sequence
  derived and/or modified sequence
atgcgcccgcaagaactccctcggcttgctttccctttactgttgcttctgctcttattgctccccccccctccttgtcctgctcacagcgcaacacgcttcgatccgacctgggagtccctcgatgcccggcagctgcctgcttggttcgatcaggctaagtttggcatttttatccactggggcgtctttagcgtcccaagttttggtagcgaatggttctggtggtactggcaaaaagagaagatcccaaagtatgtggagttcatgaaggacaactacccgcctagtttcaagtacgaagattttgggcccctcttcaccgcaaaattcttcaacgccaaccagtgggctgacatattccaggcgtccggtgctaaatatatagtgctgacttcaaaacaccacgaggccacttgccgggattcttttatgtggcgcaaatcctttgatgaatactgggcacacacacgctggcatcacttttgcagtttctag

SEQ ID NO: 222618 - DNA, 330 bp, Artificial Sequence
  derived and/or modified sequence
cagttggtggagactgtctcctgtggtggaaatctattgatgaacatcggccccactcttgacggtactatttctgtagtgttcgaagagagactgcgccagatgggctcctggctgaaggtgaatggtgaagcgatttacgagacccatacatggaggtcacagaatgacacagtgacccccgacgtttggtacacctctaagcccaaggagaaacttgtgtacgctatctttctcaagtggcctacttcgggccagttattccttggccacccaaaagccatactcggggccactgaggtgagaggaaacttcaccctctttctgtag

SEQ ID NO: 222619 - DNA, 1404 bp, Artificial Sequence
  derived and/or modified sequence
atgaggccccaggagctgccccggctggccttccccctgctgctgctgctgctgctgctgctgcccccaccaccctgcccagcccacagcgccaccaggtttgaccccacctgggagagcctggatgcccggcagctgcctgcctggtttgaccaggccaagtttggcatcttcatccactggggcgtcttctctgtgcccagctttggaagtgagtggttctggtggtactggcagaaggagaagatccccaagtatgtggagttcatgaaggacaactacccacccagcttcaagtatgaagattttggccccctcttcaccgccaagttcttcaatgccaaccagtgggccgacatcttccaggccagcggggccaagtacatcgtgctgaccagcaagcaccacgagggcttcaccctgtggggcagcgagtacagctggaactggaatgccattgatgagggccccaagagggacatcgtgaaggagctggaggtggccatccggaacagaacagacctgcgcttcggcctgtactacagcctgtttgagtggttccaccccctcttcctggaggatgagagcagcagcttccacaagaggcagtttcctgtgtccaagaccctgcctgagctgtatgagctggtgaacaactaccagcctgaggtgctgtggagcgatggagatggaggagccccagaccagtactggaacagcacaggcttcctggcctggctgtacaatgaaagccctgtgcggggcaccgtggtgaccaatgaccgctggggcgccggcagcatctgcaagcatggaggcttctacacctgcagcgaccgctacaaccctggccacctgctgccccacaagtgggagaactgcatgaccatcgacaagctgtcctggggctacagaagagaggccggcatcagtgactacctgaccatcgaggagctggtgaagcagctggtggagaccgtgtcctgtggcggcaacctgctgatgaacatcggccccaccctggatggcaccatctctgtggtgtttgaggagcggctgcggcagatgggctcctggctgaaggtgaatggagaggccatctatgagacccacacctggaggagccagaatgacacagtgaccccagatgtgtggtacaccagcaagcccaaggagaagctggtgtatgccatcttcctgaagtggcccaccagcggccagctgttcctgggccaccccaaggccatcctgggcgccacagaggtgaagctgctgggccacggccagcccctgaactggatcagcctggagcagaatggcatcatggtggagctgccccagctgaccatccaccagatgccctgcaagtggggctgggccctggccctgaccaacgtcatctag

SEQ ID NO: 222620 - DNA, 498 bp, Artificial Sequence
  derived and/or modified sequence
atgaggccccaggagctgccccggctggccttccccctgctgctgctgctgctgctgctgctgcccccaccaccctgcccagcccacagcgccaccaggtttgaccccacctgggagagcctggatgcccggcagctgcctgcctggtttgaccaggccaagtttggcatcttcatccactggggcgtcttctctgtgcccagctttggaagtgagtggttctggtggtactggcagaaggagaagatccccaagtatgtggagttcatgaaggacaactacccacccagcttcaagtatgaagattttggccccctcttcaccgccaagttcttcaatgccaaccagtgggccgacatcttccaggccagcggggccaagtacatcgtgctgaccagcaagcaccacgaggccacctgccgggacagcttcatgtggaggaagagctttgatgagtactgggcccacacccgctggcaccacttctgcagcttctag

SEQ ID NO: 222621 - DNA, 330 bp, Artificial Sequence
  derived and/or modified sequence
cagctggtggagaccgtgtcctgtggcggcaacctgctgatgaacatcggccccaccctggatggcaccatctctgtggtgtttgaggagcggctgcggcagatgggctcctggctgaaggtgaatggagaggccatctatgagacccacacctggaggagccagaatgacacagtgaccccagatgtgtggtacaccagcaagcccaaggagaagctggtgtatgccatcttcctgaagtggcccaccagcggccagctgttcctgggccaccccaaggccatcctgggcgccacagaggtgcggggcaacttcaccctcttcctgtag

SEQ ID NO: 222622 - DNA, 1404 bp, Artificial Sequence
  derived and/or modified sequence
atgcggccccaggagctgccccggctggccttccccctgctgctgctgctgttgctgctgcttcccccacccccctgcccggcgcactccgccacccgcttcgaccctacttgggaatcactcgatgcacgtcagctccctgcctggtttgaccaggccaaatttggtatctttattcactggggtgttttcagcgtgcccagctttggatcagagtggttctggtggtattggcagaaggagaagatccctaagtacgtagagttcatgaaggacaattaccctccctcttttaaatatgaggattttggcccgctctttacagctaaattcttcaacgccaatcagtgggccgacatctttcaggcttctggcgctaaatatatcgtgctgacgagcaagcatcacgagggctttaccctctggggtagcgaatactcatggaattggaacgccatcgacgaggggcctaaacgagatatcgtgaaggagctcgaggtcgccattagaaatcggaccgatcttaggttcgggttgtattacagtctcttcgaatggttccacccgctattcttagaggacgagtccagtagctttcacaaacgtcaattccccgtatctaaaacgctgccggagctatatgagctggtgaacaattatcagcccgaggtcttatggtccgacggagatggcggcgcgcctgaccagtattggaacagtaccggatttctggcatggttgtataacgagtcgcccgtgcgcgggacagtggtgaccaacgacaggtggggtgccggctcgatctgtaagcacggtggtttctatacctgttctgatagatacaatcctggccatctactgcctcataagtgggaaaactgtatgacaatcgataagctttcgtgggggtaccgtagagaggcagggatctccgattacttaacgatcgaggagctggtgaaacagctcgtggaaacagtgtcttgtggcggaaatctgctgatgaacattggccccacactagatggcacaatcagcgtagtgtttgaagaacggctgcgccagatgggaagttggctgaaggtaaacggcgaggctatttatgagacacacacatggcgatcccagaatgacactgtgactcccgatgtatggtatacgagcaagccgaaggaaaagttggtctacgctatcttcctgaagtggcctacatccgggcagctgttcctcggacatcccaaggccatcctgggggccaccgaagtgaagctactcggccatggacagccactgaactggatatccctggagcagaacggtattatggtggaactgccccagctgacaattcaccagatgccctgtaagtggggatgggccttggcccttacaaatgttatctag

SEQ ID NO: 222623 - DNA, 498 bp, Artificial Sequence
  derived and/or modified sequence
atgcggccccaggagctgccccggctggccttccccctgctgctgcttctgctcctcctcctcccccccccgccctgtccagctcatagcgccactagattcgaccccacctgggagtcactggatgccagacagctcccagcttggttcgaccaagccaagtttggcattttcatacactggggcgtgttcagcgttccgtctttcggcagtgagtggttttggtggtactggcaaaaggaaaagataccaaaatatgtggagtttatgaaagacaactaccctccttcgttcaagtatgaggacttcggcccactttttaccgctaaattttttaacgccaaccagtgggctgacatctttcaggccagcggggccaagtatatcgtgctaacatctaagcatcacgaagcaacttgtcgcgactcttttatgtggcgtaaatcttttgacgagtactgggcacatactcgctggcaccatttttgctccttttag

SEQ ID NO: 222624 - DNA, 498 bp, Artificial Sequence
  derived and/or modified sequence
atgcggccccaggagctgccccggctggccttccccctgctgctgctccttctgctgctgctgccccctcccccctgtcccgcgcactctgctactaggttcgaccctacgtgggaatcgctcgatgcccgccagctgcctgcctggttcgaccaggccaagtttggtatatttatacattggggcgtgttctctgtgccttccttcgggtctgaatggttctggtggtattggcaaaaggaaaagatacctaagtacgtcgagtttatgaaggataattatccaccctcttttaagtacgaagattttggaccattgttcacagccaagttcttcaacgccaatcagtgggccgacattttccaggcatctggcgccaagtacatcgttctcacgagtaagcaccatgaagccacctgccgggattcttttatgtggcgcaagtcattcgatgaatactgggcacacacacggtggcaccatttctgcagtttttag

SEQ ID NO: 222625 - DNA, 330 bp, Artificial Sequence
  derived and/or modified sequence
cagctggtggagaccgtgagctgcggcggcaacctgctgatgaacattggccctaccttggacggcactatcagcgttgtttttgaggagagactcaggcagatggggagctggctgaaagtgaacggagaggcaatatacgagacgcacacttggcggagtcaaaatgatactgtgactcccgatgtgtggtacacctccaagccgaaagaaaagcttgtctacgctatctttttgaaatggcctaccagcggacagctttttctggggcaccctaaggctattttgggcgctactgaggtgcgcggaaactttacactcttcctgtag

SEQ ID NO: 222626 - DNA, 1404 bp, Artificial Sequence
  derived and/or modified sequence
atgcggccacaggagctgccgcgactggcgttccccctgctgcttctcctgctgttgctcctgccacccccaccctgccccgcacactctgcgactcgatttgaccctacatgggaatcccttgacgccaggcaactgccagcatggttcgatcaggcgaagtttggcattttcatccactggggcgtgtttagtgttcctagcttcggatcggagtggttctggtggtactggcaaaaagaaaagatcccaaagtacgtagagtttatgaaggataactaccctccgagttttaaatacgaggacttcggcccacttttcaccgcgaaatttttcaatgcaaatcagtgggccgacatcttccaggcttcaggagcgaagtacatcgtgctgaccagcaaacatcatgaaggattcaccctgtgggggagcgagtattcctggaattggaatgcaatcgacgaaggccctaaacgcgacatcgtgaaggaactggaggtagccatcaggaataggactgatctgcggtttggcctgtactattcccttttcgagtggtttcaccccttgtttctggaggacgagtcctcttctttccataaacgacagttcccagtttctaaaactctgccagaactgtacgagctggtgaacaactaccagcccgaggtgctttggtccgatggagatgggggagctcctgatcagtattggaacagcaccggattcctggcctggctatacaatgaaagtcccgtgcggggaactgtggtaacaaatgataggtggggagctggctcaatttgcaaacacggtggtttctacacatgtagcgatcgatataaccccggacatctgttgccccacaaatgggagaattgtatgactatcgataaactctcttgggggtatagacgggaggccggtattagtgattacctgacgatcgaggaactggtaaagcagctcgtggaaaccgtttcctgtggcggaaatctccttatgaatatcgggcctacactggatggcacaattagcgtggtgttcgaggaaaggctccgccaaatgggcagttggctgaaggttaacggtgaagccatatatgaaacccatacatggaggtctcagaatgacaccgttacacccgatgtgtggtatacgagcaagcccaaggagaagctggtgtatgcaatctttctgaagtggcctacctcaggtcagttgtttctcggacacccaaaagctatcctgggtgccaccgaggtgaagctgcttggccatggacagccgttgaattggatcagcttggaacaaaacggaattatggttgagcttccacaattgacaatccaccagatgccctgcaagtggggctgggcccttgccctgactaatgtcatatag

SEQ ID NO: 222627 - DNA, 498 bp, Artificial Sequence
  derived and/or modified sequence
atgaggccccaggagctgccgagactggcctttccccttctgctgctgctgctgttgctgttgccacctccaccctgtcccgcacactccgctactcgctttgaccctacgtgggagtcactggatgccaggcagttgcccgcatggttcgaccaggccaagttcgggatcttcatccattggggcgtttttagcgtgccatcctttggatccgaatggttctggtggtattggcagaaggagaaaattccaaaatacgtggagtttatgaaggataattatcctccgtcctttaagtacgaagattttggcccattgttcaccgccaagtttttcaacgcaaaccaatgggccgacatatttcaggcctcaggagccaaatatatagtgctaacctccaagcaccacgaagcaacttgcagagattctttcatgtggcgaaaaagcttcgacgaatattgggcacacacaaggtggcatcatttctgttcgttctag

SEQ ID NO: 222628 - DNA, 498 bp, Artificial Sequence
  derived and/or modified sequence
atgcgcccacaggaactcccacgcctcgccttcccgttgctcctactgctgctgctgctattgccaccccctccgtgcccagctcacagcgctacccgtttcgacccgacttgggaatcactggacgcgagacagttacccgcatggttcgaccaggccaagttcggtatcttcattcactggggcgtcttcagcgtcccgtcttttgggagcgagtggttctggtggtattggcagaaggagaagatcccaaagtatgtagaatttatgaaagataattatccacccagctttaaatacgaggatttcggcccactgttcactgcaaagtttttcaacgcgaaccagtgggcagatatctttcaagcctctggggctaaatatattgttctaacttcgaaacatcacgaagccacctgcagagactcctttatgtggagaaaaagtttcgacgagtactgggcacatacaagatggcatcacttctgcagtttctag

SEQ ID NO: 222629 - DNA, 330 bp, Artificial Sequence
  derived and/or modified sequence
caactggttgaaactgtgtcttgcgggggaaatcttttgatgaatattggccctactctggatggaacaattagtgttgtcttcgaggagcgcctgaggcagatgggcagctggcttaaagtaaacggagaagccatctatgaaacccacacatggcgatctcaaaatgacaccgtgacaccagatgtctggtatacgtctaaaccaaaggagaagctggtgtatgccatcttcctgaaatggccaactagcggccagttatttcttggacatcccaaagccattctgggggcaaccgaagttagaggcaacttcacgcttttcttatag

SEQ ID NO: 222630 - DNA, 1404 bp, Artificial Sequence
  derived and/or modified sequence
atgcggccccaggagctgccaagacttgccttccccctgctgctcctccttctgctattgctccctccccctccttgccccgcacacagcgcaacacggtttgatcctacttgggagtcactggatgccagacagctgcccgcctggtttgatcaggcaaaatttggaatattcatacattggggggtgttcagtgtgccttcgttcggctcggaatggttctggtggtactggcagaaggaaaagatccctaagtacgttgaattcatgaaagataattaccccccgtctttcaaatatgaggatttcgggccattatttactgccaaattctttaacgcaaatcaatgggcagatatttttcaggcgagcggagcaaagtacatcgtgttgacctccaaacatcatgagggattcactttgtggggttctgaatatagttggaattggaacgcaattgacgagggacctaagagagatattgtcaaagagctggaggtggctattaggaacagaaccgacctccgctttggtttgtactactccctcttcgaatggtttcacccgctgtttctcgaagacgaaagctcatctttccacaagcgccaattccccgtttctaagacattacctgaactgtacgaactcgtgaacaactatcagcccgaagtactctggagcgatggggatggcggcgcccctgaccaatactggaattccacagggtttttagcctggctctataacgagtcccctgtgcggggcactgtcgtcaccaacgatcgctggggcgccggctccatctgcaagcacgggggtttttatacctgctcagacagatacaatcccggccatctcctcccacacaaatgggaaaattgcatgacaatcgataaactgagctgggggtatcggagagaagctggaatttccgattatttgactatagaagaattggtgaaacaactagtggagactgtgagctgcggcggcaatctgctgatgaacattgggcccaccctggatggaactatctccgtagtgtttgaagagagactgaggcaaatgggctcctggctgaaagttaatggcgaggccatatacgagacacacacctggcgatcccaaaacgacactgtgacccccgacgtgtggtataccagcaaaccaaaggagaagctcgtgtacgccatattcttgaagtggcccaccagcggacagctctttttgggccaccctaaggccatactgggcgccactgaggtgaagctccttgggcacggacagccactgaactggatatcccttgagcaaaacggaatcatggtcgaactcccccagctaactatccaccaaatgccttgtaagtgggggtgggccctggccctaactaacgtcatttag

SEQ ID NO: 222631 - DNA, 1404 bp, Artificial Sequence
  derived and/or modified sequence
atgcgaccacaagaacttccccggttagccttcccgctgcttttgctgctgttgcttctgctgccaccccccccttgtcccgcccactcagctactcgcttcgatccaacatgggagtcactggacgctaggcaactgccagcatggttcgatcaggcaaagtttggcatattcatccactggggcgtgttctctgtcccatcattcggaagtgaatggttttggtggtactggcagaaggaaaagattcccaaatatgttgagtttatgaaagacaattatcctccatcgtttaagtacgaggatttcgggccattatttactgccaaattctttaacgcaaatcaatgggcagatatttttcaggcgagcggagcaaagtacatcgtgttgacctccaaacatcatgagggattcactttgtggggttctgaatatagttggaattggaacgcaattgacgagggacctaagagagatattgtcaaagagctggaggtggctattaggaacagaaccgacctccgctttggtttgtactactccctcttcgaatggtttcacccgctgtttctcgaagacgaaagctcatctttccacaaacgccagtttcctgtaagcaagacacttcccgaactctacgaattagtgaataattatcagcccgaagtgttatggagcgatggcgacggcggtgccccagaccagtactggaactcaaccggatttctcgcctggttgtataacgagagcccagtccggggcaccgtggtgacaaacgaccgctggggcgccggatctatttgtaaacacggaggtttttacacgtgctctgacagatataaccctggacatttgctgccacataaatgggaaaactgtatgactatcgataagctcagttgggggtatcgaagggaagctggtatctccgattacttaacgattgaggaactggtgaaacagctggtcgaaactgtgtcttgcggtggtaaccttctgatgaacatcggaccaacactggatggaaccatttccgtggtgtttgaggagcgactccgccaaatgggcagctggctcaaagttaatggtgaagcaatatatgaaactcatacctggagatctcagaatgatacagtcacacctgacgtgtggtacacctctaagcccaaagaaaaacttgtctacgctatttttctcaaatggccaacatcaggccagttgtttctcggacatcctaaggcgatcctcggtgctactgaagtcaagctcttgggtcatggtcagcccttaaattggatctctcttgagcaaaatgggattatggtcgaattaccccagctgacaattcaccaaatgccttgcaagtggggttgggctctcgcactaaccaatgtcatctag

SEQ ID NO: 222632 - DNA, 1404 bp, Artificial Sequence
  derived and/or modified sequence
atgagaccccaggagctgcccagactggccttccccctgctgctgctgctgctgctgctgctgcccccccccccctgccccgcccacagcgccaccagattcgaccccacctgggagagcctggacgccagacagctgcccgcctggttcgaccaggccaagttcggcatcttcatccactggggcgtgttcagcgtgcccagcttcggcagcgagtggttctggtggtactggcagaaggagaagatccccaagtacgtggagttcatgaaggacaactacccccccagcttcaagtacgaggacttcggccccctgttcaccgccaagttcttcaacgccaaccagtgggccgacatcttccaggccagcggcgccaagtacatcgtgctgaccagcaagcaccacgagggcttcaccctgtggggcagcgagtacagctggaactggaacgccatcgacgagggccccaagagagacatcgtgaaggagctggaggtggccatcagaaacagaaccgacctgagattcggcctgtactacagcctgttcgagtggttccaccccctgttcctggaggacgagagcagcagcttccacaagagacagttccccgtgagcaagaccctgcccgagctgtacgagctggtgaacaactaccagcccgaggtgctgtggagcgacggcgacggcggcgcccccgaccagtactggaacagcaccggcttcctggcctggctgtacaacgagagccccgtgagaggcaccgtggtgaccaacgacagatggggcgccggcagcatctgcaagcacggcggcttctacacctgcagcgacagatacaaccccggccacctgctgccccacaagtgggagaactgcatgaccatcgacaagctgagctggggctacagaagagaggccggcatcagcgactacctgaccatcgaggagctggtgaagcagctggtggagaccgtgagctgcggcggcaacctgctgatgaacatcggccccaccctggacggcaccatcagcgtggtgttcgaggagagactgagacagatgggcagctggctgaaggtgaacggcgaggccatctacgagacccacacctggagaagccagaacgacaccgtgacccccgacgtgtggtacaccagcaagcccaaggagaagctggtgtacgccatcttcctgaagtggcccaccagcggccagctgttcctgggccaccccaaggccatcctgggcgccaccgaggtgaagctgctgggccacggccagcccctgaactggatcagcctggagcagaacggcatcatggtggagctgccccagctgaccatccaccagatgccctgcaagtggggctgggccctggccctgaccaacgtgatctag

SEQ ID NO: 222633 - DNA, 498 bp, Artificial Sequence
  derived and/or modified sequence
atgagaccccaggagctgcccagactggccttccccctgctgctgctgctgctgctgctgctgcccccccccccctgccccgcccacagcgccaccagattcgaccccacctgggagagcctggacgccagacagctgcccgcctggttcgaccaggccaagttcggcatcttcatccactggggcgtgttcagcgtgcccagcttcggcagcgagtggttctggtggtactggcagaaggagaagatccccaagtacgtggagttcatgaaggacaactacccccccagcttcaagtacgaggacttcggccccctgttcaccgccaagttcttcaacgccaaccagtgggccgacatcttccaggccagcggcgccaagtacatcgtgctgaccagcaagcaccacgaggccacctgcagagacagcttcatgtggagaaagagcttcgacgagtactgggcccacaccagatggcaccacttctgcagcttctag

SEQ ID NO: 222634 - DNA, 330 bp, Artificial Sequence
  derived and/or modified sequence
cagctggtggagaccgtgagctgcggcggcaacctgctgatgaacatcggccccaccctggacggcaccatcagcgtggtgttcgaggagagactgagacagatgggcagctggctgaaggtgaacggcgaggccatctacgagacccacacctggagaagccagaacgacaccgtgacccccgacgtgtggtacaccagcaagcccaaggagaagctggtgtacgccatcttcctgaagtggcccaccagcggccagctgttcctgggccaccccaaggccatcctgggcgccaccgaggtgagaggcaacttcaccctgttcctgtag

SEQ ID NO: 222635 - protein, 321 aa, Artificial Sequence
  derived and/or modified sequence
MKEDCLPSSHVPISDSKSIQKSELLGLLKTYNCYHEGKSFQLRHREEEGTLIIEGLLNIAWGLRRPIRLQMQDDREQVHLPSTSWMPRRPSCPLKEPSPQNGNITAQGPSIQPVHKAESSTDSSGPLEEAEEAPQLMRTKSDASCMSQRRPKCRAPGEAQRIRRHRFSINGHFYNHKTSVFTPAYGSVTNVRVNSTMTTLQVLTLLLNKFRVEDGPSEFALYIVHESGERTKLKDCEYPLISRILHGPCEKIARIFLMEADLGVEVPHEVAQYIKFEMPVLDSFVEKLKEEEEREIIKLTMKFQALRLTMLQRLEQLVEAK

SEQ ID NO: 222636 - protein, 130 aa, Artificial Sequence
  derived and/or modified sequence
MKEDCLPSSHVPISDSKSIQKSELLGLLKTYNCYHEGKSFQLRHREEEGTLIIEGLLNIAWGLRRPIRLQMQDDREQVHLPSTSWMPRRPSCPLHLAGKKGRLQPGGLPTPMQAEHVSPSLVLSLKFTRI

SEQ ID NO: 222637 - protein, 123 aa, Artificial Sequence
  derived and/or modified sequence
SSHVPISDSKSIQKSELLGLLKTYNCYHEGKSFQLRHREEEGTLIIEGLLNIAWGLRRPIRLQMQDDREQVHLPSTSWMPRRPSCPLHLAGKKGRLQPGGLPTPMQAEHVSPSLVLSLKFTRI

SEQ ID NO: 222638 - DNA, 966 bp, Artificial Sequence
  derived and/or modified sequence
atgaaggaggactgcctgcccagcagccacgtgcccatcagcgacagcaagagcatccagaagagcgagctgctgggcctgctgaagacctacaactgctaccacgagggcaagagcttccagctgagacacagagaggaggagggcaccctgatcatcgagggcctgctgaacatcgcctggggcctgagaagacccatcagactgcagatgcaggacgacagagagcaggtgcacctgcccagcaccagctggatgcccagaagacccagctgccccctgaaggagcccagcccccagaacggcaacatcaccgcccagggccccagcatccagcccgtgcacaaggccgagagcagcaccgacagcagcggccccctggaggaggccgaggaggccccccagctgatgagaaccaagagcgacgccagctgcatgagccagagaagacccaagtgcagagcccccggcgaggcccagagaatcagaagacacagattcagcatcaacggccacttctacaaccacaagaccagcgtgttcacccccgcctacggcagcgtgaccaacgtgagagtgaacagcaccatgaccaccctgcaggtgctgaccctgctgctgaacaagttcagagtggaggacggccccagcgagttcgccctgtacatcgtgcacgagagcggcgagagaaccaagctgaaggactgcgagtaccccctgatcagcagaatcctgcacggcccctgcgagaagatcgccagaatcttcctgatggaggccgacctgggcgtggaggtgccccacgaggtggcccagtacatcaagttcgagatgcccgtgctggacagcttcgtggagaagctgaaggaggaggaggagagagagatcatcaagctgaccatgaagttccaggccctgagactgaccatgctgcagagactggagcagctggtggaggccaagtag

SEQ ID NO: 222639 - DNA, 393 bp, Artificial Sequence
  derived and/or modified sequence
atgaaggaggactgcctgcccagcagccacgtgcccatcagcgacagcaagagcatccagaagagcgagctgctgggcctgctgaagacctacaactgctaccacgagggcaagagcttccagctgagacacagagaggaggagggcaccctgatcatcgagggcctgctgaacatcgcctggggcctgagaagacccatcagactgcagatgcaggacgacagagagcaggtgcacctgcccagcaccagctggatgcccagaagacccagctgccccctgcacctggccggcaagaagggcagactgcagcccggcggcctgcccacccccatgcaggccgagcacgtgagccccagcctggtgctgagcctgaagttcaccagaatctag

SEQ ID NO: 222640 - DNA, 381 bp, Artificial Sequence
  derived and/or modified sequence
atgaaggaggactgcctgcccagcagccacgtgcccatcagcgacagcaagagcatccagaagagcgagctgctgggcctgctgaagacctacaactgctaccacgagggcaagagcttccagctgagacacagagaggaggagggcaccctgatcatcgagggcctgctgaacatcgcctggggcctgagaagacccatcagactgcagatgcaggacgacagagagcaggtgcacctgcccagcaccagctggatgcccagaagacccagctgccccctggcccccggcggcggcagaggcggcccccccgccgacgccgaccaggagagaagacagctgcacgagcccgaggaggcccaggtgcccagacccagatag

SEQ ID NO: 222641 - DNA, 372 bp, Artificial Sequence
  derived and/or modified sequence
agcagccacgtgcccatcagcgacagcaagagcatccagaagagcgagctgctgggcctgctgaagacctacaactgctaccacgagggcaagagcttccagctgagacacagagaggaggagggcaccctgatcatcgagggcctgctgaacatcgcctggggcctgagaagacccatcagactgcagatgcaggacgacagagagcaggtgcacctgcccagcaccagctggatgcccagaagacccagctgccccctgcacctggccggcaagaagggcagactgcagcccggcggcctgcccacccccatgcaggccgagcacgtgagccccagcctggtgctgagcctgaagttcaccagaatctag

SEQ ID NO: 222642 - DNA, 966 bp, Artificial Sequence
  derived and/or modified sequence
atgaaggaggattgcctcccctcaagtcatgtgccaatatccgactccaaatccattcaaaagagtgagctgcttgggcttctgaaaacttacaattgctaccacgaaggtaaaagtttccagctccggcacagagaggaggaaggtacactcatcattgagggcctccttaacatcgcatggggcttgagaagaccaatccgcctgcagatgcaggatgatcgagaacaggtgcacctcccgagcactagctggatgcctcgccggccttcctgccctctgaaagagcccagtcctcagaatggtaatataacagcccaaggcccttcgatccagccggtgcataaggcagagtcttctaccgatagttcagggccactcgaggaggctgaagaggctcctcagttaatgagaacaaagtccgacgcctcctgcatgtcccaaaggaggcccaagtgtcgggcgcctggagaggctcaacgtattcgcaggcaccgattcagcattaacgggcacttttacaatcataaaacctccgttttcacaccggcttacggttcggtcacaaatgtgagagtgaattctaccatgacaacgctccaggtgcttacgctgctgcttaacaagttcagagtggaggacggccccagcgagtttgcactgtacatagttcacgagagtggcgagcgcacaaagctcaaggactgtgaataccctttaatctcccggatcctccatggaccctgcgagaagattgctagaatttttctgatggaggccgatctgggagtggaagtgcctcacgaagtggcccagtatatcaagttcgaaatgccggttctcgatagttttgtcgaaaaactgaaagaggaagaagaaagggagatcataaagctcaccatgaagttccaggctctgcgtttgacaatgctccaacggctagaacagctggttgaggccaagtag

SEQ ID NO: 222643 - DNA, 393 bp, Artificial Sequence
  derived and/or modified sequence
atgaaggaggattgcttacctagcagccatgttccaatctccgacagcaaaagtattcaaaagagtgaactcctcggacttcttaagacatataattgctatcacgaaggaaaatccttccagctgaggcaccgtgaggaggaagggactctgattattgagggactactcaatatagcttggggcttgcgccgacctatcagattgcaaatgcaagacgaccgggagcaggtccatctcccaagcacttcatggatgcccaggcggcctagttgccctctccacctcgctggcaagaaaggcagattacagcctggagggttgcctaccccaatgcaggctgaacacgttagcccatcgttggttctttccttgaagttcaccaggatctag

SEQ ID NO: 222644 - DNA, 381 bp, Artificial Sequence
  derived and/or modified sequence
atgaaggaggattgcttgcctagctcacacgtacctatctccgattcaaagagcatacagaagagcgagctcctcggcttgctgaagacctataactgctaccacgagggtaaaagcttccagcttaggcatcgcgaagaggagggtaccctgattatcgaagggctgctcaacattgcatggggattacggcgaccaatacggctccaaatgcaagacgaccgtgagcaggtacatctgccttcaacctcatggatgcctaggagacccagttgtccactcgcacccggcggtgggcggggcggcccccccgcagatgccgaccaggagaggcgacagctgcacgagccagaagaggcgcaggtgcctcgaccaaggtag

SEQ ID NO: 222645 - DNA, 372 bp, Artificial Sequence
  derived and/or modified sequence
agcagtcacgtgcccatatcagacagcaagtcaatccagaagagcgagctgctggggcttttgaaaacatacaactgttaccacgaaggtaagagcttccagctccggcaccgggaggaggagggcactctcataatcgagggactactgaacattgcctggggactgcggcggccaatcaggttacaaatgcaggatgatagggaacaggttcatttgccttcaacaagctggatgccacggcggccttcatgccctctgcacttggccgggaagaagggcaggctccagccgggtggcctgcctaccccaatgcaggcggaacatgtctccccgtctttagtgctctcgctgaagttcactaggatctag

SEQ ID NO: 222646 - DNA, 966 bp, Artificial Sequence
  derived and/or modified sequence
atgaaggaggactgcctgcccagcagccacgtgcccatcagtgacagcaagagcatccagaagtctgagctgctgggcctgctgaagacctacaactgctaccacgagggcaagagcttccagctgcggcaccgggaggaggagggcaccctcatcatcgagggcctgctgaacatcgcctggggcctgcggcggcccatccggctgcagatgcaggatgaccgggagcaggtgcacctgcccagcacctcctggatgccccggcggcccagctgccccctgaaggagcccagcccccagaatggaaacatcacagcccagggccccagcatccagcctgtgcacaaggccgagagcagcacagacagcagcggccccctggaggaggccgaggaggccccccagctgatgaggaccaagagtgatgccagctgcatgagccagaggcggcccaagtgccgggcccctggagaggcccagaggatcagaagacaccgcttcagcatcaatggccacttctacaaccacaagacctctgtgttcaccccagcctacggctctgtgaccaacgtgcgggtgaacagcaccatgaccaccctgcaggtgctgaccctgctgctgaacaagttccgggtggaggatggccccagcgagtttgccctgtacatcgtgcatgaaagtggagagaggaccaagctgaaggactgtgagtaccccctcatcagccgcatcctgcacggcccctgtgagaagatcgcccgcatcttcctgatggaggccgacctgggcgtggaggtgccccatgaggtggcccagtacatcaagtttgagatgcctgtgctggacagctttgtggagaagctgaaggaggaggaggagcgggagatcatcaagctgaccatgaagttccaggccctgcggctgaccatgctgcagaggctggagcagctggtggaggccaagtag

SEQ ID NO: 222647 - DNA, 393 bp, Artificial Sequence
  derived and/or modified sequence
atgaaggaggactgcctgcccagcagccacgtgcccatcagtgacagcaagagcatccagaagtctgagctgctgggcctgctgaagacctacaactgctaccacgagggcaagagcttccagctgcggcaccgggaggaggagggcaccctcatcatcgagggcctgctgaacatcgcctggggcctgcggcggcccatccggctgcagatgcaggatgaccgggagcaggtgcacctgcccagcacctcctggatgccccggcggcccagctgccccctgcacctggccggcaagaagggccgcctgcagcccggcggcctgcccacccccatgcaggccgagcacgtgagccccagcctggtgctgagcctgaagttcacccgcatctag

SEQ ID NO: 222648 - DNA, 381 bp, Artificial Sequence
  derived and/or modified sequence
atgaaggaggactgcctgcccagcagccacgtgcccatcagtgacagcaagagcatccagaagtctgagctgctgggcctgctgaagacctacaactgctaccacgagggcaagagcttccagctgcggcaccgggaggaggagggcaccctcatcatcgagggcctgctgaacatcgcctggggcctgcggcggcccatccggctgcagatgcaggatgaccgggagcaggtgcacctgcccagcacctcctggatgccccggcggcccagctgccccctggcccctgggggcggccggggcggccccccagcagatgctgaccaggagcggcggcagctgcacgagcctgaggaggcccaggtgccccggcccaggtag

SEQ ID NO: 222649 - DNA, 372 bp, Artificial Sequence
  derived and/or modified sequence
agcagccacgtgcccatcagtgacagcaagagcatccagaagtctgagctgctgggcctgctgaagacctacaactgctaccacgagggcaagagcttccagctgcggcaccgggaggaggagggcaccctcatcatcgagggcctgctgaacatcgcctggggcctgcggcggcccatccggctgcagatgcaggatgaccgggagcaggtgcacctgcccagcacctcctggatgccccggcggcccagctgccccctgcacctggccggcaagaagggccgcctgcagcccggcggcctgcccacccccatgcaggccgagcacgtgagccccagcctggtgctgagcctgaagttcacccgcatctag

SEQ ID NO: 222650 - DNA, 966 bp, Artificial Sequence
  derived and/or modified sequence
atgaaggaggactgcctgcccagcagccacgtgcccatcagcgacagtaagtctatccagaaatccgaacttttaggtttgttaaaaacatataactgctatcatgagggaaaaagtttccagttgcggcatagagaggaggaggggactctcatcattgagggcctgcttaacatcgcctggggtttgcggcgccccattcgtttgcaaatgcaagatgaccgagagcaggtgcatcttcctagcaccagctggatgcctcgtcggccctcgtgtcctcttaaagagccttcaccccaaaatggaaatatcaccgcccaggggcctagtatccagccagtgcataaagcagagagttccaccgatagctccggcccattagaggaggctgaggaggcaccccagctcatgaggaccaagagtgacgcgagttgcatgtcacagcggcgaccaaagtgcagggctccaggcgaggcgcagcggatccgtcgccatagatttagcattaacggacatttctataatcataaaacctccgtattcacacctgcatatggatccgtcaccaacgtgagagtaaacagtaccatgactactctccaagtacttactctcctgttgaacaagttccgggtggaggatggccccagcgagttcgccctgtatattgtgcatgaaagcggggagcgtacgaagctaaaagactgcgaatatccactgatctcccggatcctccatggcccttgcgaaaagattgcaagaattttcctgatggaagcagatctgggtgtggaggtgccccacgaagtagcacagtatattaagttcgaaatgccggtgctcgatagttttgtggagaaactcaaggaagaagaagagcgcgagataatcaaactgaccatgaaattccaggcactgcggttaaccatgctccagcgcctcgagcagctcgtggaagcaaagtag

SEQ ID NO: 222651 - DNA, 393 bp, Artificial Sequence
  derived and/or modified sequence
atgaaggaggactgcctgcccagcagccacgtgcccatcagcgacagcaaaagtattcaaaaatctgaattgttgggcctactcaaaacctacaactgctatcatgagggcaaatccttccagttgcggcacagggaagaagaaggtactctgataatagaaggattacttaatatcgcttggggactgcgcagaccaatcaggctgcagatgcaggacgacagagagcaagtccacctcccttcaacaagctggatgcctagacgccccagttgtccactacatctggcagggaagaagggccgtcttcaacccggaggcctcccaactcctatgcaagctgagcacgtgtcccccagtctcgtgttatccctcaaattcacgcgtatttag

SEQ ID NO: 222652 - DNA, 381 bp, Artificial Sequence
  derived and/or modified sequence
atgaaggaggactgcctgcccagcagccacgtgcccatcagcgactctaagtcgatccagaagtccgagctgctggggctgctaaaaacctacaattgttaccatgagggcaagtcattccagctgcgccacagagaagaggagggtactttaattatagaaggcctcctgaacatcgcctggggtcttcggcggccgatcagattgcagatgcaggacgatcgagagcaagtgcatctcccaagtacgtcttggatgccgcggcgaccaagttgccctctggcccctggtggcggaagaggaggcccaccagctgacgccgaccaggagcgccgccaattgcacgagccagaagaagcccaggtgcctaggccacggtag

SEQ ID NO: 222653 - DNA, 372 bp, Artificial Sequence
  derived and/or modified sequence
agcagccacgtgcccatcagcgacagcaagagcatccagaagagcgaactgctcgggcttctcaagacatacaactgctaccacgaaggtaagagcttccagcttcgccatcgggaggaggaaggaacacttattattgaaggcctgctcaatatagcctggggactgagacgacccatcagactgcagatgcaggacgatcgagagcaagtccacttgccgtcaacatcatggatgcctcgccgacctagttgcccccttcatctcgcgggcaaaaaaggaaggctgcagccaggtgggctccccactccaatgcaagccgaacatgtctctccctccctggtgctgtccttaaaatttacacgcatctag

SEQ ID NO: 222654 - DNA, 966 bp, Artificial Sequence
  derived and/or modified sequence
atgaaggaggactgtctacccagttcgcacgtcccgatcagtgacagcaagagtatacaaaagtctgagctcctgggtctcctcaaaacctataactgctaccacgagggaaagtccttccagctcaggcaccgcgaggaggagggtacgctaatcattgagggactgctgaatatcgcctggggcctgcgcagaccgattagacttcagatgcaagacgatcgggagcaggtgcatttaccctccacatcctggatgcctcgtcgacccagctgtcctctaaaagaaccatcaccccaaaacggaaacataaccgcccagggaccctcaatccagcctgtccacaaagccgagtccagtacggactctagcggacccctggaggaggcagaagaagcccctcagcttatgaggacgaaatcagatgcttcttgtatgtcacagagacgcccaaagtgtagggcacccggtgaggcacaacggatccgtagacaccggttttccatcaatggccacttttacaatcataaaacatccgtgttcactcctgcttacgggagtgtgacgaacgtcagggtgaattctactatgacgacgctccaagtgctgacgcttcttctcaacaagttcagagtggaggatggcccatccgaattcgcactgtatatcgtgcacgaatcaggcgagcgcactaagctgaaagactgcgaataccccctcatctccaggattctgcatggtccctgtgagaagatcgccaggatatttctgatggaggctgacctcggcgtggaggtgcctcacgaagtggctcagtacattaagttcgagatgcctgttttagatagctttgtggagaaactcaaggaagaggaggaacgagaaattataaagctcacaatgaaatttcaggcccttcggctcacaatgctccaaagactggagcagcttgtagaagctaagtag

SEQ ID NO: 222655 - DNA, 393 bp, Artificial Sequence
  derived and/or modified sequence
atgaaagaggactgcctgcctagctcccatgttccgatctctgatagtaagtccatccagaagtctgagttactcggactcctcaagacatacaactgctaccatgaggggaagagtttccaactgcgtcaccgcgaggaggaagggacccttatcattgagggactgctcaatatcgcctggggactgcgcagaccgattcggctccagatgcaggacgacagggaacaggtgcaccttccttcaacttcctggatgcccagaagaccttcctgtcctctacacctggctggaaagaagggccgacttcaaccaggagggctcccaacgcctatgcaggctgagcacgtgagtccctccctggtgttaagtttgaaatttacacgaatctag

SEQ ID NO: 222656 - DNA, 381 bp, Artificial Sequence
  derived and/or modified sequence
atgaaagaggattgtttgccctcaagccacgtccccatcagcgactccaagtccatacagaaatctgagctgcttggcctgttaaagacctataattgctaccatgaaggcaagtctttccagctccgtcatagagaggaggagggcacccttatcatcgaaggactgctgaatattgcttggggtctgcgcagaccaatccgcctgcaaatgcaagatgacagagaacaggtgcacctcccaagcacgtcatggatgcccagacgtccctcctgccctcttgctccagggggagggaggggcggacctccagctgacgcggaccaagagcgcaggcagctgcacgaaccagaggaggcacaagtccccaggccaagatag

SEQ ID NO: 222657 - DNA, 372 bp, Artificial Sequence
  derived and/or modified sequence
agcagccacgtcccaatttcggattcgaagtcaattcagaagtcagaattgctgggcctgttaaagacgtataactgctatcacgaaggaaagagctttcagctgcggcatcgagaggaagaaggcaccctcatcatcgaaggcctgctcaacattgcatgggggctccggaggccaattcgtctgcagatgcaggacgaccgagaacaggtccatcttccgtcgacatcatggatgcctagacggccatcttgtccccttcatctcgcaggaaagaaaggtaggctgcagccgggaggcctgcccacacccatgcaggctgaacatgtgtctcccagcctggtgctcagcttaaaattcaccaggatttag

SEQ ID NO: 222658 - DNA, 2474 bp, Artificial Sequence
  derived and/or modified sequence
cgctgcgggcgcagctccggtgcaagcgaggacacgacacatgcagtggcttctggactgcgcgatgactggacgcaagtaacttctaggtctgcagacaagaggaagagaagatgaaggaagactgtctgccgagttctcacgtgcccatcagtgacagcaagtccattcagaagtcggagctcttaggcctgctgaaaacctacaactgctaccatgagggcaagagcttccagctgagacaccgtgaggaagaagggactctgatcatcgaggggctcctcaacattgcctgggggctgaggcggcccatccggctgcagatgcaggatgaccgggagcaggtgcacctcccctccacctcatggatgcccagacggcctagctgccctctaaaggagccatcgccccagaacgggaacatcacagcccaggggccaagcattcagccagtgcacaaggctgagagttccacagacagctcggggcccctggaggaggcagaggaggccccccagctgatgcggaccaagagcgacgccagttgcatgagccagaggaggcccaagtgccgcgcccccggtgaggcccagcgcatccggcgacaccggttctctatcaacggccacttctacaatcataagacctccgtgtttactccagcctatggatccgtgaccaatgtgagggtcaacagcaccatgacaaccctgcaggtgctcaccctgctgctgaacaaatttagggtggaagatggccccagtgagttcgcactctacatcgttcacgagtctggggagcggacaaaattaaaagactgcgagtacccgctgatttccagaatcctgcatgggccatgtgagaagatcgccaggatcttcctgatggaagctgacttgggcgtggaagtcccccatgaagtcgctcagtacattaagtttgaaatgccggtgctggacagttttgttgaaaaattaaaagaagaggaagaaagagaaataatcaaactgaccatgaagttccaagccctgcgtctgacgatgctgcagcgcctggagcagctggtggaggccaagtaactggccaacacctgcctcttccaaagtccccagcagtggcaggtgtacactgagccctggttgctggccccggccggtcacattgactgatggccaccgcctgacgaatcgagtgcctgtgtgtctacctctctgaagcctgagcaccatgattcccacagccagctcttggctccaagatgagcacccacaggaagccgacccaggcctgaggggccaggaacttgctgggtcagatctgtgtggccagccctgtccacaccatgcctctcctgcactggagagcagtgctggcccagcccctgcggcttaggcttcatctgcttgcacattgcctgtcccagagcccctgtgggtccacaagcccctgtcctcttccttcatatgagattcttgtctgccctcatatcacgctgccccacaggaatgctgctgggaaaagcagggcctgccagcaggtatgagatctagcctgctttcagccatcaccttgccacagtgtccccggcttctaagcctccaatatcaccctgtgagcctcgcacagctcagccccaacacagaggtgagaccaggaataaggccacaagtatctcactttctctgcagaaatcaatctttacttcatcagagagacctaaagcgattcttacaaggagcttgctgcaagaaacacggtcattcaatcacattgaggagggtccacatggcattgagagggtgctgcccgctcaatgcccagcagcagctctggaaggcagtgctcagccccatcaccactgtcccgtggatgcctgtgtacctcttgccttttctgggcttgcgtttctctcctctagtgggtggggatgactttcaatgactttcaatacttcccctgaaggaagaatgataaggagaaatgtctgttttgaggaaagggctttgaattccccagatactgaacaatttgtgtttgtgactgatggagaatttcaggaatgaatgagaaagcctttgcgaaactatgcaacagtttacatcagtcatgtgaagtatttgtctaaaacagagcaaactgaagaccaaattattctcctgttgaggtccgtggatggcagatttaaagggaagaaccacaaaggcttgcaaagataggagaggctccatctctaatgcatgtagaagctccttacgggtgcccatcaagagcatagcttggaagccaccatgctgtgcggaactgcgtcagggcaaatgtcacagcaggatttccccaacccagctccatcatcacagacacagagagctgcaggggaggcctgcccactgttttgtcgactctgccctcctctggcagcatagatccttaggtgctcaataaaggtgtgctgtattgaactgaagaagtgagaa

SEQ ID NO: 222659 - DNA, 527 bp, Artificial Sequence
  derived and/or modified sequence
ctgaagcctggggtcagcaggcgctgcgggcgcagctccggtgcaagcgaggacacgacacatgcagtggcttctggactgcgcgatgactggacgcaagtaacttctaggtctgcagacaagaggaagagaagatgaaggaagactgtctgccgagttctcacgtgcccatcagtgacagcaagtccattcagaagtcggagctcttaggcctgctgaaaacctacaactgctaccatgagggcaagagcttccagctgagacaccgtgaggaagaagggactctgatcatcgaggggctcctcaacattgcctgggggctgaggcggcccatccggctgcagatgcaggatgaccgggagcaggtgcacctcccctccacctcatggatgcccagacggcctagctgccctctccaccttgctggcaagaagggacgactacagccaggggggctcccaacacctatgcaagccgaacatgtctcgccatctcttgttctatctttaaaattcacacgaatttag

SEQ ID NO: 222660 - DNA, 435 bp, Artificial Sequence
  derived and/or modified sequence
agttctcacgtgcccatcagtgacagcaagtccattcagaagtcggagctcttaggcctgctgaaaacctacaactgctaccatgagggcaagagcttccagctgagacaccgtgaggaagaagggactctgatcatcgaggggctcctcaacattgcctgggggctgaggcggcccatccggctgcagatgcaggatgaccgggagcaggtgcacctcccctccacctcatggatgcccagacggcctagctgccctctccaccttgctggcaagaagggacgactacagccaggggggctcccaacacctatgcaagccgaacatgtctcgccatctcttgttctatctttaaaattcacacgaatttagcctcttactactctgttttcattttaatgtcaaaattttaaaaataaatttatcagaatttca

SEQ ID NO: 222661 - protein, 198 aa, Artificial Sequence
  derived and/or modified sequence
MEKYLSLSGNHSSNKRSLEGLSAFRSLEELILDNNQLGDDLVLPGLPRLHTLTLNKNRITDLENLLDHLAEVTPALEYLSLLGNVACPNELVSLEKDEEDYKRYRCFVLYKLPNLKFLDAQKVTRQEREEALVRGVFMKVVKPKASSEDVASSPERHYTPLPSASRELTSHQGVLGKCRYVYYGKNSEGNRFIRDDQL

SEQ ID NO: 222662 - DNA, 899 bp, Artificial Sequence
  derived and/or modified sequence
gttgaagaaagaggatctggctgaaagacccgcaactttcacttgttgagaacctttagccagcgccggcgtgcatgtgttttagttttattctttttcccttgcccccaaagccgtggagtacctgctgttgctctcatgcctcttgccaacagtggcatctgctcagtgtagccatcaagaatttgaatgtcaatatctttgccttgaaatgaatggaaaagtatttgtcactcagcggcaatcattcttcaaataaaaggtcactggaaggactgagcgcattcaggagcctggaggaactcatcttggacaacaatcagctgggggacgaccttgtgttgccagggttacccagactgcataccttaaccctcaacaagaaccgaatcactgatttggagaacctgctggatcacttggcagaagtgacaccagctctggagtacctcagtctgctgggcaacgtggcctgtcccaacgagctggtcagcttggaaaaggatgaggaagactacaagagatacagatgctttgttctgtacaagctgcccaacttgaaatttctggatgcccagaaagtaaccagacaagaacgagaggaggcgttggtcagaggagtcttcatgaaggtggtgaagcccaaggcttctagtgaggacgttgccagctccccggagcgccactacacgcccttgccttctgcttccagggaactcaccagtcaccaaggtgtcctggggaagtgtcgctacgtttactatgggaaaaactcagagggcaacaggtttatccgagatgaccagctctgaagccaacttctgtataccttcacccatttcatgaaaataaaatcaaaagggaaatcaaaaataaagaaaacgctaaagaaaaaacaa

SEQ ID NO: 222663 - DNA, 597 bp, Artificial Sequence
  derived and/or modified sequence
atggagaagtacctgagcctgagcggcaaccacagcagcaacaagagaagcctggagggcctgagcgccttcagaagcctggaggagctgatcctggacaacaaccagctgggcgacgacctggtgctgcccggcctgcccagactgcacaccctgaccctgaacaagaacagaatcaccgacctggagaacctgctggaccacctggccgaggtgacccccgccctggagtacctgagcctgctgggcaacgtggcctgccccaacgagctggtgagcctggagaaggacgaggaggactacaagagatacagatgcttcgtgctgtacaagctgcccaacctgaagttcctggacgcccagaaggtgaccagacaggagagagaggaggccctggtgagaggcgtgttcatgaaggtggtgaagcccaaggccagcagcgaggacgtggccagcagccccgagagacactacacccccctgcccagcgccagcagagagctgaccagccaccagggcgtgctgggcaagtgcagatacgtgtactacggcaagaacagcgagggcaacagattcatcagagacgaccagctgtag

SEQ ID NO: 222664 - DNA, 597 bp, Artificial Sequence
  derived and/or modified sequence
atggagaaatacctgtcactaagcggcaaccatagcagtaacaagagatctctggagggcctaagtgcgttccgttctctcgaggaactcatcctggacaataaccagttgggcgacgatctggtccttcctgggctcccgaggctgcacactctaaccctgaacaaaaatcggatcaccgacttggagaatctgctggatcatctcgccgaagtgactcctgcgctcgaatacctctcactgctgggcaacgtggcatgtcctaacgagttggtttccttggagaaggacgaggaggattataaacggtatcgatgttttgtcctgtacaaactccctaatttgaaattcctagacgcccagaaggtgaccaggcaggagcgagaagaagccctggtgagaggggtgttcatgaaggtggttaaaccaaaagcatcttcagaggacgtggctagttctccagaacgtcactatacccctcttccatccgcctcgagagaactcacttcccaccagggagtgctaggcaaatgtaggtacgtgtattatggtaagaattccgagggaaataggttcatccgtgacgatcagctctag

SEQ ID NO: 222665 - DNA, 597 bp, Artificial Sequence
  derived and/or modified sequence
atggagaagtacctgagcctgagcggcaaccacagcagcaacaagaggagcctggagggcctgagcgccttccgcagcctggaggagctgatcctggacaacaaccagctgggagatgacctggtgctgcccggcctgccccggctgcacaccctgaccctgaacaagaaccgcatcacagacctggagaacctgctggaccacctggccgaggtgaccccagccctggagtacctgagcctgctgggcaatgtggcctgccccaatgagctggtgtccctggagaaggatgaggaggactacaagcgctaccgctgctttgtgctgtacaagctgcccaacctgaagttcctggatgcccagaaggtgacccggcaggagcgggaggaggccctggtgcggggcgtcttcatgaaggtggtgaagcccaaggccagcagtgaagatgtggccagcagccctgagcggcactacacccccctgcccagcgccagccgggagctgaccagccaccagggcgtgctgggcaaatgtcgctacgtgtactacggcaagaacagcgagggcaaccgcttcatcagagatgaccagctgtag

SEQ ID NO: 222666 - DNA, 597 bp, Artificial Sequence
  derived and/or modified sequence
atggagaagtacctgagcctgagcggcaaccacagcagcaacaagcgtagtctcgaagggttgtctgctttcagatctctcgaagaactaattttggataataaccaattgggtgatgacctggttctgccaggactaccccggctgcatacgctgactctgaacaagaatagaatcactgatctggaaaacctacttgatcacctcgccgaagtgacccccgccctggagtacctgagcctattggggaacgtggcctgccccaatgaattggtctcactggagaaggacgaggaagactataagcgatatcgctgttttgtactttataaactgcccaaccttaagttccttgatgcccagaaggtcaccaggcaggagcgggaagaggcccttgtccggggagtgttcatgaaggtcgtgaagccgaaggcaagcagcgaagatgtggcctcttctccggaaaggcattacaccccactaccaagcgcatctcgagaactgacgagccaccaaggcgttctaggcaagtgtcggtatgtgtattatgggaaaaacagtgaaggaaatcgctttatcagggatgatcagctctag

SEQ ID NO: 222667 - DNA, 597 bp, Artificial Sequence
  derived and/or modified sequence
atggagaaatacttaagcctcagcggaaatcacagttccaacaagaggtccctggagggattgtctgcatttagatctcttgaagaacttatcctagataacaaccagctgggagatgaccttgttctgccaggtctgcctcgattacacacgctgaccttgaataagaaccgtatcaccgacctagagaacctgctcgaccaccttgcggaagtgacccccgctctcgaatacttgtctttgctgggcaacgtcgcttgtcctaatgaactagtgtccttagagaaggacgaagaggactacaagagatatagatgcttcgttctgtacaagctgcccaacctgaagtttctggacgcccagaaggtcacccggcaggagcgcgaagaggcgcttgtgagaggcgtgtttatgaaggtggtgaagccgaaggcctcctccgaagacgtggcctcatcacccgaacgtcactacactcctctgccatccgcatctagagaactgacttcacatcaaggggtgctggggaagtgtagatacgtttattatgggaaaaattctgagggcaatcgtttcattcgagatgatcagctgtag

SEQ ID NO: 222668 - protein, 585 aa, Artificial Sequence
  derived and/or modified sequence
MAPSTPLLTVRGSEGLYMVNGPPHFTESTVFPRESGKNCKVCIFSKDGTLFAWGNGEKVNIISVTNKGLLHSFDLLKAVCLEFSPKNTVLATWQPYTTSKDGTAGIPNLQLYDVKTGTCLKSFIQKKMQNWCPSWSEDETLCARNVNNEVHFFENNNFNTIANKLHLQKINDFVLSPGPQPYKVAVYVPGSKGAPSFVRLYQYPNFAGPHAALANKSFFKADKVTMLWNKKATAVLVIASTDVDKTGASYYGEQTLHYIATNGESAVVQLPKNGPIYDVVWNSSSTEFCAVYGFMPAKATIFNLKCDPVFDFGTGPRNAAYYSPHGHILVLAGFGNLRGQMEVWDVKNYKLISKPVASDSTYFAWCPDGEHILTATCAPRLRVNNGYKIWHYTGSILHKYDVPSNAELWQVSWQPFLDGIFPAKTITYQAVPSEVPNEEPKVATAYRPPALRNKPITNSKLHEEEPPQNMKPQSGNDKPLSKTALKNQRKHEAKKAAKQEARSDKSPDLAPTPAPQSTPRNTVSQSISGDPEIDKKIKNLKKKLKAIEQLKEQAATGKQLEKNQLEKIQKETALLQELEDLELGI

SEQ ID NO: 222669 - DNA, 2198 bp, Artificial Sequence
  derived and/or modified sequence
gatggctccggaaacaccaattcgctgtctccacgcatgaggagacgtgtaggggccgggttcggccctggtgaactctcacccgagcggtttctctttccgggacaacatggcgccgtccacgccgctcttgacagtccgaggatcagaaggactgtacatggtgaatggaccaccacattttacagaaagcacagtgtttccaagggaatctgggaagaattgcaaagtctgtatctttagtaaggatgggaccttgtttgcctggggcaatggagaaaaagtaaatattatcagtgtcactaacaagggactactgcactccttcgacctcctgaaggcagtttgccttgaattctcacccaaaaatactgtcctggcaacgtggcagccttacactacttctaaagatggcacagctgggatacccaacctacaactttatgatgtgaaaactgggacatgtttgaaatctttcatccagaaaaaaatgcaaaattggtgtccatcctggtcagaagatgaaactctttgtgcccgcaatgttaacaatgaagttcacttctttgaaaacaacaattttaacacaattgcaaataaattgcatttgcaaaaaattaatgattttgtattatcacctggaccccaaccatacaaggtggctgtctatgttccaggaagtaaaggtgcaccttcatttgttagattatatcagtaccccaactttgctggacctcatgcagctttagctaataaaagtttctttaaggcagataaagttacaatgctgtggaataaaaaagctactgctgtgttggtaatagctagcacagatgttgacaagacaggagcttcctactatggagaacaaactctacactacattgcaacaaatggagaaagtgctgtagtgcaattaccaaaaaatggccccatttatgatgtagtttggaattctagttctactgagttttgtgctgtatatggttttatgcctgccaaagcgacaattttcaacttgaaatgtgatcctgtatttgactttggaactggtcctcgtaatgcagcctactatagccctcatggacatatattagtattagctggatttggaaatctgaggggacaaatggaagtgtgggatgtgaaaaactacaaacttatttctaaaccggtggcttctgattctacatattttgcttggtgcccggatggtgagcatattttaacagctacatgtgctcccaggttacgggttaataatggatacaaaatttggcattatactggctctatcttgcacaagtatgatgtgccatcaaatgcagaattatggcaggtttcttggcagccatttttggatggaatatttccagcaaaaacaataacttaccaagcagttccaagtgaagtacccaatgaggaacctaaagttgcaacagcttatagacccccagctttaagaaataaaccaatcaccaattccaaattgcatgaagaggaaccacctcagaatatgaaaccacaatcaggaaacgataagccattatcaaaaacagctcttaaaaatcaaaggaagcatgaagctaagaaagctgcaaagcaggaagcaagaagtgacaagagtccagatttggcacctactcctgccccacagagcacaccacgaaacactgtctctcagtcaatttctggggaccctgagatagacaaaaaaatcaagaacctaaagaagaaactgaaagcaatcgaacaactgaaagaacaagcagcaactggaaaacagctagaaaaaaatcagttggagaaaattcagaaagaaacagcccttctccaggagctggaagatttggaattgggtatttaaagattcacggaaagcaagttgatgaccagaaatcagtgcaaacacatcttctgttaaacccattggtatacacagaatattcctgtgcccacacttaatgtcaatctataattttaaccatttatccaagattctactaagtgtaaaattatttaataatgtctattaaattgatatttatatcttgcatcctatatcatgtcaatatgtgatatagaaaagagatacgtgaattttttagctaagcttgacagattgaaagacaagtgtcatttttttttgtagagggtgatatataccatgtaaatgaacaaagacattttaaatttaa

SEQ ID NO: 222670 - DNA, 1758 bp, Artificial Sequence
  derived and/or modified sequence
atggcaccatccaccccactgcttactgtacgggggtcagaaggactatacatggtgaatggacccccacatttcacagaatcaaccgtgtttccccgtgaatctggcaagaattgcaaagtatgtatattttctaaggatggcacactcttcgcatgggggaacggagaaaaggtgaatataatctccgtgaccaataaggggttattacacagttttgatctattaaaagctgtgtgtctggaattttccccgaagaacacagttttggcgacatggcagccatatacgacaagcaaggacggtacagccggtatccctaacctccaactgtacgacgtcaagacgggaacgtgtctgaaaagttttatacagaagaagatgcaaaattggtgtccgagctggtccgaggatgaaaccctgtgcgctcgcaacgtcaacaacgaagtgcacttttttgagaataataattttaacaccatcgcaaacaaactgcacttacaaaagattaatgacttcgtgttgtccccaggtccgcagccatataaagtggccgtctacgtgcctggaagcaagggtgcgccgtcattcgtgaggctttatcagtatcccaactttgccgggccccacgccgcacttgcaaacaagtctttctttaaagctgacaaagtaacaatgttgtggaacaagaaggctaccgctgtgctcgtgattgccagcacagatgtggataagactggcgcaagctactacggggaacagactctccactatatcgccacgaatggagaaagcgctgtggtgcagttgccaaagaacggccccatttacgacgtggtgtggaattctagcagcactgaattttgcgctgtgtatggatttatgccagccaaggccacaatctttaacctgaaatgcgatcccgtgtttgacttcgggactggccccaggaatgccgcctactatagccctcacggccatatcctggtgctggctggcttcggtaatctgagaggacagatggaggtgtgggatgtgaagaactataagcttatcagcaagcctgtggccagcgattcaacatattttgcatggtgtcccgacggagaacatatcctcaccgcaacctgcgcccctcgcctgagagtaaacaatggctacaagatatggcactacacgggcagtatcctccataagtatgacgtcccaagcaacgcggagctatggcaagtgtcgtggcaaccattcctggatgggatctttcccgccaaaactatcacttaccaggccgtcccatctgaggtgcccaatgaggaaccgaaggtagccaccgcctacaggcctcctgccctgcgcaataaaccaataacgaattctaagttgcacgaggaagagcccccccagaatatgaagccacagtctgggaacgacaagcctctgtcaaagacggccctcaagaaccagcgaaaacatgaagctaagaaggctgccaaacaggaggcacgtagtgataagtcacctgacttagcccccacacctgctccacagtccacccccaggaataccgtgagtcagtccatctcaggcgatcccgagattgacaagaagattaagaacctgaagaagaaactgaaggctatcgagcagctgaaggaacaagcagcaaccggcaaacagctagaaaagaatcagctggagaaaatccagaaggaaacggcactattgcaagaacttgaggatttagaactgggtatttag

SEQ ID NO: 222671 - DNA, 1758 bp, Artificial Sequence
  derived and/or modified sequence
atggcccccagcacccccctgctgactgtgcggggcagcgagggcctgtacatggtgaatggccccccccacttcacagagagcacagtgttcccccgggagagcggcaagaactgcaaggtgtgcatcttcagcaaggatggcaccctgtttgcctggggcaatggagagaaggtgaacatcatctctgtgaccaacaagggcctgctgcacagctttgacctgctgaaggctgtgtgcctggagttcagccccaagaacacagtgctggccacctggcagccctacaccaccagcaaggatggaacagctggcatccccaacctgcagctgtatgatgtgaagacaggcacctgcctgaagagcttcatccagaagaagatgcagaactggtgccccagctggagcgaagatgagaccctgtgtgccagaaatgtgaacaatgaggtgcacttctttgagaacaacaacttcaacaccatcgccaacaagctgcacctgcagaagatcaatgactttgtgctgagccctggcccccagccctacaaggtggccgtgtatgtgcccggcagcaagggggcccccagctttgtgcggctgtaccagtaccccaactttgctggcccccatgctgccctggccaacaagagcttcttcaaggctgacaaggtgaccatgctgtggaacaagaaggccacagctgtgctggtgattgccagcacagatgtggacaagacaggagccagctactatggagagcagaccctgcactacatcgccaccaacggggagagcgctgtggtgcagctgcccaagaatggccccatctatgatgtggtgtggaacagcagcagcacagagttctgtgctgtgtatggcttcatgcctgccaaggccaccatcttcaacctgaagtgtgaccctgtgtttgattttggcaccggccccagaaatgctgcctactacagcccccacggccacatcctggtgctggccggcttcggcaacctgcggggccagatggaggtgtgggatgtgaagaactacaagctgatcagcaagcctgtggccagtgacagcacctactttgcctggtgcccagatggagagcacatcctgacagccacctgtgccccccggctgcgggtgaacaacggctacaagatctggcactacacaggcagcatcctgcacaagtatgatgtgcccagcaatgctgagctgtggcaggtgtcctggcagcccttcctggatggcatcttccctgccaagaccatcacctaccaggccgtgcccagcgaggtgcccaatgaggagcccaaggtggccacagcctaccggcccccagccctgaggaacaagcccatcaccaacagcaagctgcacgaggaggagcccccccagaacatgaagccccagagcggaaatgacaagcccctgagcaagacagccctgaagaaccagaggaagcatgaggccaagaaggccgccaagcaggaggcccggagtgacaagagcccagacctggcccccaccccagccccccagagcacccccaggaacacagtgtcccagagcatcagcggggaccctgagattgacaagaagatcaagaacctgaagaagaagctgaaggccatcgagcagctgaaggagcaggccgccaccgggaagcagctggagaagaaccagctggagaagatccagaaggagacagccctgctgcaggagctggaggacctggagctgggcatctag

SEQ ID NO: 222672 - DNA, 1758 bp, Artificial Sequence
  derived and/or modified sequence
atggcccccagcacccccctgctgaccgtgcggggcagcgagggcctgtatatggtgaatggtcctcctcattttactgagagtaccgtcttccctcgcgagtctgggaaaaattgtaaagtatgcatcttctctaaggacggcaccttgttcgcttgggggaatggagagaaggtgaatatcatctcagtgacaaataaggggctattgcactcgttcgaccttctcaaggctgtgtgcctagaattttcaccgaagaataccgtcctggccacttggcagccgtacaccacatctaaagacgggaccgccggaatccctaacctccagttatacgatgtgaaaaccgggacctgcctaaaatcctttatccagaagaaaatgcagaactggtgccctagctggtctgaagatgagacactctgtgctagaaacgtcaataacgaagtccacttctttgaaaataacaactttaatacgatcgcaaacaagttgcacctgcagaagataaatgatttcgtgcttagccctggcccccagccttataaggtggccgtctatgtacccggctcaaagggagccccttctttcgttcggttgtatcagtacccaaatttcgcaggcccccacgcggcgctagccaataaaagtttctttaaggctgataaggtgaccatgctgtggaacaagaaggctaccgcagtgctggtgattgcttccacggacgtggataaaacgggggcctcctactatggagaacaaacacttcattacatcgccacgaacggtgagagtgctgttgtccaactgccaaagaatggcccaatctacgacgtggtgtggaatagcagctctaccgaattctgcgctgtatatggctttatgccagctaaggcaacaatatttaacctgaagtgtgacccagtgttcgatttcgggacaggacccagaaacgctgcctactactccccccacggtcatattctagtcctcgccggttttggcaacctgaggggccagatggaggtttgggatgtgaaaaattacaaattgatatccaaaccagtggcatccgacagtacatacttcgcttggtgtcccgacggcgagcacatcctgactgctacttgcgcgcctcgcctacgagtgaacaacggttataagatctggcattatacaggatcaattcttcataagtacgacgtgcccagcaatgccgaactgtggcaggtgagctggcagccttttttagatgggattttcccagcaaagaccattacctatcaagcagtgccgagcgaggtacccaatgaggagcccaaagtcgctactgcatacagacctcccgctctgcgaaacaaaccgataaccaacagcaagctccacgaggaagaaccaccgcaaaatatgaaacctcagagtggcaatgacaaaccactctccaaaacggctctcaaaaatcaaaggaaacatgaggccaagaaggcagccaaacaggaagcaaggtcagacaagagtccagacttagctccaacgccagccccccagagtacgccccggaatactgtgagtcagagtatctcaggtgaccctgaaatcgataaaaagatcaaaaatttgaagaagaagctgaaagcaattgagcagctgaaggagcaagcagcaaccggcaaacagcttgagaaaaaccaattggaaaagatccagaaggaaacggctctgctgcaagagctagaggaccttgaactgggcatttag

SEQ ID NO: 222673 - DNA, 1758 bp, Artificial Sequence
  derived and/or modified sequence
atggccccttcaactccactgctgacggtcaggggatccgagggactgtacatggttaacggtccacctcatttcacggaaagcacagtgtttccaagggaaagtggtaagaactgcaaagtgtgcattttttctaaagacggaaccctatttgcctggggcaacggtgagaaagtgaatattatctccgttacgaataagggtcttctgcacagtttcgaccttctgaaggccgtttgcctggaattttcccctaaaaacaccgttctggccacttggcagccatacacgacctcaaaggatggcacagcaggtatccccaatctccagctgtatgatgtgaaaaccggcacctgtttaaagagcttcatccagaagaagatgcagaactggtgccctagctggtctgaggacgaaacattgtgtgccaggaatgtgaataacgaggtgcatttcttcgagaacaacaatttcaataccatcgcaaacaagttgcatttgcaaaaaattaatgattttgttctatcccctgggcctcagccttataaagtcgccgtttacgtgccagggtctaaaggagcaccatcatttgtccgcctgtaccagtaccctaacttcgctggcccacatgccgctttagcaaataagtccttctttaaagccgacaaagtcacaatgctgtggaacaaaaaggcgacagcagtactagttatagccagcaccgatgtggataaaactggagctagctactatggcgaacagaccctacactacatcgcgaccaacggtgagtcagctgtggtgcagctgcctaagaatggccctatttacgacgtggtgtggaatagcagcagcaccgagttctgtgcggtttacggttttatgcccgctaaagccaccatcttcaacctgaagtgcgatccagtgtttgacttcggcactggaccacgcaacgccgcatactacagcccgcacgggcacatcttggtcttggctggctttggcaacctccgtggccaaatggaagtttgggatgttaaaaattataaactgatcagcaaacccgttgcatccgatagtacctactttgcatggtgtccagacggtgaacatatcctgactgccacctgcgcacctcggcttagagttaataacggctacaaaatctggcattataccgggagtatcctgcataaatatgacgtgccaagcaacgcagaactttggcaggtgtcctggcagccatttctggatggcatctttccagccaagacaatcacgtaccaggctgtacctagcgaagttcccaatgaggagccaaaagtcgctacggcttatcgccctccagccctccggaacaagcctattaccaattctaagctgcatgaggaggagccgccacaaaacatgaaaccacagagcggcaatgataaacctttgagcaagaccgctttaaaaaaccagagaaagcacgaagctaaaaaggccgctaaacaggaggcgagaagcgacaagagccctgacctggctccaacccccgcaccgcaaagcactcctcgcaataccgtttcccagtccatatccggcgatcccgagatagacaagaagatcaagaatctgaaaaaaaaactgaaggctattgaacagttgaaggagcaggctgccaccggaaaacagttggagaagaaccagcttgaaaaaatccagaaggaaaccgccttgctgcaagaattggaagatctcgaacttggaatatag

SEQ ID NO: 222674 - DNA, 1758 bp, Artificial Sequence
  derived and/or modified sequence
atggcccccagcacccccctgctgaccgtgagaggcagcgagggcctgtacatggtgaacggccccccccacttcaccgagagcaccgtgttccccagagagagcggcaagaactgcaaggtgtgcatcttcagcaaggacggcaccctgttcgcctggggcaacggcgagaaggtgaacatcatcagcgtgaccaacaagggcctgctgcacagcttcgacctgctgaaggccgtgtgcctggagttcagccccaagaacaccgtgctggccacctggcagccctacaccaccagcaaggacggcaccgccggcatccccaacctgcagctgtacgacgtgaagaccggcacctgcctgaagagcttcatccagaagaagatgcagaactggtgccccagctggagcgaggacgagaccctgtgcgccagaaacgtgaacaacgaggtgcacttcttcgagaacaacaacttcaacaccatcgccaacaagctgcacctgcagaagatcaacgacttcgtgctgagccccggcccccagccctacaaggtggccgtgtacgtgcccggcagcaagggcgcccccagcttcgtgagactgtaccagtaccccaacttcgccggcccccacgccgccctggccaacaagagcttcttcaaggccgacaaggtgaccatgctgtggaacaagaaggccaccgccgtgctggtgatcgccagcaccgacgtggacaagaccggcgccagctactacggcgagcagaccctgcactacatcgccaccaacggcgagagcgccgtggtgcagctgcccaagaacggccccatctacgacgtggtgtggaacagcagcagcaccgagttctgcgccgtgtacggcttcatgcccgccaaggccaccatcttcaacctgaagtgcgaccccgtgttcgacttcggcaccggccccagaaacgccgcctactacagcccccacggccacatcctggtgctggccggcttcggcaacctgagaggccagatggaggtgtgggacgtgaagaactacaagctgatcagcaagcccgtggccagcgacagcacctacttcgcctggtgccccgacggcgagcacatcctgaccgccacctgcgcccccagactgagagtgaacaacggctacaagatctggcactacaccggcagcatcctgcacaagtacgacgtgcccagcaacgccgagctgtggcaggtgagctggcagcccttcctggacggcatcttccccgccaagaccatcacctaccaggccgtgcccagcgaggtgcccaacgaggagcccaaggtggccaccgcctacagaccccccgccctgagaaacaagcccatcaccaacagcaagctgcacgaggaggagcccccccagaacatgaagccccagagcggcaacgacaagcccctgagcaagaccgccctgaagaaccagagaaagcacgaggccaagaaggccgccaagcaggaggccagaagcgacaagagccccgacctggcccccacccccgccccccagagcacccccagaaacaccgtgagccagagcatcagcggcgaccccgagatcgacaagaagatcaagaacctgaagaagaagctgaaggccatcgagcagctgaaggagcaggccgccaccggcaagcagctggagaagaaccagctggagaagatccagaaggagaccgccctgctgcaggagctggaggacctggagctgggcatctag

SEQ ID NO: 222675 - protein, 297 aa, Artificial Sequence
  derived and/or modified sequence
MSRFKFIDIGINLTDPMFRGIYRGVQKHQDDLQDVIGRAVEIGVKKFMITGGNLQDSKDALHLAQTNGMFFSTVGCHPTRCGEFEKNNPDLYLKELLNLAENNKGKVVAIGECGLDFDRLQFCPKDTQLKYFEKQFELSEQTKLPMFLHCRNSHAEFLDIMKRNRDRCVGGVVHSFDGTKEAAAALIDLDLYIGFNGCSLKTEANLEVLKSIPSEKLMIETDAPWCGVKSTHAGSKYIRTAFPTKKKWESGHCLKDRNEPCHIIQILEIMSAVRDEDPLELANTLYNNTIKVFFPGI

SEQ ID NO: 222676 - protein, 250 aa, Artificial Sequence
  derived and/or modified sequence
MITGGNLQDSKDALHLAQTNGMFFSTVGCHPTRCGEFEKNNPDLYLKELLNLAENNKGKVVAIGECGLDFDRLQFCPKDTQLKYFEKQFELSEQTKLPMFLHCRNSHAEFLDIMKRNRDRCVGGVVHSFDGTKEAAAALIDLDLYIGFNGCSLKTEANLEVLKSIPSEKLMIETDAPWCGVKSTHAGSKYIRTAFPTKKKWESGHCLKDRNEPCHIIQILEIMSAVRDEDPLELANTLYNNTIKVFFPGI

SEQ ID NO: 222677 - DNA, 894 bp, Artificial Sequence
  derived and/or modified sequence
atgtcgaggtttaaattcatagacatcggaatcaacctgaccgatcctatgttccgcgggatctacagaggtgtgcagaaacatcaggacgacttgcaggacgtaattggaagagccgtggagataggcgtgaagaagtttatgatcaccggaggtaacctgcaggacagtaaggacgctctgcacctcgcgcagactaacgggatgtttttctctaccgtgggatgtcacccgactcgttgcggagagtttgagaagaacaacccagatctgtacctaaaagagcttctgaacctggccgaaaacaataaggggaaggtggtggctatcggggaatgcggactcgacttcgataggcttcagttttgtcctaaggatacacaacttaagtactttgaaaaacagtttgaactctccgaacagacaaaattacccatgtttctgcactgtaggaattctcatgctgaattccttgatataatgaagaggaaccgcgaccgatgcgttgggggcgtggtccactcattcgatgggaccaaggaagcggccgctgccctcatcgacctggatctctacataggttttaacggatgctctttgaaaaccgaagctaacctggaggttctaaagtctataccgtccgagaaactgatgatcgagaccgacgccccttggtgcggggtaaagtccacgcacgccggatcgaagtatatcagaacagcctttcctaccaaaaagaagtgggagtcagggcactgcttgaaggacagaaacgaaccctgccatataatacaaatcctggagatcatgtcggcagttcgagacgaagatccactggagctggccaacacattgtataataatacaatcaaggtcttcttccctggcatttag

SEQ ID NO: 222678 - DNA, 894 bp, Artificial Sequence
  derived and/or modified sequence
atgagccgcttcaagttcattgatattggcatcaacctgacagaccccatgttccggggcatctaccggggcgtgcagaagcaccaggatgacctgcaggacgtcatcggccgggctgtggagattggagtgaagaagttcatgatcaccggcggcaacctgcaggacagcaaggatgccctgcacctggcccagaccaacggcatgttcttcagcacagtgggctgccaccccacccgctgtggggagtttgagaagaacaacccagacctgtacctgaaggagctgctgaacctggccgagaacaacaagggcaaggtggtggccatcggggagtgtggcctggactttgaccggctgcagttctgccccaaggacacccagctgaagtactttgagaagcagtttgagctgtctgagcagaccaagctgcccatgttcctgcactgcaggaacagccatgctgagttcctggacatcatgaagaggaacagagacagatgtgtgggcggcgtggtgcacagctttgatggcaccaaggaggccgccgccgccctgattgacctggacctgtacatcggcttcaacggctgcagcctgaagacagaggccaacctggaggtgctgaagagcatccccagcgagaagctgatgattgaaacagatgccccctggtgtggggtgaagagcacccatgctggcagcaagtacatcagaacagccttccccaccaagaagaagtgggagagcggccactgcctgaaggacagaaatgagccctgccacatcatccagatcctggagatcatgtctgctgtgagagatgaggaccccctggagctggccaacaccctgtacaacaacaccatcaaggtgttcttccctggcatctag

SEQ ID NO: 222679 - DNA, 894 bp, Artificial Sequence
  derived and/or modified sequence
atgagccggttcaagttcatcgacatcggcatcaacctgaccgaccctatgtttagaggcatttacagaggcgtccaaaaacatcaggacgacctccaggacgtcatcggtcgggcagtggagatcggagtgaaaaaatttatgattacgggtggcaacctgcaggactccaaagacgccttacatcttgcacaaacaaatggcatgttcttctccacagttggctgccatcccacaaggtgtggcgagtttgaaaaaaataatcccgatctctatttaaaagagcttctgaacctggctgaaaataataaggggaaagtcgtggccatcggagagtgtgggctggattttgaccggctgcagttctgccccaaagacacccagctgaaatatttcgagaaacaattcgagctctcagagcagaccaagctgcccatgtttctccactgcagaaacagtcatgccgagttcctggacattatgaagagaaacagagacagatgcgtgggaggagtcgtgcatagttttgacggtacaaaggaggccgcggccgcactgatcgatttggatctgtacatcggattcaacggttgtagcctgaagactgaagccaacctcgaagtccttaagtccatcccctcagagaagctaatgatcgagaccgatgccccatggtgcggagtaaaatctacgcatgcaggttccaaatatatccgaaccgcatttccaacaaagaagaaatgggaatcaggccactgcctgaaagataggaacgagccgtgtcacatcatacaaattctggagattatgtctgctgttagggacgaggaccccttagagctggctaacactctgtacaataataccatcaaggttttcttccctggcatttag

SEQ ID NO: 222680 - DNA, 1018 bp, Artificial Sequence
  derived and/or modified sequence
acttccgcttccgctggggaggtcctccatgcgcagtcatgagtcgcttcaagtttatcgatattggtatcaacttgactgaccctatgttcagaggaatttataggggggttcaaaagcatcaagatgacttacaggatgtaatagggagagctgtcgagattggtgttaaaaagtttatgattacaggtggaaatctacaagacagtaaagatgcactgcatttggcacaaacaaatggtatgtttttcagtacagttggatgtcatcctacaagatgtggtgaatttgaaaagaataaccctgatctttacttaaaggagttgctaaatcttgctgaaaacaataaagggaaagttgtggcaataggagaatgcggacttgattttgaccgactgcagttttgtcccaaagatactcaactcaaatattttgaaaaacagtttgaactgtcagaacaaacaaaattaccaatgtttcttcattgtcgaaactcacatgctgaatttttggacataatgaaaagaaatagagatcggtgtgtagggggagtggtgcattcatttgatggtaccaaggaagcagcagctgctttgattgacttggatctttatataggatttaatggttgctcactgaaaactgaagctaatttggaagttttgaagtcaattcctagtgaaaaattaatgattgagacagatgcaccttggtgtggagtcaaaagtacacatgctggatcaaaatatataagaactgcatttcctaccaaaaagaagtgggaaagtgggcactgcttaaaagacagaaatgaaccctgccatataattcaaatattggagataatgtcagcagtgagagatgaggatccactggaattagccaatacactatataacaatactattaaagtattttttcctggaatataattggtatatgtcttccactttccatcatgtatgtaaaatttcatagtaaaacttcctgatagtttcaataaagaaattatctgcaa

SEQ ID NO: 222681 - DNA, 889 bp, Artificial Sequence
  derived and/or modified sequence
ttccgctggggaggtcctccatgcgcagtcatgagtcgcttcaagtttatcgtttatgattacaggtggaaatctacaagacagtaaagatgcactgcatttggcacaaacaaatggtatgtttttcagtacagttggatgtcatcctacaagatgtggtgaatttgaaaagaataaccctgatctttacttaaaggagttgctaaatcttgctgaaaacaataaagggaaagttgtggcaataggagaatgcggacttgattttgaccgactgcagttttgtcccaaagatactcaactcaaatattttgaaaaacagtttgaactgtcagaacaaacaaaattaccaatgtttcttcattgtcgaaactcacatgctgaatttttggacataatgaaaagaaatagagatcggtgtgtagggggagtggtgcattcatttgatggtaccaaggaagcagcagctgctttgattgacttggatctttatataggatttaatggttgctcactgaaaactgaagctaatttggaagttttgaagtcaattcctagtgaaaaattaatgattgagacagatgcaccttggtgtggagtcaaaagtacacatgctggatcaaaatatataagaactgcatttcctaccaaaaagaagtgggaaagtgggcactgcttaaaagacagaaatgaaccctgccatataattcaaatattggagataatgtcagcagtgagagatgaggatccactggaattagccaatacactatataacaatactattaaagtattttttcctggaatataattggtatatgtcttccactttccatcatgtatgtaaaatttcatagtaaaacttcctgatagtttcaataaagaaattatc

SEQ ID NO: 222682 - DNA, 591 bp, Artificial Sequence
  derived and/or modified sequence
atgcgcagtcatgagtcgcttcaagtttatcgatcataggtgacagtgatgtgacacgattcagtgagcccaataactgaggcttcaacttaagagttgtggttttctcctggttacaaacagtgccgttttctactcttactttgttttgaaaacgaaaagtcaatatttgaagaactcttaaataataaaatattggtatcaacttgactgaccctatgttcagaggaatttataggggggttcaaaagcatcaagtttatgattacaggtggaaatctacaagacagtaaagatgcactgcatttggcacaaacaaatggtatgtttttcagtacagttggatgtcatcctacaagatgtggtgaatttgaaaagaataaccctgatctttacttaaaggagttgctaaatcttgctgaaaacaataaagggaaagttgtggcaataggagaatgcggacttgattttgaccgactgcagttttgtcccaaagatactcaactcaaatattttgaaaaacagtttgaactgtcagaacaaacaaaattaccaatgtttcttcattgtcgaaactcacatgctgaattt

SEQ ID NO: 222683 - DNA, 894 bp, Artificial Sequence
  derived and/or modified sequence
atgagcaggttcaagttcattgacataggcatcaatctgaccgacccaatgtttcgcggtatttaccgtggcgtgcagaaacaccaggacgacctgcaagacgtgatcgggcgtgcggtcgaaatcggggtgaagaaatttatgatcaccgggggtaatctgcaggacagcaaggacgcactgcacctagcccaaactaacggcatgttctttagcaccgttggatgccatcccactcggtgtggtgagtttgagaaaaacaatccggatctgtatctgaaagagcttctaaatttggcagagaacaataaggggaaagtcgtagcaattggagagtgtgggctggattttgacagactacagttctgtcctaaggacacccagctgaagtatttcgagaaacagtttgagctttccgagcagacaaagctgcccatgttcctgcattgtcgtaacagccacgctgagtttctggatattatgaagaggaacagagaccgatgcgtgggcggtgtagtacactcatttgacggcactaaagaagctgccgcagccctcatcgatctagacctgtatattgggttcaacggatgctccctgaaaactgaggccaacctggaggtattgaagtcaattccaagtgagaagctgatgatcgagaccgacgctccatggtgcggcgttaagtcgacacacgcagggtctaagtatatcaggactgcttttccaaccaagaaaaagtgggagagcggtcactgcttaaaagacagaaatgagccctgccatattattcagatcctggagatcatgagcgctgtacgggacgaggacccccttgaactcgcaaacacactctataacaataccataaaggtgtttttccctggaatctag

SEQ ID NO: 222684 - DNA, 894 bp, Artificial Sequence
  derived and/or modified sequence
atgagcagattcaagttcatcgacatcggcatcaacctgaccgaccccatgttcagaggcatctacagaggcgtgcagaagcaccaggacgacctgcaggacgtgatcggcagagccgtggagatcggcgtgaagaagttcatgatcaccggcggcaacctgcaggacagcaaggacgccctgcacctggcccagaccaacggcatgttcttcagcaccgtgggctgccaccccaccagatgcggcgagttcgagaagaacaaccccgacctgtacctgaaggagctgctgaacctggccgagaacaacaagggcaaggtggtggccatcggcgagtgcggcctggacttcgacagactgcagttctgccccaaggacacccagctgaagtacttcgagaagcagttcgagctgagcgagcagaccaagctgcccatgttcctgcactgcagaaacagccacgccgagttcctggacatcatgaagagaaacagagacagatgcgtgggcggcgtggtgcacagcttcgacggcaccaaggaggccgccgccgccctgatcgacctggacctgtacatcggcttcaacggctgcagcctgaagaccgaggccaacctggaggtgctgaagagcatccccagcgagaagctgatgatcgagaccgacgccccctggtgcggcgtgaagagcacccacgccggcagcaagtacatcagaaccgccttccccaccaagaagaagtgggagagcggccactgcctgaaggacagaaacgagccctgccacatcatccagatcctggagatcatgagcgccgtgagagacgaggaccccctggagctggccaacaccctgtacaacaacaccatcaaggtgttcttccccggcatctag

SEQ ID NO: 222685 - protein, 367 aa, Artificial Sequence
  derived and/or modified sequence
MDDAAVLKRRGYLLGINLGEGSYAKVKSAYSERLKFNVAIKIIDRKKAPADFLEKFLPREIEILAMLNHCSIIKTYEIFETSHGKVYIVMELAVQGDLLELIKTRGALHEDEARKKFHQLSLAIKYCHDLDVVHRDLKCDNLLLDKDFNIKLSDFSFSKRCLRDDSGRMALSKTFCGSPAYAAPEVLQGIPYQPKVYDIWSLGVILYIMVCGSMPYDDSNIKKMLRIQKEHRVNFPRSKHLTGECKDLIYHMLQPDVNRRLHIDEILSHCWMQPKARGSPSVAINKEGESSRGTEPLWTPEPGSDKKSATKLEPEGEAQPQAQPETKPEGTAMQMSRQSEILGFPSKPSTMETEEGPPQQPPETRAQ

SEQ ID NO: 222686 - DNA, 1104 bp, Artificial Sequence
  derived and/or modified sequence
atggacgacgccgccgtgctgaagagaagaggctacctgctgggcatcaacctgggcgagggcagctacgccaaggtgaagagcgcctacagcgagagactgaagttcaacgtggccatcaagatcatcgacagaaagaaggcccccgccgacttcctggagaagttcctgcccagagagatcgagatcctggccatgctgaaccactgcagcatcatcaagacctacgagatcttcgagaccagccacggcaaggtgtacatcgtgatggagctggccgtgcagggcgacctgctggagctgatcaagaccagaggcgccctgcacgaggacgaggccagaaagaagttccaccagctgagcctggccatcaagtactgccacgacctggacgtggtgcacagagacctgaagtgcgacaacctgctgctggacaaggacttcaacatcaagctgagcgacttcagcttcagcaagagatgcctgagagacgacagcggcagaatggccctgagcaagaccttctgcggcagccccgcctacgccgcccccgaggtgctgcagggcatcccctaccagcccaaggtgtacgacatctggagcctgggcgtgatcctgtacatcatggtgtgcggcagcatgccctacgacgacagcaacatcaagaagatgctgagaatccagaaggagcacagagtgaacttccccagaagcaagcacctgaccggcgagtgcaaggacctgatctaccacatgctgcagcccgacgtgaacagaagactgcacatcgacgagatcctgagccactgctggatgcagcccaaggccagaggcagccccagcgtggccatcaacaaggagggcgagagcagcagaggcaccgagcccctgtggacccccgagcccggcagcgacaagaagagcgccaccaagctggagcccgagggcgaggcccagccccaggcccagcccgagaccaagcccgagggcaccgccatgcagatgagcagacagagcgagatcctgggcttccccagcaagcccagcaccatggagaccgaggagggccccccccagcagccccccgagaccagagcccagtag

SEQ ID NO: 222687 - DNA, 1104 bp, Artificial Sequence
  derived and/or modified sequence
atggacgacgctgctgtgcttaagcgccggggatacttgttgggaattaacttgggcgagggcagttacgctaaagtgaaatccgcttacagtgaaagactaaaatttaacgttgcaatcaaaatcatagatcggaaaaaagccccggctgacttcctggagaagttcctccccagagagattgagattcttgcgatgctgaatcattgctctattataaaaacttacgagatctttgagacatcgcacggaaaggtgtacattgtcatggagctggccgttcagggcgatcttctggaactcatcaagaccaggggtgcactgcatgaggacgaggcccgtaagaagtttcaccagctgtctctggccatcaaatactgccacgaccttgatgtcgtgcaccgagatctgaagtgcgataacctcctgctcgacaaggatttcaatatcaagctttccgatttctccttcagcaaaaggtgcttgagggatgattcaggacgtatggcattatcaaagactttttgcgggagcccagcttatgcagcccccgaagtgttacagggcatcccctatcagccaaaagtctatgacatttggtcattaggcgttatactgtatatcatggtgtgtggatctatgccatacgacgactccaatatcaagaagatgttgcgcatccagaaagaacatcgggtgaacttcccacggagcaagcatcttactggggaatgcaaagatttgatttaccatatgctccagcctgacgttaatcgccggctccatatagatgaaatcctgtcccactgctggatgcaacccaaagcacgtgggtccccctccgtggcgattaataaggaaggagagagctcacgcggtactgagcctctgtggacacctgagcccggctccgataagaagagtgcaactaaactggagcctgagggggaagcacagccccaggctcagccagaaacaaaacccgaaggtacagctatgcaaatgtctcgccagtccgaaatcctaggattcccttcaaagccctctaccatggaaacagaggagggtccacctcagcagccaccagaaactagagcacagtag

SEQ ID NO: 222688 - DNA, 1104 bp, Artificial Sequence
  derived and/or modified sequence
atggatgatgctgctgtgctgaagagaagaggctacctgctgggcatcaacctgggggagggcagctatgccaaggtgaagagcgcctacagcgagcggctgaagttcaacgtggccatcaagatcatcgacaggaagaaggccccagctgacttcctggagaagttcctgccccgggagattgagatcctggccatgctgaaccactgcagcatcatcaagacctatgagatctttgagaccagccacggcaaggtgtacatcgtgatggagctggccgtgcagggcgacctgctggagctgatcaagaccaggggggccctgcatgaagatgaggccaggaagaagttccaccagctgagcctggccatcaagtactgccacgacctggatgtggtgcaccgggacctgaagtgtgacaacctgctgctggacaaggacttcaacatcaagctgagtgacttctccttcagcaagcgctgcctgagagatgacagcggccgcatggccctgagcaagaccttctgtggcagccctgcctatgctgcccctgaggtgctgcagggcatcccctaccagcccaaggtgtatgacatctggagcctgggcgtcatcctgtacatcatggtgtgtggctccatgccctatgatgacagcaacatcaagaagatgctgcgcatccagaaggagcaccgggtgaacttccccaggagcaagcacctgaccggggagtgcaaggacctgatctaccacatgctgcagccagatgtgaacagaaggctgcacattgatgagatcctgagccactgctggatgcagcccaaggcccggggcagccccagcgtggccatcaacaaggagggggagagcagccggggcacagagcccctgtggaccccagagcccggcagtgacaagaagagcgccaccaagctggagcctgagggggaggcccagccccaggcccagcctgagaccaagccagagggcacagccatgcagatgagccggcagagcgagatcctgggcttccccagcaagcccagcaccatggagacagaggagggccccccccagcagcccccagagacccgggcccagtag

SEQ ID NO: 222689 - DNA, 2478 bp, Artificial Sequence
  derived and/or modified sequence
ttcactcgctgaagtcatctgggagacagtgccaaatgttccactccagagtcttggcctctaggaggcaggaacagcaggcctggccagcccaaaggactctctatccaggatgtaaatgagcacactgctggcccatgcgcctcggggctgtagagggcagcctcagaggcactgggcattcctggcaccatggatgacgctgctgtcctcaagcgacgaggctacctcctggggataaatttaggagagggctcctatgcaaaagtaaaatctgcttactctgagcgcctgaagttcaatgtggcgatcaagatcatcgaccgcaagaaggcccccgcagacttcttggagaaattccttccccgggaaattgagattctggccatgttaaaccactgctccatcattaagacctacgagatctttgagacatcacatggcaaggtctacatcgtcatggagctcgcggtccagggcgacctcctcgagttaatcaaaacccggggagccctgcatgaggacgaagctcgcaagaagttccaccagctttccttggccatcaagtactgccacgacctggacgtcgtccaccgggacctcaagtgtgacaaccttctccttgacaaggacttcaacatcaagctgtccgacttcagcttctccaagcgctgcctgcgggatgacagtggtcgaatggcattaagcaagaccttctgtgggtcaccagcgtatgcggccccagaggtgctgcagggcattccctaccagcccaaggtgtacgacatctggagcctaggcgtgatcctctacatcatggtctgcggctccatgccctacgacgactccaacatcaagaagatgctgcgtatccagaaggagcaccgcgtcaacttcccacgctccaagcacctgacaggcgagtgcaaggacctcatctaccacatgctgcagcccgacgtcaaccggcggctccacatcgacgagatcctcagccactgctggatgcagcccaaggcacggggatctccctctgtggccatcaacaaggagggggagagttcccggggaactgaacccttgtggacccccgaacctggctctgacaagaagtctgccaccaagctggagcctgagggagaggcacagccccaggcacagcctgagacaaaacccgaggggacagcaatgcaaatgtccaggcagtcggagatcctgggtttccccagcaagccgtcgactatggagacagaggaagggcccccccaacagcctccagagacgcgggcccagtgagcttcttgcggcccagggaatgagatggagctcacggcttaaagcccaagctctgaagaagtcaagggtggagccagagaaggaaggcagtcccagatgagcctctattttcatcagcttcttctctctccccttgaacttggtaacccacatggttctcccgtggcccctaggtggatgaggccaaagtcaaatccaaggctgagacagtcgtgcgactcctactcccccagagcgtgacccggagcaggtgctggacacagagcctgtctcagcagagggtccccactggccgcaacggctcagtgacagcaagagcaggaagagcagcaggaaggcaccgctgtccaccttgggcaccatttatcctcctttcatcgtccccggggcagttgcgtgaccctgctgggaggccagaccgggccagactgagggtcaggggaccaggctgggttgggggttgggtggggctggacggggacgaggcgcggagaggcggcgggaaagagcttcggctgggccacgggctcgcgggcactctcggcggcagcctcgggggctccgactccagctctgggcaagatccataaacttttaaagaagcctcaaaacatacttttaaagcattaagctttaaagtgctagaaatcttgtgccccatatgtgcttctttcagtattatcctagatcctcaggagtagcatggcaactggagaaaatgggaggaaagacaagaagaaatagaagctgatttaacatcaagtttattcagttttgatttttcttatctctactggctttctcctgttcaaaccttgcagcgataatatttggaaaagagcacttggaaattatattcctgtttttaactctttatatttaatcattctccttgtaattgattttgtagctaatttactccccagcacccccagaagaaaattttacaaaggaaaatgttttatttttattttttccttatcaactttttatttaaatgctaatatccaattaatggacaaacgaatcagctaatactggaaacaatgtaacaatagtgaaaagcatgaacttttgatttctatagaccgaatttgactctgctactaaatgatcttgggcaagttggttaatctatatgtctcagtttctttatctataaaatgagaataatacaacttc

SEQ ID NO: 222690 - DNA, 1104 bp, Artificial Sequence
  derived and/or modified sequence
atggacgacgccgccgtgctgaagcggcggggctacctgctgggcatcaatttgggcgagggctcctacgccaaggtgaagagcgcctatagcgagaggctgaagttcaacgtggctataaaaataatcgatagaaaaaaggcacccgcagattttctcgaaaagtttttaccgagggagatcgagatactggccatgttgaatcactgttccattattaagacctatgaaatcttcgagacctcgcacggaaaagtgtacattgtaatggagctggctgtccagggagacctgctggagttgataaaaacgcgcggcgcactccatgaagatgaagctagaaaaaagttccaccagctctcactcgccatcaaatattgccatgacttagatgtggtccaccgagacctaaaatgtgataatctgctcctggacaaagacttcaacatcaaactgtcggatttctctttcagtaagcgttgcctcagggatgatagtggaagaatggctctgtcaaagactttctgtggcagtccggcttacgccgcgcccgaggttttgcagggaattccttaccagcccaaggtgtacgacatatggagcctcggagttattctctatatcatggtgtgtggttctatgccttacgatgactccaacatcaagaaaatgctgcgcatccaaaaagagcatagggtgaactttcctcggtccaagcacctcaccggtgagtgtaaagacctgatctaccacatgttgcagcctgatgttaatagaaggctgcatatcgacgagattctgtcccactgttggatgcagcctaaggcacgaggatcaccttccgtggccattaataaggagggggagagcagtagggggaccgagccattgtggacacccgaacccggatctgacaagaaatccgcgaccaagctcgagcctgaaggcgaagctcagccccaggcgcagccagagacgaaacctgaaggcaccgccatgcagatgtccagacagtcagaaatcctgggatttccatccaagccaagtactatggaaaccgaagagggcccaccgcagcagcccccagagactagagctcagtag

SEQ ID NO: 222691 - DNA, 1104 bp, Artificial Sequence
  derived and/or modified sequence
atggatgacgctgcagtgttgaagcgaagagggtatctcctcggcatcaatctgggagaaggctcctatgcgaaagtcaaatccgcctacagcgagcgacttaagttcaatgtcgccatcaagatcattgaccggaagaaggcaccagcggattttcttgaaaaattcttaccgagagagatagaaatcttggcgatgcttaatcactgctccattatcaagacctacgagatctttgagacaagccacggcaaggtatatattgtgatggagctcgctgtacaaggggatctcctggagttgatcaagacccgcggtgccctacatgaggacgaagccagaaaaaagtttcaccaactgagccttgcgataaagtattgccatgaccttgatgttgtacaccgagacctaaagtgtgacaatttgttgctggataaagatttcaacattaagctctcggatttcagcttttccaagagatgtttgagagacgactctggtcgtatggccctaagtaagacattctgtggatctccagcctatgcggcaccagaagtactccaggggattccctaccaaccaaaagtttatgatatttggtcgctaggcgtcattctgtacatcatggtgtgtgggtcgatgccctacgatgattctaatattaagaaaatgctgagaatccagaaggagcacagggtgaacttcccacgatctaaacatctgactggggaatgtaaagatctcatttaccacatgctccagccagatgtgaaccggagactccacatagatgaaattctatcgcattgttggatgcagcctaaggccagaggatctccctctgtcgcgattaataaggagggtgagagtagtaggggcacagaaccactgtggacccctgagcctggctctgacaaaaaatctgctactaaattggagccagagggggaggctcaaccgcaggcccagccagagacaaagcccgagggtaccgccatgcagatgtcccgccagagtgagatcctggggttcccatcaaagccttctaccatggagacagaggaggggccaccccagcagccccctgaaactagggcgcagtag

SEQ ID NO: 222692 - protein, 891 aa, Artificial Sequence
  derived and/or modified sequence
MSQVGGRGDRCTQEVQGLVHGAGDLSASLAENSPTMSQNGYFEDSSYYKCDTDDTFEAREEILGDEAFDTANSSIVSGESIRFFVNVNLEMQATNTENEATSGGCVLLHTSRKYLKLKNFKEEIRAHRDLDGFLAQASIVLNETATSLDNVLRTMLRRFARDPDNNEPNCNLDLLMAMLFTDAGAPMRGKVHLLSDTIQGVTATVTGVRYQQSWLCIICTMKALQKRHVCISRLVRPQNWGENSCEVRFVILVLAPPKMKSTKTAMEVARTFATMFSDIAFRQKLLETRTEEEFKEALVHQRQLLTMVSHGPVAPRTKERSTVSLPAHRHPEPPKCKDFVPFGKGIREDIARRFPLYPLDFTDGIIGKNKAVGKYITTTLFLYFACLLPTIAFGSLNDENTDGAIDVQKTIAGQSIGGLLYALFSGQPLVILLTTAPLALYIQVIRVICDDYDLDFNSFYAWTGLWNSFFLALYAFFNLSLVMSLFKRSTEEIIALFISITFVLDAVKGTVKIFWKYYYGHYLDDYHTKRTSSLVSLSGLGASLNASLHTALNASFLASPTELPSATHSGQATAVLSLLIMLGTLWLGYTLYQFKKSPYLHPCVREILSDCALPIAVLAFSLISSHGFREIEMSKFRYNPSESPFAMAQIQSLSLRAVSGAMGLGFLLSMLFFIEQNLVAALVNAPENRLVKGTAYHWDLLLLAIINTGLSLFGLPWIHAAYPHSPLHVRALALVEERVENGHIYDTIVNVKETRLTSLGASVLVGLSLLLLPVPLQWIPKPVLYGLFLYIALTSLDGNQLVQRVALLLKEQTAYPPTHYIRRVPQRKIHYFTGLQVLQLLLLCAFGMSSLPYMKMIFPLIMIAMIPIRYILLPRIIEAKYLDVMDAEHRP

SEQ ID NO: 222693 - DNA, 2676 bp, Artificial Sequence
  derived and/or modified sequence
atgagccaggtgggcggcagaggcgacagatgcacccaggaggtgcagggcctggtgcacggcgccggcgacctgagcgccagcctggccgagaacagccccaccatgagccagaacggctacttcgaggacagcagctactacaagtgcgacaccgacgacaccttcgaggccagagaggagatcctgggcgacgaggccttcgacaccgccaacagcagcatcgtgagcggcgagagcatcagattcttcgtgaacgtgaacctggagatgcaggccaccaacaccgagaacgaggccaccagcggcggctgcgtgctgctgcacaccagcagaaagtacctgaagctgaagaacttcaaggaggagatcagagcccacagagacctggacggcttcctggcccaggccagcatcgtgctgaacgagaccgccaccagcctggacaacgtgctgagaaccatgctgagaagattcgccagagaccccgacaacaacgagcccaactgcaacctggacctgctgatggccatgctgttcaccgacgccggcgcccccatgagaggcaaggtgcacctgctgagcgacaccatccagggcgtgaccgccaccgtgaccggcgtgagataccagcagagctggctgtgcatcatctgcaccatgaaggccctgcagaagagacacgtgtgcatcagcagactggtgagaccccagaactggggcgagaacagctgcgaggtgagattcgtgatcctggtgctggccccccccaagatgaagagcaccaagaccgccatggaggtggccagaaccttcgccaccatgttcagcgacatcgccttcagacagaagctgctggagaccagaaccgaggaggagttcaaggaggccctggtgcaccagagacagctgctgaccatggtgagccacggccccgtggcccccagaaccaaggagagaagcaccgtgagcctgcccgcccacagacaccccgagccccccaagtgcaaggacttcgtgcccttcggcaagggcatcagagaggacatcgccagaagattccccctgtaccccctggacttcaccgacggcatcatcggcaagaacaaggccgtgggcaagtacatcaccaccaccctgttcctgtacttcgcctgcctgctgcccaccatcgccttcggcagcctgaacgacgagaacaccgacggcgccatcgacgtgcagaagaccatcgccggccagagcatcggcggcctgctgtacgccctgttcagcggccagcccctggtgatcctgctgaccaccgcccccctggccctgtacatccaggtgatcagagtgatctgcgacgactacgacctggacttcaacagcttctacgcctggaccggcctgtggaacagcttcttcctggccctgtacgccttcttcaacctgagcctggtgatgagcctgttcaagagaagcaccgaggagatcatcgccctgttcatcagcatcaccttcgtgctggacgccgtgaagggcaccgtgaagatcttctggaagtactactacggccactacctggacgactaccacaccaagagaaccagcagcctggtgagcctgagcggcctgggcgccagcctgaacgccagcctgcacaccgccctgaacgccagcttcctggccagccccaccgagctgcccagcgccacccacagcggccaggccaccgccgtgctgagcctgctgatcatgctgggcaccctgtggctgggctacaccctgtaccagttcaagaagagcccctacctgcacccctgcgtgagagagatcctgagcgactgcgccctgcccatcgccgtgctggccttcagcctgatcagcagccacggcttcagagagatcgagatgagcaagttcagatacaaccccagcgagagccccttcgccatggcccagatccagagcctgagcctgagagccgtgagcggcgccatgggcctgggcttcctgctgagcatgctgttcttcatcgagcagaacctggtggccgccctggtgaacgcccccgagaacagactggtgaagggcaccgcctaccactgggacctgctgctgctggccatcatcaacaccggcctgagcctgttcggcctgccctggatccacgccgcctacccccacagccccctgcacgtgagagccctggccctggtggaggagagagtggagaacggccacatctacgacaccatcgtgaacgtgaaggagaccagactgaccagcctgggcgccagcgtgctggtgggcctgagcctgctgctgctgcccgtgcccctgcagtggatccccaagcccgtgctgtacggcctgttcctgtacatcgccctgaccagcctggacggcaaccagctggtgcagagagtggccctgctgctgaaggagcagaccgcctacccccccacccactacatcagaagagtgccccagagaaagatccactacttcaccggcctgcaggtgctgcagctgctgctgctgtgcgccttcggcatgagcagcctgccctacatgaagatgatcttccccctgatcatgatcgccatgatccccatcagatacatcctgctgcccagaatcatcgaggccaagtacctggacgtgatggacgccgagcacagaccctag

SEQ ID NO: 222694 - DNA, 2676 bp, Artificial Sequence
  derived and/or modified sequence
atgtcacaagttggtgggagaggggatagatgcacccaggaggttcagggcctggtacacggcgccggagatctttccgcttcccttgccgagaattccccaactatgtcccaaaacggctactttgaggactcaagctactataaatgcgatacagacgacacctttgaagcgcgggaagaaatcttgggggatgaggcctttgacacagctaactcatccatcgtgagcggagaatcgattcgctttttcgtcaatgtgaacttggagatgcaggccactaacactgaaaatgaggccacatccggggggtgcgtcctgctccacactagtagaaaatatctgaagctcaaaaacttcaaagaggagattcgtgcccatagagacctggatgggttcctggctcaggcctcaattgtgttaaatgagaccgctacatccttagataatgtcctccgaactatgctcagaaggtttgccagagatcccgacaataacgaacccaattgcaatctggatcttctgatggccatgcttttcactgatgcaggagctcctatgagaggaaaggtgcacctgcttagtgacacgatacagggtgttactgcaactgtaaccggggtcagataccagcaatcctggctttgtattatctgcactatgaaggccctgcagaaaagacatgtttgtatttcccggctggtccggccacagaactggggtgagaacagctgcgaagtgagattcgtcattctggtgctggccccccctaagatgaagtctactaaaaccgctatggaggttgcacgcaccttcgccactatgtttagcgacatcgcttttagacagaaactactggaaaccagaacagaggaggaattcaaagaggccctggttcatcagcgacagctgctaaccatggtcagtcatgggcccgtggcaccacgaacaaaggaaaggtctaccgtgagtctgccagcccatcgccatcccgagccgcctaagtgtaaagattttgtgccattcggtaagggtattcgggaagatattgcacggcgctttccgctgtatcccctcgatttcactgacggtataatcggcaaaaataaggccgttggtaagtatatcacaactaccctgttcctctacttcgcatgtttgcttcccacgattgcattcggaagcctcaatgacgaaaatacagacggagctattgacgttcaaaagactatcgctgggcagagtatcggggggctcctgtatgccctcttttcaggtcagcctttggtcattttgttgacaacagctcctctggcactttatatacaggttatccgagtcatctgtgacgattacgacctggacttcaactcattctatgcttggacaggcctttggaactcttttttcttagctttgtacgccttctttaatcttagcctggtcatgtctctgttcaagcgaagtactgaggagatcatagcactctttattagtatcaccttcgtacttgatgctgtaaaagggaccgtgaaaattttttggaagtactattatggccactacctggacgactaccacactaagaggacctcatcccttgtgagcctgagcggtctaggagcatcccttaacgcgagcctgcacaccgcgctcaatgcctcatttctggcttcacccaccgaacttccttccgcaacacactccgggcaggcgacggcagtcctctcactgctgattatgctcggcacgctttggctgggatacacactctatcagtttaaaaagtcaccttacttgcacccttgcgtcagggaaattctctctgactgcgccttacctatagccgtgctagcatttagtctgattagctcccacggattcagggagattgagatgagtaagttcaggtataacccaagcgagtccccctttgccatggcccaaattcaaagcctgagtctcagggcggtgagtggggcaatggggctggggtttctgctgagcatgttgttcttcatcgaacaaaaccttgtagcagcattggtcaatgctcccgagaaccgcctggtcaagggaaccgcataccattgggaccttctgctgctcgccattataaatactggcctcagtttatttggtttgccatggatccatgcagcatacccacacagccctcttcacgtgcgggctctggctctggtggaagaacgcgttgagaacggacacatctacgatacaatcgtcaatgtgaaagagaccagactgacttcccttggggcctccgtcttggtggggttaagtctcctcctgcttccagttcccctgcagtggattcccaagcctgtgctctatggactcttcctgtatatagccctgacctccctcgatggtaaccagctggtgcagcgcgtagcgctccttctgaaagaacagacagcataccctcctacacactatatccggagggttccacaaaggaagatacactacttcacggggttgcaggtgctacagctattgctcctctgcgcctttggcatgtcctcgctaccctatatgaagatgatcttccccctgatcatgattgccatgatccctatccgttacatcctgttgccacggattattgaagccaaatacctggatgttatggacgccgaacacaggccatag

SEQ ID NO: 222695 - DNA, 2676 bp, Artificial Sequence
  derived and/or modified sequence
atgagccaggtgggcggccgcggggaccgctgcacccaggaggtgcagggcctggtgcacggggccggggacctgagcgccagcctggccgagaacagccccaccatgagccagaatggctactttgaggacagcagctactacaagtgtgacacagatgacacctttgaggcccgggaggagatcctgggagatgaggcctttgacacagccaacagcagcatcgtgtctggagagagcatccgcttctttgtgaatgtgaacctggagatgcaggccaccaacacagaaaatgaggccaccagcggcggctgtgtgctgctgcacaccagcaggaagtacctgaagctgaagaacttcaaggaggagatccgggcccaccgggacctggatggcttcctggcccaggccagcatcgtgctgaatgaaacagccaccagcctggacaacgtgctgcggaccatgctgcggagatttgcccgggaccctgacaacaatgagcccaactgcaacctggacctgctgatggccatgctgttcacagatgctggggcccccatgaggggcaaggtgcacctgctgagtgacaccatccagggcgtgacagccaccgtgactggagtgcgctaccagcagagctggctgtgcatcatctgcaccatgaaggccctgcagaagagacatgtgtgcatcagccggctggtgcggccccagaactggggcgagaacagctgtgaggtgcgctttgtgatcctggtgctggccccacccaagatgaagagcaccaagacagccatggaggtggcccggacctttgccaccatgttcagtgacatcgccttccggcagaagctgctggagaccaggacagaggaggagttcaaggaggccctggtgcaccagaggcagctgctgaccatggtgagccacggccctgtggcccccaggaccaaggagaggagcacagtgtccctgcctgcccaccgccaccctgagccccccaagtgcaaggactttgtgccctttgggaagggcatccgggaggacatcgcccggcgcttccccctgtaccccctggacttcacagatggcatcatcggcaagaacaaggctgtgggcaagtacatcaccaccaccctcttcctgtactttgcctgcctgctgcccaccatcgccttcggcagcctgaatgatgaaaatacagatggagccattgatgtgcagaagaccatcgccggccagagcatcggcggcctgctgtatgccctcttcagcggccagcccctggtgatcctgctgaccacagcccccctggccctgtacatccaggtgatccgggtcatctgtgatgattatgacctggacttcaacagcttctacgcctggacaggcctgtggaacagcttcttcctggccctgtatgccttcttcaacctgagcctggtgatgagcctcttcaagaggagcacagaggagatcatcgccctcttcatcagcatcacctttgtgctggatgctgtgaagggcaccgtgaagatcttctggaagtactactacggccactacctggatgactaccacaccaagaggaccagcagcctggtgtccctgagcggcctgggcgccagcctgaatgccagcctgcacacagccctgaatgccagcttcctggccagccccacagagctgcccagcgccacccacagcggccaggccacagctgtgctgagcctgctgatcatgctgggcaccctgtggctgggctacaccctgtaccagttcaagaagagcccctacctgcacccctgtgtgcgggagatcctgagtgactgtgccctgcccatcgctgtgctggccttcagcctcatcagcagccacggcttccgggagattgagatgagcaagttccgctacaaccccagcgagagcccctttgccatggcccagatccagagcctgagcctgcgggctgtgtctggggccatgggcctgggcttcctgctgtccatgctgttcttcatcgagcagaacctggtggccgccctggtgaatgccccagaaaatcggctggtgaagggcacagcctaccactgggacctgctgctgctggccatcatcaacacaggcctgagcctgtttggcctgccctggattcatgctgcctacccccacagccccctgcacgtgcgggccctggccctggtggaggagcgggtggagaatggccacatctatgacaccatcgtgaatgtgaaggagacccggctgaccagcctgggcgcctctgtgctggtgggcctgagcctgctgctgctgcctgtgcccctgcagtggatccccaagcctgtgctgtatggcctcttcctgtacatcgccctgaccagcctggatggcaaccagctggtgcagagggtggccctgctgctgaaggagcagacagcctacccacccacccactacatccggcgggtgccccagaggaagatccactacttcaccggcctgcaggtgctgcagctgctgctgctgtgtgccttcggcatgagcagcctgccctacatgaagatgatcttccccctcatcatgattgccatgatccccatccgctacatcctgctgccccgcatcatcgaggccaagtacctggatgtgatggatgctgagcaccggccctag

SEQ ID NO: 222696 - DNA, 2676 bp, Artificial Sequence
  derived and/or modified sequence
atgagccaggtgggcggccggggcgaccggtgcacccaggaggtgcaaggactggtgcacggagctggcgatcttagtgcttcccttgccgagaatagccccaccatgtcccagaacggttacttcgaagactcaagctactacaaatgcgacaccgatgataccttcgaggccagagaagaaattctgggggacgaggccttcgacacagcgaactcctccattgtaagcggggagagtatacggttcttcgttaatgttaacctggaaatgcaggcaacaaatacagagaacgaagctacgagcggtgggtgtgtgcttctgcacaccagccgcaaatacctgaagctcaagaatttcaaagaggagattagagcgcaccgggatctggatggcttccttgctcaagcatccatcgtgctaaacgaaaccgccacctctctggacaacgttttgagaacaatgctcagacgctttgccagggaccccgacaacaatgagccaaattgtaatctagatttactgatggcaatgttgttcaccgatgcaggggcccctatgcgggggaaagttcaccttctgtctgacaccatccagggggtgaccgccaccgtgactggcgtgcgctatcagcagtcctggctgtgcatcatctgcacaatgaaggccctacagaagcggcatgtctgcatctcgcgactggtgcggcctcagaattggggcgaaaattcatgtgaggttagatttgtcattctggtgttggccccccctaaaatgaagtccacaaagaccgccatggaagtggcacgaacgtttgccacgatgttctcagatattgcgttcagacagaaactccttgagacccggactgaggaagagtttaaggaggccctggtccaccaacggcagctccttaccatggtgagccatggaccagtggccccccgcactaaggagcgttctacagtgtcactccccgctcatcgccaccctgaaccccccaagtgcaaggacttcgttccattcggcaaaggcatacgtgaggacatcgcacggcgtttccctctgtaccctcttgacttcactgacggtatcattggtaaaaacaaagctgtgggcaagtatataaccactactcttttcctgtactttgcctgtctacttcctacaatagccttcggatcactgaatgacgaaaacacggatggagccatcgatgttcaaaagacaattgcaggacagagcatcggcgggctgttgtatgccctgttctcgggacaaccccttgtgattttgctgactaccgctcccctcgcactgtatatccaggtgattcgcgtaatctgcgatgactatgacttggattttaatagcttctatgcttggacaggattatggaacagtttcttccttgccctgtacgccttttttaacctgagtctcgtgatgtccttgttcaaaaggagcaccgaagagataattgccctcttcatcagcataactttcgtcctcgacgctgtcaaaggcactgtgaaaattttttggaaatattactatggacactatctggacgattaccataccaaacgcacaagctcgcttgtgtctctgtctggccttggggccagcttaaacgcctccctgcacactgccctgaacgcttccttcctcgcctcccctaccgagttgccttctgcaacacattcaggtcaggctactgctgtcttgtctctgcttattatgctgggcaccctctggctgggatatacgctgtaccagttcaagaaaagcccatacctccacccttgcgtcagggagattttgtccgactgcgcgttgcctatagccgtactcgcattcagcctcatttcatcacacggctttagggagatcgaaatgtctaagttccggtataacccttcagagtcgccctttgcaatggcgcagattcagtctctgtcccttcgagccgtgtctggggcaatgggactcggtttcctgttgtctatgctcttcttcattgagcaaaatctcgtggccgcgctcgtgaacgctcctgagaaccggctcgtgaaggggactgcctaccactgggatcttcttcttctggctatcatcaatacagggctgtctctgtttggattaccttggatccacgcagcttatccgcattccccgttgcacgtgagggccctagctctggtcgaagagagggtggagaacggacacatctacgataccatcgtgaacgtcaaagaaacacggctgactagtctcggagcttccgttctcgtggggctgagtctgttactgttaccggtccccctccagtggatccctaaacccgtcctttacggtctgtttctttacatcgccctcaccagcctggacggaaatcagctagtgcagagggtggcccttttactcaaagagcagacagcgtacccccctactcattacatacggagggtaccacagagaaagatccactacttcaccggccttcaggtgctccagctccttctgttgtgcgcctttgggatgtcttcgcttccctatatgaaaatgattttcccgctcatcatgattgctatgatccctatacgatatattctgctccctcggatcatagaggcaaagtatctcgacgtcatggacgccgagcacagaccatag

SEQ ID NO: 222697 - DNA, 2676 bp, Artificial Sequence
  derived and/or modified sequence
atgtctcaggtaggaggtagaggagatcgttgtacccaggaggtgcaggggctggtgcatggcgctggcgatttgtcggcatctcttgctgagaacagtcctaccatgtctcagaatggctattttgaagattccagttattataaatgtgatacagatgatacatttgaagccagagaagaaattttgggcgacgaagcctttgacaccgccaattctagtattgtttctggggagtccatcagattcttcgtcaatgtgaatctggaaatgcaagcaacaaataccgagaacgaagccaccagcggagggtgtgtccttctacacacatcccggaagtatcttaagctaaagaacttcaaggaagagatcagggcacaccgagacctcgatggttttctggcgcaggcctccattgtcctgaatgaaacagctacttctctggataacgtcttacgcacaatgctgcgccgattcgcacgggaccccgacaacaatgaacccaactgtaatctggacctattgatggcgatgctgttcacagacgctggggcacctatgcgtggaaaggtccatctgttgtcagacactattcagggtgtaactgccactgtgaccggagtcagataccagcagagttggttgtgcataatttgcaccatgaaggcgctgcagaagcgccacgtgtgtatcagccggctcgtcaggccacaaaattggggggagaactcctgtgaagttcgctttgtcattctggtgctggcccctcctaaaatgaagtccaccaaaacagcaatggaagtcgcacggacattcgcaactatgttttcggatattgccttccggcagaagctgctcgagacccgaacggaagaggaatttaaggaggcactcgtccaccagcgacaacttctgacgatggtctcacatggaccagtcgcgcctcgcaccaaggagcgatctactgtgtctctgccagctcatcggcatcccgagccccctaagtgtaaagactttgtgccttttggaaaagggataagagaagatattgccaggaggtttccattgtaccccctggactttacagacggcatcattggcaagaacaaagcagtcggcaaatatattaccacaactttattcctgtatttcgcctgtttgctgccaactatagctttcggaagtctcaacgacgaaaataccgacggagcgatcgacgttcagaaaaccatagccggtcaatctatcgggggactcctttacgcactattctccggccagccactcgtgatactgcttacaaccgcccctctagcgctgtacatccaagtcatacgcgtgatatgtgacgattacgaccttgatttcaacagtttttacgcatggactggtctgtggaattctttttttctcgcgctttatgcatttttcaacctgagtctggttatgtcactgttcaaacgctctaccgaggaaataatcgcgctatttatctcaattacgtttgtcctggatgcggtgaagggcaccgtgaagatcttttggaaatattattatgggcattatctggacgactaccacacaaaacgcacatcctccctcgtctcactgagcggattaggtgcttccctgaacgccagtctccatacagccctgaacgcatcctttctggccagcccaactgagctgccctccgccacacattctggacaagccaccgctgtgctgtctctactgattatgctgggcaccctttggttgggctatactctgtatcagttcaaaaagtctccttacctgcatccttgcgtccgagaaatcctgagcgactgtgctttgccgattgccgtgcttgctttcagcctgatttctagccacggattcagggaaatcgagatgtcaaagttccgctacaatccatccgagagcccattcgcaatggcacagatccagtccctcagtctgagggccgtaagcggcgcaatggggctgggctttctgctaagcatgctgttctttatcgaacagaatctcgtcgccgcacttgtcaacgcgccagagaacaggctggttaaaggcaccgcataccattgggatctcctgctcttggcgattattaacacagggctgtctctatttggattgccgtggattcacgctgcatacccacatagcccactccatgtacgggctctcgcgttggtggaggagcgggttgagaacggccatatctacgataccatcgtgaacgtcaaagagacccgcttaactagtttaggcgctagcgttctggtgggcctatcactgcttcttctgcccgtccctctgcagtggattccaaaacctgtgctgtatggtttgttcctctacattgctctcacatcactcgacggcaaccagctggtacagcgtgtggcactactacttaaggagcaaaccgcttatcctccaacacattacatacgcagagtcccacaaagaaaaatacactactttacagggttacaggttttacagctattacttttgtgtgcatttggcatgagctcactgccatatatgaagatgatctttcccctgatcatgatcgccatgatcccaattcggtatatacttctcccgaggattattgaggccaagtacttggacgtgatggatgccgagcatcgtccttag

SEQ ID NO: 222698 - DNA, 3094 bp, Artificial Sequence
  derived and/or modified sequence
ctttctccctagggtggcgtgggttgcatccctcggaagagcgaaggaatgagccaggtcggggggcggggagacaggtgcacacaggaggtccagggcttggtccatggggctggtgacctttctgcttcccttgcagaaaactctcccaccatgtcgcagaatggatacttcgaggattcaagctactacaagtgtgacacagatgacaccttcgaagcccgagaggagatcctgggggatgaggccttcgacactgccaactcctccatcgtgtctggcgagagtatccgtttttttgtcaatgtcaaccttgagatgcaggccaccaacactgagaatgaagcgacttccggtggctgtgtgctcctgcacacctcccgaaagtacctgaagttaaagaacttcaaggaagagatccgtgcgcaccgcgacctagatggcttcctggcgcaggccagcatcgtcctgaacgagacggccacctccctggataacgtgctgcggaccatgcttcgccgcttcgccagggaccctgacaacaatgagcccaactgcaacctggacctgctcatggccatgctcttcaccgatgccggggcacccatgcggggtaaagtccacctgctgtcagataccatccaaggggtcaccgccacagtgacaggggtgcggtaccagcagtcgtggctctgcatcatctgtaccatgaaggccctacagaagcggcacgtgtgcatcagccgcctggttcgcccacagaactggggggagaattcctgtgaggttcggttcgtcatcctggtgctggccccacccaagatgaaaagcactaagactgcgatggaggtggcgcgcacgtttgccaccatgttctcggatatcgccttccgccagaagctcctggagacccgcacagaggaggaattcaaggaggccttggtgcatcagagacagctgctcaccatggtgagccacggtccagtggcgccgagaacgaaggaacgcagcacagtctccctccctgcccacagacacccagagcccccaaagtgcaaggactttgtcccttttgggaagggcatccgggaggacatcgcacgcaggttccccttgtaccccttggacttcactgatggcattattgggaaaaacaaggctgtgggcaaatacatcaccaccaccctgttcctctacttcgcctgcctcctgcccaccatcgctttcgggtctctcaatgacgagaacacagacggggccatcgacgtgcagaagaccatagccgggcagagcatcgggggcctgctctacgcgctcttctctgggcagccattggtgattctgctgaccaccgcgcccctggcgctctacatccaggtgattcgtgtcatctgtgatgactatgacctggacttcaactccttctacgcatggacgggcctgtggaatagtttcttccttgcgctttatgcctttttcaacctcagcctggtcatgagtctcttcaagaggtcgacggaggagatcatcgccctcttcatttccatcacgtttgtgctggatgccgtcaagggcacggttaaaatcttctggaagtactactatgggcattacttggacgactatcacacaaaaaggacttcatcccttgtcagcctgtcaggcctcggcgccagcctcaacgccagcctccacactgccctcaacgccagcttcctcgccagccccacggagctgccctcggccacacactcaggccaggcgaccgccgtgctcagcctcctcatcatgctgggcacgctctggctgggctacaccctctaccaattcaagaagagcccctacctgcacccctgcgtgcgagagatcctgtccgactgcgccctgcccatcgcggtgctcgccttctccctcatcagctcccatggcttccgggaaatcgagatgagcaagttccgctacaaccccagcgagagcccctttgcgatggcgcagatccagtcgctgtccctgagggccgtcagcggtgccatgggcctcggcttcctgctgtccatgctcttcttcatcgagcagaacttggtggccgccttggtgaatgcaccggagaacaggctggtgaagggcactgcctaccactgggacctcctgctcctcgccatcatcaacacagggctgtctctgtttgggctgccttggatccatgccgcctacccccactccccgctgcacgtgcgagccctggccttagtggaggagcgtgtggagaacggacacatctatgacacgattgtgaacgtgaaggagacgcggctgacctcgctgggcgccagcgtcctggtgggcctgtccctgttgctgctgccggtcccgcttcagtggatccccaagcccgtgctctatggcctcttcctctacatcgcgctcacctccctcgatggcaaccagctcgtccagcgcgtggccctgctgctcaaggagcagactgcgtaccccccgacacactacatccggagggtgccccagaggaagatccactacttcacgggcctgcaggtgcttcagctgctgctgctgtgtgccttcggcatgagctccctgccctacatgaagatgatctttcccctcatcatgatcgccatgatccccatccgctatatcctgctgccccgaatcattgaagccaagtacttggatgtcatggacgctgagcacaggccttgactggcagaccctgcccacgccccattcgccagccctccacgtcctcccaggctggctctggagctgtgaggggaggtgtaggtgtgtgggtgactgctctgtgctgcgccttctcatggctgactcaggcctggggcatctgggcattgtaggggtgcagtggtatgtgcccacccctctcccattatcctttagctttaggccaagagcgttgctcagggcagcttctgcccagggtgggtgggactgagcaggatggattttcttttgataaaagagtcgatgcctgaaagagaaaccatttccttgattgtgtaaggaacttgctggacgcacattagagaataaagctcctgtttctaggctccta

SEQ ID NO: 222699 - protein, 528 aa, Artificial Sequence
  derived and/or modified sequence
MAGSDTAPFLSQADDPDDGPVPGTPGLPGSTGNPKSEEPEVPDQEGLQRITGLSPGRSALIVAVLCYINLLNYMDRFTVAGVLPDIEQFFNIGDSSSGLIQTVFISSYMVLAPVFGYLGDRYNRKYLMCGGIAFWSLVTLGSSFIPGEHFWLLLLTRGLVGVGEASYSTIAPTLIADLFVADQRSRMLSIFYFAIPVGSGLGYIAGSKVKDMAGDWHWALRVTPGLGVVAVLLLFLVVREPPRGAVERHSDLPPLNPTSWWADLRALARNPSFVLSSLGFTAVAFVTGSLALWAPAFLLRSRVVLGETPPCLPGDSCSSSDSLIFGLITCLTGVLGVGLGVEISRRLRHSNPRADPLVCATGLLGSAPFLFLSLACARGSIVATYIFIFIGETLLSMNWAIVADILLYVVIPTRRSTAEAFQIVLSHLLGDAGSPYLIGLISDRLRRNWPPSFLSEFRALQFSLMLCAFVGALGGAAFLGTAIFIEADRRRAQLHVQGLLHEAGSTDDRIVVPQRGRSTRVPVASVLI

SEQ ID NO: 222700 - DNA, 1587 bp, Artificial Sequence
  derived and/or modified sequence
atggccggcagcgacaccgcccccttcctgagccaggccgacgaccccgacgacggccccgtgcccggcacccccggcctgcccggcagcaccggcaaccccaagagcgaggagcccgaggtgcccgaccaggagggcctgcagagaatcaccggcctgagccccggcagaagcgccctgatcgtggccgtgctgtgctacatcaacctgctgaactacatggacagattcaccgtggccggcgtgctgcccgacatcgagcagttcttcaacatcggcgacagcagcagcggcctgatccagaccgtgttcatcagcagctacatggtgctggcccccgtgttcggctacctgggcgacagatacaacagaaagtacctgatgtgcggcggcatcgccttctggagcctggtgaccctgggcagcagcttcatccccggcgagcacttctggctgctgctgctgaccagaggcctggtgggcgtgggcgaggccagctacagcaccatcgcccccaccctgatcgccgacctgttcgtggccgaccagagaagcagaatgctgagcatcttctacttcgccatccccgtgggcagcggcctgggctacatcgccggcagcaaggtgaaggacatggccggcgactggcactgggccctgagagtgacccccggcctgggcgtggtggccgtgctgctgctgttcctggtggtgagagagccccccagaggcgccgtggagagacacagcgacctgccccccctgaaccccaccagctggtgggccgacctgagagccctggccagaaaccccagcttcgtgctgagcagcctgggcttcaccgccgtggccttcgtgaccggcagcctggccctgtgggcccccgccttcctgctgagaagcagagtggtgctgggcgagacccccccctgcctgcccggcgacagctgcagcagcagcgacagcctgatcttcggcctgatcacctgcctgaccggcgtgctgggcgtgggcctgggcgtggagatcagcagaagactgagacacagcaaccccagagccgaccccctggtgtgcgccaccggcctgctgggcagcgcccccttcctgttcctgagcctggcctgcgccagaggcagcatcgtggccacctacatcttcatcttcatcggcgagaccctgctgagcatgaactgggccatcgtggccgacatcctgctgtacgtggtgatccccaccagaagaagcaccgccgaggccttccagatcgtgctgagccacctgctgggcgacgccggcagcccctacctgatcggcctgatcagcgacagactgagaagaaactggccccccagcttcctgagcgagttcagagccctgcagttcagcctgatgctgtgcgccttcgtgggcgccctgggcggcgccgccttcctgggcaccgccatcttcatcgaggccgacagaagaagagcccagctgcacgtgcagggcctgctgcacgaggccggcagcaccgacgacagaatcgtggtgccccagagaggcagaagcaccagagtgcccgtggccagcgtgctgatctag

SEQ ID NO: 222701 - DNA, 1587 bp, Artificial Sequence
  derived and/or modified sequence
atggctggctcagatactgctcccttcctaagccaggctgacgatcctgacgacgggccggtgccaggtacgcccggcctccctgggtcgaccggcaaccctaagtctgaggagccggaggtgccagaccaggaaggcctgcagcggatcacaggcctttcccctggtcgctctgccctgattgttgcagttctttgctacattaatctactgaactatatggatagattcacggtggccggggtgctgcctgacatagaacagtttttcaacattggcgactcatcttcggggctcatccagactgtcttcataagcagctatatggttctggctcccgtgttcggatacctcggcgaccgatataatcgcaagtacctgatgtgtggagggatcgctttctggtccctagtcacattagggtcctcttttattcccggggaacacttctggctcttgttgctaacccgcggtctggtgggtgtgggcgaggcctcctattctaccattgcccctaccctcattgccgatctctttgttgcagaccaaaggtcccgcatgcttagtattttctacttcgcaattccagtgggatctggactcggttatatcgccggcagtaaggttaaagacatggccggagactggcactgggcactacgagtcacaccaggcctaggtgtagtggcggtgctgctgttgttcctggtggtaagagagccccctcgcggcgcagttgagaggcatagtgatctgcctccattgaatcctacttcatggtgggccgacctgcgggctctggcccgcaacccttcctttgtccttagtagcttaggatttacagccgtagcatttgtgaccggcagtttagccctttgggccccggcgtttctcctgcggtcgcgcgtggtgctgggtgaaacacctccttgtctccctggagattcgtgctccagtagcgacagtctgatcttcggactcatcacctgcttgaccggggtgttgggggtggggctgggggtcgaaatcagtcggaggctgaggcacagcaacccacgagcagaccctctcgtctgcgctaccggactgctggggtcagccccttttctgttcttgtctcttgcttgcgcacgagggtcaattgtggctacatacatcttcatatttatcggagagacgctgttgtccatgaattgggccattgtcgcggacatactgctctacgtggtgattccaaccagaagatccaccgcggaggcgttccaaattgtactgtcccacctgctgggcgatgccggcagtccgtatttaatcgggctcattagcgacagactgagacggaattggccgccttcctttctctccgagttccgggccctccagttcagccttatgttatgtgcatttgtgggagcgctgggcggcgcagcttttctcggcaccgccatatttattgaggcagaccggcggcgggcgcaattgcacgtgcaagggcttctgcacgaggccggaagtacagacgatcgaatcgtagtaccccaaagaggccggtcgacaagagtgcccgtggccagtgtgctgatctag

SEQ ID NO: 222702 - DNA, 1587 bp, Artificial Sequence
  derived and/or modified sequence
atggccggcagtgacacagcccccttcctgagccaggctgatgatcctgatgatggccctgtgcccggcaccccaggcctgcccggcagcactggaaaccccaagtctgaggagcctgaggtgcctgaccaggagggcctgcagaggatcaccggcctgagccctggccgcagcgccctgattgtggccgtgctgtgctacatcaacctgctgaactacatggaccgcttcaccgtggccggcgtgctgcctgacatcgagcagttcttcaacatcggggacagcagcagcggcctcatccagaccgtcttcatcagcagctacatggtgctggcccctgtgtttggctacctgggggaccgctacaacaggaagtacctgatgtgtggcggcatcgccttctggagcctggtgaccctgggcagcagcttcatccctggagagcacttctggctgctgctgctgacccggggcctggtgggcgtgggggaggccagctacagcaccatcgcccccaccctgattgctgacctgtttgtggccgaccagaggagcaggatgctgagcatcttctactttgccatccctgtgggcagcggcctgggctacatcgccggcagcaaggtgaaggacatggccggggactggcactgggccctgcgggtgaccccaggcctgggcgtggtggccgtgctgctgctcttcctggtggtgcgggagcccccaagaggagctgtggagcggcacagcgacctgccccccctgaaccccacctcctggtgggccgacctgcgggccctggccaggaaccccagctttgtgctgagcagcctgggcttcaccgctgtggcctttgtgacaggcagcctggccctgtgggccccagccttcctgctgcggagccgggtggtgctgggggagaccccaccctgcctgcccggggacagctgcagcagcagtgacagcctcatcttcggcctcatcacctgcctgactggagtgctgggcgtgggcctgggcgtggagatcagccggcggctgcggcacagcaaccccagggctgaccccctggtgtgtgccaccggcctgctgggcagcgcccccttcctgttcctgagcctggcctgtgcccggggcagcatcgtggccacctacatcttcatcttcatcggggagaccctgctgtccatgaactgggccatcgtggccgacatcctgctgtatgtggtgatccccacccggcgcagcacagctgaggccttccagatcgtgctgagccacctgctgggagatgctggcagcccctacctgattggcctcatcagtgaccggctgcggaggaactggccacccagcttcctgtctgagttccgggccctgcagttcagcctgatgctgtgtgcctttgtgggcgccctgggcggggccgccttcctgggcacagccatcttcattgaagctgacagaagaagagcccagctgcacgtgcagggcctgctgcatgaagctggcagcacagatgaccgcatcgtggtgccccagaggggccgcagcaccagggtgcctgtggcctctgtgctgatctag

SEQ ID NO: 222703 - DNA, 1587 bp, Artificial Sequence
  derived and/or modified sequence
atggccggcagcgacaccgcccccttcctgagccaggccgacgaccccgatgatggccccgtcccaggaacacccggattgcctggcagtacaggaaaccctaaatcagaggagcccgaagtgccggaccaggagggcttgcagcgcatcacggggctgtcgccgggtagatcggccctgatcgtggcagtgttatgctacattaatcttcttaactatatggacaggttcactgtggccggggtgctgccggacatcgaacagttctttaatatcggagacagcagtagcggactcatccagacggtcttcatttcctcctatatggtgctagctcctgtgttcggttacttgggggacagatataataggaagtatctgatgtgtgggggcatagcgttctggtcacttgttactctcgggagctctttcattcccggggaacatttctggttgctgctcctgaccaggggcttggtgggagtgggggaagcttcatatagcacaattgcaccaacgctgatagccgatctctttgtggccgaccagcgctcacgcatgcttagcattttctacttcgccattcccgtgggaagtggcctcggatacattgctggctccaaggtcaaagacatggccggcgattggcactgggctctgcgagttacacccggcctaggcgtcgtcgctgttctcttgctctttttagttgtgagggaacctcccaggggggcggtcgagagacacagcgacttgccacccctgaaccctacaagctggtgggccgacctaagagccctggcccgaaacccttcttttgtcttgagttccttgggctttacagccgtcgcttttgtaaccggtagtctcgcgttgtgggctccagcgttcctcctgagatcccgcgtagtgcttggagaaactccaccctgcttgccaggagactcctgtagtagctctgacagcttgatcttcggcctcataacatgcctgaccggcgtattgggagtggggttaggtgtggagatctccaggcggctgcggcattctaaccctagggcagatcctctggtttgcgcgacagggctcctaggttccgcgccctttctgttcctcagtctggcttgcgctagaggttctatcgtcgccacatacatatttatcttcatcggcgaaacgctactttcaatgaattgggctattgtcgcggacattctgctttacgtcgtgattcctacccggaggagtaccgccgaggctttccagattgtcctgtcacacctgcttggcgacgccggctccccttatctgattggcctgatttccgacaggttgcgccggaattggccgcctagcttcctgagtgaattcagggccttgcaattcagcctgatgttgtgtgcattcgtcggggcactcggtggtgcagccttcctgggtactgccatctttattgaagcagaccgaaggcgagctcagctgcatgtgcagggccttcttcacgaggctggatccaccgatgatagaattgtcgttccccagcgggggcgatctactagggtcccagtcgcgtcagtattgatctag

SEQ ID NO: 222704 - DNA, 1587 bp, Artificial Sequence
  derived and/or modified sequence
atggccggtagcgacacagcccctttcctgagtcaggctgatgatccagatgacggacccgtgccgggaacacccggtcttccgggttcgacgggaaaccccaagtctgaggaacccgaagtccccgaccaagaagggctgcaacgcatcactgggttgtcccccggaagatccgccctaatcgtggcagtcctgtgttatattaacctcttgaactacatggatagattcactgtggctggcgtgttgcccgacatcgaacaattctttaacatcggtgattcgtcctccggtctgatacagaccgtatttatctcgagttacatggtgctggcccctgtgtttggctatctcggcgaccgttataatcgcaagtacttaatgtgtggtggcattgccttctggtctttggttacactcgggtcttcatttattccaggagaacacttctggctgctgctgctgactagggggctcgtcggggtaggcgaagcgagctacagcaccatcgcacctacactgatagccgatctcttcgtggcagaccagaggtcccgcatgctgtcgatattctattttgcaatccctgttggaagcggcctgggatacattgctgggtccaaagtaaaagacatggctggtgactggcactgggcccttcgtgtgacacctggcttgggagtagtcgctgttctgctactgttcctcgtcgtgagagagccgccaagaggcgctgtcgagcgacactccgatttacccccattgaatccaaccagttggtgggcagaccttagggcactggctaggaatccatcatttgtgctgtctagtctcggtttcaccgccgtggcctttgtcacgggctcactggccctgtgggctccggcatttttattaaggtcgagagtggtgctcggggagaccccaccttgtctcccaggcgattcttgtagcagctctgattccctaatcttcggcctcataacgtgtcttaccggagtcctcggggtggggctgggcgtggaaattagccgcaggctgcgacatagcaatccaagagccgatccgcttgtgtgtgcgactgggcttttgggctcagcaccgttcctcttcttgtctctcgcttgcgccaggggtagtatcgtggctacatacattttcattttcatcggcgaaacccttctgtcaatgaattgggcaatcgtggccgacattctcctgtacgtggtcatccccaccaggaggtctaccgcagaagcctttcagatcgttttgtcccaccttctgggggacgccggatcaccctacttaatcggcctgatttccgacaggctccggcgaaactggccaccttcattcctcagcgagtttcgagccttacagttttctctcatgctttgtgccttcgtgggggctcttgggggtgcagctttcttgggcacagccatctttatagaggctgatagacgcagagcgcagcttcatgtccaaggtttgctgcacgaagctggatcaacagacgaccggattgtcgttccgcagcggggtagaagcacgagagtaccggtggctagcgtgcttatttag

SEQ ID NO: 222705 - DNA, 2213 bp, Artificial Sequence
  derived and/or modified sequence
gtcacatgaccggctttaagcaacatggcggctgccgtggtgcagcgcccgggctgagcgacagcaagtgcagcgggctcctaccccgggtgaggggtggcctccgcgtgggatcgtgccctcttcagcccgctcctgtccccgacatcacgtgtattccgcacgtcccctccgcgctgtgtgtctactgagacggggaggcgtgacagggcccgggtcccttctcagtggtgctctgtgcttcagggcaagctccccgtctccgggcgcacttccctcgcctgtgttcggtccatcctcctttctccagcctcctcccctcgcaggtgggatcgtcggtgggaccggagcgcgggcgggcgcggccccccgggaccatggccgggtccgacaccgcgcccttcctcagccaggcggatgacccggacgacgggccagtgcctggcaccccggggttgccagggtccacggggaacccgaagtccgaggagcccgaggtcccggaccaggaggggctgcagcgcatcaccggcctgtctcccggccgttcggctctcatagtggcggtgctgtgctacatcaatctcctgaactacatggaccgcttcaccgtggctggcgtccttcccgacatcgagcagttcttcaacatcggggacagtagctctgggctcatccagaccgtgttcatctccagttacatggtgttggcacctgtgtttggctacctgggtgacaggtacaatcggaagtatctcatgtgcgggggcattgccttctggtccctggtgacactggggtcatccttcatccccggagagcatttctggctgctcctcctgacccggggcctggtgggggtcggggaggccagttattccaccatcgcgcccactctcattgccgacctctttgtggccgaccagcggagccggatgctcagcatcttctactttgccattccggtgggcagtggtctgggctacattgcaggctccaaagtgaaggatatggctggagactggcactgggctctgagggtgacaccgggtctaggagtggtggccgttctgctgctgttcctggtagtgcgggagccgccaaggggagccgtggagcgccactcagatttgccacccctgaaccccacctcgtggtgggcagatctgagggctctggcaagaaatcctagtttcgtcctgtcttccctgggcttcactgctgtggcctttgtcacgggctccctggctctgtgggctccggcattcctgctgcgttcccgcgtggtccttggggagaccccaccctgccttcccggagactcctgctcttcctctgacagtctcatctttggactcatcacctgcctgaccggagtcctgggtgtgggcctgggtgtggagatcagccgccggctccgccactccaacccccgggctgatcccctggtctgtgccactggcctcctgggctctgcacccttcctcttcctgtcccttgcctgcgcccgtggtagcatcgtggccacttatattttcatcttcattggagagaccctcctgtccatgaactgggccatcgtggccgacattctgctgtacgtggtgatccctacccgacgctccaccgccgaggccttccagatcgtgctgtcccacctgctgggtgatgctgggagcccctacctcattggcctgatctctgaccgcctgcgccggaactggcccccctccttcttgtccgagttccgggctctgcagttctcgctcatgctctgcgcgtttgttggggcactgggcggcgcagccttcctgggcaccgccatcttcattgaggccgaccgccggcgggcacagctgcacgtgcagggcctgctgcacgaagcagggtccacagacgaccggattgtggtgccccagcggggccgctccacccgcgtgcccgtggccagtgtgctcatctgagaggctgccgctcacctacctgcacatctgccacagctggccctgggcccaccccacgaagggcctgggcctaaccccttggcctggcccagcttccagagggaccctgggccgtgtgccagctcccagacactacctgggtagctcaggggaggaggtgggggtccaggagggggatccctctccacaggggcagccccaagggctcggtgctatttgtaacggaataaaatttgtagccagacccca

SEQ ID NO: 222706 - DNA, 2125 bp, Artificial Sequence
  derived and/or modified sequence
gtcacatgaccggctttaagcaacatggcggctgccgtggtgcagcgcccgggctgagcgacagcaagtgcagcgggctcctaccccgggtgaggggtggcctccgcgtgggatcgtgccctcttcagcccgctcctgtccccgacatcacgtgtattccgcacgtcccctccgcgctgtgtgtctactgagacggggaggcgtgacagggcccgggtcccttctcagtggtgctctgtgcttcagggcaagctccccgtctccgggcgcacttccctcgcctgtgttcggtccatcctcctttctccagcctcctcccctcgcaggcggatgacccggacgacgggccagtgcctggcaccccggggttgccagggtccacggggaacccgaagtccgaggagcccgaggtcccggaccaggaggggctgcagcgcatcaccggcctgtctcccggccgttcggctctcatagtggcggtgctgtgctacatcaatctcctgaactacatggaccgcttcaccgtggctggcgtccttcccgacatcgagcagttcttcaacatcggggacagtagctctgggctcatccagaccgtgttcatctccagttacatggtgttggcacctgtgtttggctacctgggtgacaggtacaatcggaagtatctcatgtgcgggggcattgccttctggtccctggtgacactggggtcatccttcatccccggagagcatttctggctgctcctcctgacccggggcctggtgggggtcggggaggccagttattccaccatcgcgcccactctcattgccgacctctttgtggccgaccagcggagccggatgctcagcatcttctactttgccattccggtgggcagtggtctgggctacattgcaggctccaaagtgaaggatatggctggagactggcactgggctctgagggtgacaccgggtctaggagtggtggccgttctgctgctgttcctggtagtgcgggagccgccaaggggagccgtggagcgccactcagatttgccacccctgaaccccacctcgtggtgggcagatctgagggctctggcaagaaatcctagtttcgtcctgtcttccctgggcttcactgctgtggcctttgtcacgggctccctggctctgtgggctccggcattcctgctgcgttcccgcgtggtccttggggagaccccaccctgccttcccggagactcctgctcttcctctgacagtctcatctttggactcatcacctgcctgaccggagtcctgggtgtgggcctgggtgtggagatcagccgccggctccgccactccaacccccgggctgatcccctggtctgtgccactggcctcctgggctctgcacccttcctcttcctgtcccttgcctgcgcccgtggtagcatcgtggccacttatattttcatcttcattggagagaccctcctgtccatgaactgggccatcgtggccgacattctgctgtacgtggtgatccctacccgacgctccaccgccgaggccttccagatcgtgctgtcccacctgctgggtgatgctgggagcccctacctcattggcctgatctctgaccgcctgcgccggaactggcccccctccttcttgtccgagttccgggctctgcagttctcgctcatgctctgcgcgtttgttggggcactgggcggcgcagccttcctgggcaccgccatcttcattgaggccgaccgccggcgggcacagctgcacgtgcagggcctgctgcacgaagcagggtccacagacgaccggattgtggtgccccagcggggccgctccacccgcgtgcccgtggccagtgtgctcatctgagaggctgccgctcacctacctgcacatctgccacagctggccctgggcccaccccacgaagggcctgggcctaaccccttggcctggcccagcttccagagggaccctgggccgtgtgccagctcccagacactacctgggtagctcaggggaggaggtgggggtccaggagggggatccctctccacaggggcagccccaagggctcggtgctatttgtaacggaataaaatttgtagccagacccc

SEQ ID NO: 222707 - protein, 552 aa, Artificial Sequence
  derived and/or modified sequence
MLDHKDLEAEIHPLKNEERKSQENLGNPSKNEDNVKSAPPQSRLSRCRAAAFFLSLFLCLFVVFVVSFVIPCPDRPASQRMWRIDYSAAVIYDFLAVDDINGDRIQDVLFLYKNTNSSNNFSRSCVDEGFSSPCTFAAAVSGANGSTLWERPVAQDVALVECAVPQPRGSEAPSACILVGRPSSFIAVNLFTGETLWNHSSSFSGNASILSPLLQVPDVDGDGAPDLLVLTQEREEVSGHLYSGSTGHQIGLRGSLGVDGESGFLLHVTRTGAHYILFPCASSLCGCSVKGLYEKVTGSGGPFKSDPHWESMLNATTRRMLSHSSGAVRYLMHVPGNAGADVLLVGSEAFVLLDGQELTPRWTPKAAHVLRKPIFGRYKPDTLAVAVENGTGTDRQILFLDLGTGAVLCSLALPSLPGGPLSASLPTADHRSAFFFWGLHELGSTSETETGEARHSLYMFHPTLPRVLLELANVSTHIVAFDAVLFEPSRHAAYILLTGPADSEAPGLVSVIKHKVRDLVPSSRVVRLGEGGPDSDQAIRDRFSRLRYQSEA

SEQ ID NO: 222708 - protein, 51 aa, Artificial Sequence
  derived and/or modified sequence
MLDHKDLEAEIHPLKNEERKSQENLGNPSKNEDNVKSAPPQSRLSRCRAAA

SEQ ID NO: 222709 - protein, 531 aa, Artificial Sequence
  derived and/or modified sequence
MLDHKDLEAEIHPLKNEERKSQENLGNPSKNEDNVKSAPPQSRLSRCRAAAFFLSLFLCLFVVFVVSFVIPCPDRPASQRMWRIDYSAAVIYDFLAVDDINGDRIQDVLFLYKNTNSSNNFSRSCVDEGFSSPCTFAAAVSGANGSTLWERPVAQDVALVECAVPQPRGSEAPSACILVGRPSSFIAVNLFTGETLWNHSSSFSGNASILSPLLQVPDVDGDGAPDLLVLTQEREEVSGHLYSGSTGHQIGLRGSLGVDGESGFLLHVTRTGAHYILFPCASSLCGCSVKGLYEKVTGSGGPFKSDPHWESMLNATTRRMLSHSSGAVRYLMHVPGNAGADVLLVGSEAFVLLDGQELTPRWTPKAAHVLRKPIFGRYKPDTLAVAVENGTGTDRQILFLDLGTGAVLCSLALPSLPGGPLSASLPTADHRSAFFFWGLHELGSTSETETGEARHSLYMFHPTLPRVLLELANVSTHIVAFDGSHWATAERLLDGAELAPRPACPRLVTGVWEAARLCILLPGIRWLIYWF

SEQ ID NO: 222710 - protein, 540 aa, Artificial Sequence
  derived and/or modified sequence
MLDHKDLEAEIHPLKNEERKSQENLGNPSKNEDNVKSAPPQSRLSRCRAAAFFLSLFLCLFVVFVVSFVIPCPDRPASQRMWRIDYSAAVIYDFLAVDDINGDRIQDVLFLYKNTNSSNNFSRSCVDEGFSSPCTFAAAVSGANGSTLWERPVAQDVALVECAVPQPRGSEAPSACILVGRPSSFIAVNLFTGETLWNHSSSFSGNASILSPLLQVPDVDGDGAPDLLVLTQEREEVSGHLYSGSTGHQIGLRGSLGVDGESGFLLHVTRTGAHYILFPCASSLCGCSVKGLYEKVTGSGGPFKSDPHWESMLNATTRRMLSHSSGAVRYLMHVPGNAGADVLLVGSEAFVLLDGQELTPRWTPKAAHVLRKPIFGRYKPDTLAVAVENGTGTDRQILFLDLGTGAVLCSLALPSLPGGPLSASLPTADHRSAFFFWGLHELGSTSETETGEARHSLYMFHPTLPRVLLELANVSTHIVAFDAVLFEPSRHAAYILLTGPADSEAPGLVSVIKHKAHTGRQRRGSWTGQSSRRDLHVRVL

SEQ ID NO: 222711 - DNA, 1659 bp, Artificial Sequence
  derived and/or modified sequence
atgctggaccacaaggacctggaggccgagatccaccccctgaagaacgaggagagaaagagccaggagaacctgggcaaccccagcaagaacgaggacaacgtgaagagcgcccccccccagagcagactgagcagatgcagagccgccgccttcttcctgagcctgttcctgtgcctgttcgtggtgttcgtggtgagcttcgtgatcccctgccccgacagacccgccagccagagaatgtggagaatcgactacagcgccgccgtgatctacgacttcctggccgtggacgacatcaacggcgacagaatccaggacgtgctgttcctgtacaagaacaccaacagcagcaacaacttcagcagaagctgcgtggacgagggcttcagcagcccctgcaccttcgccgccgccgtgagcggcgccaacggcagcaccctgtgggagagacccgtggcccaggacgtggccctggtggagtgcgccgtgccccagcccagaggcagcgaggcccccagcgcctgcatcctggtgggcagacccagcagcttcatcgccgtgaacctgttcaccggcgagaccctgtggaaccacagcagcagcttcagcggcaacgccagcatcctgagccccctgctgcaggtgcccgacgtggacggcgacggcgcccccgacctgctggtgctgacccaggagagagaggaggtgagcggccacctgtacagcggcagcaccggccaccagatcggcctgagaggcagcctgggcgtggacggcgagagcggcttcctgctgcacgtgaccagaaccggcgcccactacatcctgttcccctgcgccagcagcctgtgcggctgcagcgtgaagggcctgtacgagaaggtgaccggcagcggcggccccttcaagagcgacccccactgggagagcatgctgaacgccaccaccagaagaatgctgagccacagcagcggcgccgtgagatacctgatgcacgtgcccggcaacgccggcgccgacgtgctgctggtgggcagcgaggccttcgtgctgctggacggccaggagctgacccccagatggacccccaaggccgcccacgtgctgagaaagcccatcttcggcagatacaagcccgacaccctggccgtggccgtggagaacggcaccggcaccgacagacagatcctgttcctggacctgggcaccggcgccgtgctgtgcagcctggccctgcccagcctgcccggcggccccctgagcgccagcctgcccaccgccgaccacagaagcgccttcttcttctggggcctgcacgagctgggcagcaccagcgagaccgagaccggcgaggccagacacagcctgtacatgttccaccccaccctgcccagagtgctgctggagctggccaacgtgagcacccacatcgtggccttcgacgccgtgctgttcgagcccagcagacacgccgcctacatcctgctgaccggccccgccgacagcgaggcccccggcctggtgagcgtgatcaagcacaaggtgagagacctggtgcccagcagcagagtggtgagactgggcgagggcggccccgacagcgaccaggccatcagagacagattcagcagactgagataccagagcgaggcctag

SEQ ID NO: 222712 - DNA, 1596 bp, Artificial Sequence
  derived and/or modified sequence
atgctggaccacaaggacctggaggccgagatccaccccctgaagaacgaggagagaaagagccaggagaacctgggcaaccccagcaagaacgaggacaacgtgaagagcgcccccccccagagcagactgagcagatgcagagccgccgccttcttcctgagcctgttcctgtgcctgttcgtggtgttcgtggtgagcttcgtgatcccctgccccgacagacccgccagccagagaatgtggagaatcgactacagcgccgccgtgatctacgacttcctggccgtggacgacatcaacggcgacagaatccaggacgtgctgttcctgtacaagaacaccaacagcagcaacaacttcagcagaagctgcgtggacgagggcttcagcagcccctgcaccttcgccgccgccgtgagcggcgccaacggcagcaccctgtgggagagacccgtggcccaggacgtggccctggtggagtgcgccgtgccccagcccagaggcagcgaggcccccagcgcctgcatcctggtgggcagacccagcagcttcatcgccgtgaacctgttcaccggcgagaccctgtggaaccacagcagcagcttcagcggcaacgccagcatcctgagccccctgctgcaggtgcccgacgtggacggcgacggcgcccccgacctgctggtgctgacccaggagagagaggaggtgagcggccacctgtacagcggcagcaccggccaccagatcggcctgagaggcagcctgggcgtggacggcgagagcggcttcctgctgcacgtgaccagaaccggcgcccactacatcctgttcccctgcgccagcagcctgtgcggctgcagcgtgaagggcctgtacgagaaggtgaccggcagcggcggccccttcaagagcgacccccactgggagagcatgctgaacgccaccaccagaagaatgctgagccacagcagcggcgccgtgagatacctgatgcacgtgcccggcaacgccggcgccgacgtgctgctggtgggcagcgaggccttcgtgctgctggacggccaggagctgacccccagatggacccccaaggccgcccacgtgctgagaaagcccatcttcggcagatacaagcccgacaccctggccgtggccgtggagaacggcaccggcaccgacagacagatcctgttcctggacctgggcaccggcgccgtgctgtgcagcctggccctgcccagcctgcccggcggccccctgagcgccagcctgcccaccgccgaccacagaagcgccttcttcttctggggcctgcacgagctgggcagcaccagcgagaccgagaccggcgaggccagacacagcctgtacatgttccaccccaccctgcccagagtgctgctggagctggccaacgtgagcacccacatcgtggccttcgacggcagccactgggccaccgccgagagactgctggacggcgccgagctggcccccagacccgcctgccccagactggtgaccggcgtgtgggaggccgccagactgtgcatcctgctgcccggcatcagatggctgatctactggttctag

SEQ ID NO: 222713 - DNA, 1623 bp, Artificial Sequence
  derived and/or modified sequence
atgctggaccacaaggacctggaggccgagatccaccccctgaagaacgaggagagaaagagccaggagaacctgggcaaccccagcaagaacgaggacaacgtgaagagcgcccccccccagagcagactgagcagatgcagagccgccgccttcttcctgagcctgttcctgtgcctgttcgtggtgttcgtggtgagcttcgtgatcccctgccccgacagacccgccagccagagaatgtggagaatcgactacagcgccgccgtgatctacgacttcctggccgtggacgacatcaacggcgacagaatccaggacgtgctgttcctgtacaagaacaccaacagcagcaacaacttcagcagaagctgcgtggacgagggcttcagcagcccctgcaccttcgccgccgccgtgagcggcgccaacggcagcaccctgtgggagagacccgtggcccaggacgtggccctggtggagtgcgccgtgccccagcccagaggcagcgaggcccccagcgcctgcatcctggtgggcagacccagcagcttcatcgccgtgaacctgttcaccggcgagaccctgtggaaccacagcagcagcttcagcggcaacgccagcatcctgagccccctgctgcaggtgcccgacgtggacggcgacggcgcccccgacctgctggtgctgacccaggagagagaggaggtgagcggccacctgtacagcggcagcaccggccaccagatcggcctgagaggcagcctgggcgtggacggcgagagcggcttcctgctgcacgtgaccagaaccggcgcccactacatcctgttcccctgcgccagcagcctgtgcggctgcagcgtgaagggcctgtacgagaaggtgaccggcagcggcggccccttcaagagcgacccccactgggagagcatgctgaacgccaccaccagaagaatgctgagccacagcagcggcgccgtgagatacctgatgcacgtgcccggcaacgccggcgccgacgtgctgctggtgggcagcgaggccttcgtgctgctggacggccaggagctgacccccagatggacccccaaggccgcccacgtgctgagaaagcccatcttcggcagatacaagcccgacaccctggccgtggccgtggagaacggcaccggcaccgacagacagatcctgttcctggacctgggcaccggcgccgtgctgtgcagcctggccctgcccagcctgcccggcggccccctgagcgccagcctgcccaccgccgaccacagaagcgccttcttcttctggggcctgcacgagctgggcagcaccagcgagaccgagaccggcgaggccagacacagcctgtacatgttccaccccaccctgcccagagtgctgctggagctggccaacgtgagcacccacatcgtggccttcgacgccgtgctgttcgagcccagcagacacgccgcctacatcctgctgaccggccccgccgacagcgaggcccccggcctggtgagcgtgatcaagcacaaggcccacaccggcagacagagaagaggcagctggaccggccagagcagcagaagagacctgcacgtgagagtgctgtag

SEQ ID NO: 222714 - DNA, 1659 bp, Artificial Sequence
  derived and/or modified sequence
atgctggatcataaggatctggaggcagagatccatccattaaagaacgaagaaaggaagagccaggagaacctgggcaacccatcaaagaatgaagacaatgtcaagagcgctccaccacaatcccgcttgtccagatgccgcgctgcagccttcttcctttccttgtttctgtgtctgtttgtggtgttcgtggtgtcttttgttataccttgtcctgacagaccggccagccagagaatgtggcgaattgactactccgccgctgtcatctacgacttcctggccgtggacgatatcaatggagatagaattcaggatgtactttttttatacaaaaatactaattcatccaataacttctctcggtcatgtgtggacgagggtttctcctcaccctgcaccttcgcagctgctgtctccggtgcaaacggatcaacgctgtgggaaaggcccgtggcccaggacgtggcccttgtggagtgcgccgtgccacagccacgaggaagcgaagcgccttctgcctgtattctggtggggcggccatcttctttcattgccgtgaatctgttcactggggaaacactgtggaatcacagcagctccttcagcggtaacgcttccattctgtcacccctgcttcaggtccctgacgtcgacggggacggggcacccgacctgctggtgctaacccaggagcgggaagaggtgagcgggcatctctacagtggctcaaccggtcaccagattgggctcaggggctctctgggggtggacggagagagtggatttcttctgcatgtcactcgtactggtgcacactatattctctttccatgcgcatccagcttgtgtgggtgctcggtgaaaggtttatacgagaaggtcaccgggagtggggggccatttaagagcgacccccactgggaatcgatgcttaacgccacaactaggcggatgctgtcgcactcatccggcgcagtcagataccttatgcacgtgcctgggaatgcaggggccgatgtgttgctggtgggatcagaggcatttgtgcttctggatggccaggagttgaccccccgctggacccctaaagctgctcacgtgctgaggaagccaattttcggcaggtacaaaccggacacgctggctgtggcggtcgagaatggaacgggcacggacagacagattttattcctcgacctggggactggtgcggtgctatgtagtttggccctgccctccctccccggaggaccactctccgcctccctgccaacagcagatcatcgcagtgcctttttcttttggggtctgcacgagctcggcagtaccagcgagactgaaactggcgaagctagacattctttgtatatgtttcaccctactctgccgcgcgtgttacttgaactggcgaatgtgagcacacatatagtggctttcgatgccgtcctgtttgaaccatctcgccatgccgcttacatcctgctcacaggtccagcggactctgaggccccagggctggttagcgtgattaagcacaaggtgagagatcttgtgcccagttcccgcgtggtccgacttggagaggggggacccgattctgatcaggccatcagggaccgttttagtaggctccgctaccagtccgaagcctag

SEQ ID NO: 222715 - DNA, 1659 bp, Artificial Sequence
  derived and/or modified sequence
atgctcgaccacaaagacctcgaggcagagattcacccactgaaaaatgaagagcgcaaaagccaggaaaacctcggcaatccctcaaagaatgaagataacgtcaagagcgccccacctcagagtcgcttgtctcggtgtcgagccgctgcattcttcctgagcttgtttttgtgtctattcgtcgtctttgttgtgtcgtttgtcataccgtgcccagatagaccagcctcccaacggatgtggcgcatcgattactcagccgccgtgatttatgacttcctggccgtggatgacattaacggtgaccggatccaagacgtactgttcctgtacaagaataccaattccagcaacaacttcagtcgctcttgtgtggacgagggtttcagcagcccttgtaccttcgctgctgcagtgagtggggcaaacggctctacactgtgggaaaggccagttgcacaggacgtagctttggtcgagtgcgcagtcccccagccgagaggctcagaggctcccagcgcttgcatcctagtgggaagaccatcatccttcatcgccgtcaatcttttcactggcgaaacgctttggaaccacagcagctcattctcaggcaacgcatccatccttagccctcttctgcaggtgcccgatgttgacggcgacggcgctccagatctgttggtgcttactcaagagcgggaagaggtcagcgggcacctgtatagtggcagcactgggcaccaaatcggcctgaggggctccctgggcgtggacggagagagcggattcttgctgcatgtgacccgcacaggggcccattacatcctgttcccttgtgccagtagcctgtgcggctgctcagttaagggcctgtacgaaaaagtgacaggcagcgggggtcctttcaaatctgaccctcactgggagtccatgttaaacgccacaacacggcgcatgctgtctcatagcagtggggcggtccgctacctgatgcacgtgccaggaaacgctggcgccgacgtactactcgtgggttccgaagctttcgtcctgctggacgggcaggaattgacccctcgatggacaccgaaggccgcacatgttctgcgcaagccaatctttggcaggtataaacctgatacacttgcagtggctgtagagaacggtactgggacggatagacagattcttttcctagatttgggcaccggggcagtcctctgcagtcttgcactgcccagtctgccgggcggacctctgtccgcttcactccccacagccgaccatcgaagtgctttctttttttggggcctgcacgaactgggatcaacctctgaaaccgaaacaggtgaagccaggcatagtctgtatatgttccaccctactctaccaagagtgctactagaattggctaacgttagcacacacatcgtcgcctttgatgccgtgctgttcgaacccagcaggcacgccgcgtatatactcctgactggacctgccgactccgaggccccgggacttgttagtgttatcaaacacaaagttcgggatctggtgccgtcaagccgtgtcgtacggctgggggagggggggcccgattctgatcaggcaatcagggacagatttagccggctgcgctaccaaagcgaagcctag

SEQ ID NO: 222716 - DNA, 1596 bp, Artificial Sequence
  derived and/or modified sequence
atgctggatcacaaagacctggaagcggaaattcaccccctgaagaacgaggagaggaagagccaggaaaacctggggaacccctctaagaatgaggacaatgtgaagtcggctccaccccaatcacgcttatctcgctgcagggccgccgccttctttctctctctgtttctgtgtctcttcgttgtcttcgtggtctccttcgtgattccgtgtccagaccgtcctgccagtcagaggatgtggcgaatcgattattccgctgccgtaatttatgacttcctggcagtagacgacattaacggggacaggatccaggacgtgctgttcctttataagaacactaactcatctaataatttttcacgctcttgcgttgacgaggggtttagtagcccctgtacttttgccgccgctgtttcaggagccaacggcagcactctgtgggagcgtcccgttgcccaggacgtagccctggttgaatgcgccgtaccccagccgcgcgggagcgaagcaccatccgcatgcattttagtcgggcgcccgagcagcttcatcgcggtcaacctattcacaggcgagacgctgtggaaccacagtagcagcttcagcggtaacgctagtatcctctcgcccttactccaggtcccagatgttgacggagacggagctccggacctgctggtgttgacccaggagagggaggaagtcagcggtcacctatacagcggtagtacaggccaccagattggcctgcgcgggagtctgggggtggacggggaaagcggttttctgctgcatgtaactcggaccggagctcactacatactttttccttgtgcctcatctctgtgcggctgctctgtaaagggtctgtacgagaaggttactggctccggaggcccctttaagtctgaccctcattgggagagcatgctgaacgccactacccggcggatgctttcgcactccagtggagctgtgcgatacctgatgcatgtaccggggaatgcaggagccgatgtcctgctggtagggtctgaagccttcgtgctgcttgacggtcaggagctgactcctcgctggacacccaaggccgcgcatgtgctcagaaagcctatatttgggcggtataaacctgacacactggccgtggcggtggagaacggcactgggaccgaccgccagatcctttttttagacctggggacgggagctgttttgtgttctctcgcactgcccagcttgccaggaggccctctgtcagcttccctgcccacagcagatcaccgctctgctttctttttctggggtcttcacgaacttggaagcacatccgagacagaaaccggggaagcacgccattcgctgtacatgtttcaccctaccctgccccgggtactgctcgagctggctaatgtgagcactcatatagtcgcattcgacggttctcactgggcaaccgccgagagattactcgacggcgcggaactagccccccgaccggcatgccccaggctggtcacgggtgtttgggaggcagctcgcttatgcatattgcttcctggcattcggtggcttatctactggttttag

SEQ ID NO: 222717 - DNA, 1623 bp, Artificial Sequence
  derived and/or modified sequence
atgctcgaccataaggatctggaggcggaaatacaccccctgaaaaacgaggagcgaaagagccaggaaaatctcggtaatccttctaagaacgaggacaacgttaagagcgcccccccacagtctcgtctttcaaggtgtcgggccgccgccttctttctctcattgtttctgtgtttgttcgttgtctttgtagttagtttcgttatcccctgtccggataggcccgcttcgcaacgaatgtggcggatcgactattctgcggccgtgatatacgattttctcgctgtggatgacatcaacggcgaccgtatccaggacgttctctttctttataagaataccaattctagtaataacttcagcaggagttgtgtggacgagggattctcatctccatgcactttcgccgctgccgttagcggggctaatggcagcaccctctgggagaggcctgtggcacaggacgtggctctcgttgaatgtgccgtgccccaaccgcgaggcagtgaagcccctagtgcatgcatattggtgggccggccaagcagtttcatcgccgtgaatctgtttactggtgaaactctctggaaccactcttcttcctttagcggtaatgcttctatcctttcacccctattacaagtacctgatgttgacggcgatggcgcacctgatctcctcgttttgacccaggaacgtgaagaggtgtctggtcatctttactcgggttcaacaggacatcaaattggcttgagaggatcccttggagtggatggggagagcggcttcctgttgcacgtgacacgcacaggcgcccattacatcctttttccctgtgccagttcactatgcggttgtagcgttaaggggctctacgaaaaggttaccggcagcgggggccctttcaagagcgatccccattgggaatcgatgctgaacgctacaaccagaaggatgctcagccactctagcggtgcagtgaggtacctgatgcacgtccctggaaatgcaggagccgatgtcttactggtgggctcggaggccttcgtgctgctggacggacaagaactcacgcctcgatggactcctaaagccgctcatgtccttcgaaagcctattttcggcaggtataagccggacactcttgccgttgcagtagagaatgggactggcactgaccgtcagattctttttctagacctgggaactggggcagttttgtgttcccttgctctgccatctttacccggcggtccactgtctgctagcttgcccactgccgaccatcgtagcgcatttttcttttggggcctgcatgagctgggatcaacgtcagagactgagaccggagaagctcggcatagcctgtatatgtttcacccaaccctgcctagggtgctgctggaactcgcaaatgtttccactcacatagttgcttttgacgctgtcctgtttgagccttcaaggcatgcagcttacatcttgttaacaggacccgcagatagcgaagctcccggtctagttagtgtgatcaagcataaggcccacacgggcagacagcggcggggaagctggaccggccagagttccaggagagacctccacgtgcgagtcttgtag

SEQ ID NO: 222718 - DNA, 2901 bp, Artificial Sequence
  derived and/or modified sequence
ccgcggcggcaggtccacctgggcttgcgaaggcacagattccccgtccacagctcacgaccagatgcaccagcaggagtccacatcgaggacgtcctccgggcactcccacgaccaggagttaaactttgggatgtgcccgtgatgttggaccacaaggacttagaggccgaaatccaccccttgaaaaatgaagaaagaaaatcgcaggaaaatctgggaaatccatcaaaaaatgaggataacgtgaaaagcgcgcctccacagtcccggctctcccggtgccgagcggcggcgttttttctttcattgtttctctgcctttttgtggtgttcgtcgtctcattcgtcatcccgtgtccagaccggccggcgtcacagcgaatgtggaggatagactacagtgccgctgttatctatgactttctggctgtggatgatataaacggggacaggatccaagatgttctttttctttataaaaacaccaacagcagcaacaatttcagccgatcctgtgtggacgaaggcttttcctctccctgcacctttgcagctgctgtgtcgggggccaacggcagcacgctctgggagagacctgtggcccaagacgtggccctcgtggagtgtgctgtgccccagccaagaggcagtgaggcaccttctgcctgcatcctggtgggcagacccagttctttcattgcagtcaacttgttcacaggggaaaccctgtggaaccacagcagcagcttcagcgggaatgcgtccatcctgagccctctgctgcaggtgcctgatgtggacggcgatggggccccagacctgctggttctcacccaggagcgggaggaggttagtggccacctctactccggcagcaccgggcaccagattggcctcagaggcagccttggtgtggacggggaaagtggcttcctccttcacgtcaccaggacaggtgcccactacatcctctttccctgcgcaagctccctctgcggctgctctgtgaagggtctctacgagaaggtgaccgggagcggcggcccgttcaagagtgacccgcactgggagagcatgctcaatgccaccacccgcaggatgctttcccacagctctggagcagtgcgctacctgatgcatgtcccagggaacgccggtgcagatgtgcttcttgtgggctcagaggccttcgtgctgctggacgggcaggagctgacgcctcgctggacacccaaggcagcccatgtcctgagaaaacccatcttcggccgctacaaaccagacaccttggctgtagccgttgaaaacggaactggcaccgacagacagatcctgtttctggaccttggcactggagccgtcctgtgtagcctagccctcccgagcctccctgggggtccactgtccgccagcctgccgaccgcagaccaccgctcagccttcttcttctggggcctccacgagctggggagcaccagcgagacggagaccggggaggcccggcacagcctgtacatgttccaccccaccctgccgcgcgtgctgctggagctggccaatgtctctacccacattgtcgcctttgacgccgtcctgtttgagccaagccgccacgccgcctacatccttctgacaggcccggcagactcagaggcacccggcctggtctctgtgatcaagcacaaggtgcgggaccttgtcccaagcagcagggtggtccgcctgggtgagggtgggccagacagtgaccaagccatcagggaccggttctcccggctgcggtaccagagtgaggcgtagaggcacgccagccagagcctgtggagagactccgcctgctgacactaaacgtcctgggaagtgggcccttccctgggtctctgcactgactcccccactcctgaccctggtgatggtcgccactgggcagcagcagccttaccagtcctccatgatcacacccagggacctgcatgggtgaggggacaccctgggcctctctcccgcccagcatcctccctgagtccccacacagggcctcactctgcaccccaccagggtcccgctcacaccaggcagccttcatagtggtctccctggccaccttgggcagagctgggtcatgcagcaccccatccttacccggtgccctctccttgccagcttctccccaggccagagcggccatcgcgtagaaagaaccagggtgtccccgggacaggccgtcccccaccccatcctgtagaagtccattccccttttccctcctgtgctctgtcccccaaggagtcatggaactcagggtactgggcctcaacgggaacctgagacagctccagcttcgcagcccttcccggagctacagggggatcctctagcatggggggtgtgacttggttcctttgaccaggtcctgtgaggaagcctggagcaagggtctcccccagcaggatgggtggggcctgctctggagctgagcccgtggccgctcacaggtgtccttagtggtgttgcagctgtctactggctgcatgtgctgtgaatatcccaaggaactggctgtggaatgcgtgtttgggtcagtctgtgccctctcagtagacactggagctgctctgtccctgaagaggccccgtgccccaggcatggcaagcgcctgcctctccccttccggtgctcacacgcccacgccgtgccacccgatgcaggactcacctctgtgccttgctgctcctgaggcccaagggcagccatggtgctctgtactgctcgggccgcccaggtcacagagcctgagcttcgtagccaaagcagcctgatgacccacccaccaaggaagaaagcagaataaacatttttgcactgcctgaaaaaccccggtggtcaggcgtgagccta

SEQ ID NO: 222719 - DNA, 3213 bp, Artificial Sequence
  derived and/or modified sequence
tcgggagaggaggaggaggggagcgaggacgcagagaaggaggggaaagaggacggagaggagcgaggacggaggggggacgggaacgaagaggggcgaggacgttcagcatccattgcgacagcgacaaacaggacaccgccaggttcccggcggaggcagcgcccaagatccccgttgccgagcaaccgaagcatggcggtggggcggggtcggagcctgcgcatttccgcccccgcccgcccggctggtcggaagtgacgccagggggcggggccagcggcgcggtcgggtgagaggccgcggcggcaggtccacctgggcttgcgaaggcacagattccccgtccacagctcacgaccagatgcaccagcaggagtccacatcgaggacgtcctccgggcactcccacgaccagtgaccaggagttaaactttgggatgtgcccgtgatgttggaccacaaggacttagaggccgaaatccaccccttgaaaaatgaagaaagaaaatcgcaggaaaatctgggaaatccatcaaaaaatgaggataacgtgaaaagcgcgcctccacagtcccggctctcccggtgccgagcggcggcgttttttctttcattgtttctctgcctttttgtggtgttcgtcgtctcattcgtcatcccgtgtccagaccggccggcgtcacagcgaatgtggaggatagactacagtgccgctgttatctatgactttctggctgtggatgatataaacggggacaggatccaagatgttctttttctttataaaaacaccaacagcagcaacaatttcagccgatcctgtgtggacgaaggcttttcctctccctgcacctttgcagctgctgtgtcgggggccaacggcagcacgctctgggagagacctgtggcccaagacgtggccctcgtggagtgtgctgtgccccagccaagaggcagtgaggcaccttctgcctgcatcctggtgggcagacccagttctttcattgcagtcaacttgttcacaggggaaaccctgtggaaccacagcagcagcttcagcgggaatgcgtccatcctgagccctctgctgcaggtgcctgatgtggacggcgatggggccccagacctgctggttctcacccaggagcgggaggaggttagtggccacctctactccggcagcaccgggcaccagattggcctcagaggcagccttggtgtggacggggaaagtggcttcctccttcacgtcaccaggacaggtgcccactacatcctctttccctgcgcaagctccctctgcggctgctctgtgaagggtctctacgagaaggtgaccgggagcggcggcccgttcaagagtgacccgcactgggagagcatgctcaatgccaccacccgcaggatgctttcccacagctctggagcagtgcgctacctgatgcatgtcccagggaacgccggtgcagatgtgcttcttgtgggctcagaggccttcgtgctgctggacgggcaggagctgacgcctcgctggacacccaaggcagcccatgtcctgagaaaacccatcttcggccgctacaaaccagacaccttggctgtagccgttgaaaacggaactggcaccgacagacagatcctgtttctggaccttggcactggagccgtcctgtgtagcctagccctcccgagcctccctgggggtccactgtccgccagcctgccgaccgcagaccaccgctcagccttcttcttctggggcctccacgagctggggagcaccagcgagacggagaccggggaggcccggcacagcctgtacatgttccaccccaccctgccgcgcgtgctgctggagctggccaatgtctctacccacattgtcgcctttgacgccgtcctgtttgagccaagccgccacgccgcctacatccttctgacaggcccggcagactcagaggcacccggcctggtctctgtgatcaagcacaaggtgcgggaccttgtcccaagcagcagggtggtccgcctgggtgagggtgggccagacagtgaccaagccatcagggaccggttctcccggctgcggtaccagagtgaggcgtagaggcacgccagccagagcctgtggagagactccgcctgctgacactaaacgtcctgggaagtgggcccttccctgggtctctgcactgactcccccactcctgaccctggtgatggtcgccactgggcagcagcagccttaccagtcctccatgatcacacccagggacctgcatgggtgaggggacaccctgggcctctctcccgcccagcatcctccctgagtccccacacagggcctcactctgcaccccaccagggtcccgctcacaccaggcagccttcatagtggtctccctggccaccttgggcagagctgggtcatgcagcaccccatccttacccggtgccctctccttgccagcttctccccaggccagagcggccatcgcgtagaaagaaccagggtgtccccgggacaggccgtcccccaccccatcctgtagaagtccattccccttttccctcctgtgctctgtcccccaaggagtcatggaactcagggtactgggcctcaacgggaacctgagacagctccagcttcgcagcccttcccggagctacagggggatcctctagcatggggggtgtgacttggttcctttgaccaggtcctgtgaggaagcctggagcaagggtctcccccagcaggatgggtggggcctgctctggagctgagcccgtggccgctcacaggtgtccttagtggtgttgcagctgtctactggctgcatgtgctgtgaatatcccaaggaactggctgtggaatgcgtgtttgggtcagtctgtgccctctcagtagacactggagctgctctgtccctgaagaggccccgtgccccaggcatggcaagcgcctgcctctccccttccggtgctcacacgcccacgccgtgccacccgatgcaggactcacctctgtgccttgctgctcctgaggcccaagggcagccatggtgctctgtactgctcgggccgcccaggtcacagagcctgagcttcgtagccaaagcagcctgatgacccacccaccaaggaagaaagcagaataaacatttttgcactgcctgaaaaaccccggtggtcaggcgtgagcctagcgtg

SEQ ID NO: 222720 - DNA, 2263 bp, Artificial Sequence
  derived and/or modified sequence
cgggtgagaggccgcggcggcaggtccacctgggcttgcgaaggcacagattccccgtccacagctcacgaccagatgcaccagcaggagtccacatcgaggacgtcctccgggcactcccacgaccagtgaccaggagttaaactttgggatgtgcccgtgatgttggaccacaaggacttagaggccgaaatccaccccttgaaaaatgaagaaagaaaatcgcaggaaaatctgggaaatccatcaaaaaatgaggataacgtgaaaagcgcgcctccacagtcccggctctcccggtgccgagcggcggcgttttttctttcattgtttctctgcctttttgtggtgttcgtcgtctcattcgtcatcccgtgtccagaccggccggcgtcacagcgaatgtggaggatagactacagtgccgctgttatctatgactttctggctgtggatgatataaacggggacaggatccaagatgttctttttctttataaaaacaccaacagcagcaacaatttcagccgatcctgtgtggacgaaggcttttcctctccctgcacctttgcagctgctgtgtcgggggccaacggcagcacgctctgggagagacctgtggcccaagacgtggccctcgtggagtgtgctgtgccccagccaagaggcagtgaggcaccttctgcctgcatcctggtgggcagacccagttctttcattgcagtcaacttgttcacaggggaaaccctgtggaaccacagcagcagcttcagcgggaatgcgtccatcctgagccctctgctgcaggtgcctgatgtggacggcgatggggccccagacctgctggttctcacccaggagcgggaggaggttagtggccacctctactccggcagcaccgggcaccagattggcctcagaggcagccttggtgtggacggggaaagtggcttcctccttcacgtcaccaggacaggtgcccactacatcctctttccctgcgcaagctccctctgcggctgctctgtgaagggtctctacgagaaggtgaccgggagcggcggcccgttcaagagtgacccgcactgggagagcatgctcaatgccaccacccgcaggatgctttcccacagctctggagcagtgcgctacctgatgcatgtcccagggaacgccggtgcagatgtgcttcttgtgggctcagaggccttcgtgctgctggacgggcaggagctgacgcctcgctggacacccaaggcagcccatgtcctgagaaaacccatcttcggccgctacaaaccagacaccttggctgtagccgttgaaaacggaactggcaccgacagacagatcctgtttctggaccttggcactggagccgtcctgtgtagcctagccctcccgagcctccctgggggtccactgtccgccagcctgccgaccgcagaccaccgctcagccttcttcttctggggcctccacgagctggggagcaccagcgagacggagaccggggaggcccggcacagcctgtacatgttccaccccaccctgccgcgcgtgctgctggagctggccaatgtctctacccacattgtcgcctttgacggctcacactgggcgacagcggagaggctcttggacggggcagagctcgcgccgagacctgcatgtccgcgtcttgtgacgggtgtgtgggaagccgcccgcctgtgcatcttgcttccgggtattcgctggctgatttactggttttagagatggggatgggcacccagtgctggactgaagaccagagaaggtggagctccctgtggccttggtctcacctctcttcagcgggatcccagcctctgccaggagggccttgtacatgtcagacttcaggaaccttgggtaggagtcctacaagagacagcgtccagcccctgacccttctgcctcctcacctctcagccagctccacccgaaggagcagccaaacattgctggagcctcctccagccacagagtctccggcggacagggtgctggaggcagccgcctcggacctgcccagaccaaggcagacgcagggagacctgggctcccgtctgcctgggccatgtcgcagcaaaaaatggcaagagccctggtggccacgtgtagaggaataaaccgcggcacctcctcagccattagcgggaaccaggaatggctccgtgtgccccacagagtgagggcagggttgtggagtcaaataaaaaaacaaggtaggccacgc

SEQ ID NO: 222721 - DNA, 1767 bp, Artificial Sequence
  derived and/or modified sequence
ccgcggcggcaggtccacctgggcttgcgaaggcacagattccccgtccacagctcacgaccagatgcaccagcaggagtccacatcgaggacgtcctccgggcactcccacgaccaggagttaaactttgggatgtgcccgtgatgttggaccacaaggacttagaggccgaaatccaccccttgaaaaatgaagaaagaaaatcgcaggaaaatctgggaaatccatcaaaaaatgaggataacgtgaaaagcgcgcctccacagtcccggctctcccggtgccgagcggcggcgttttttctttcattgtttctctgcctttttgtggtgttcgtcgtctcattcgtcatcccgtgtccagaccggccggcgtcacagcgaatgtggaggatagactacagtgccgctgttatctatgactttctggctgtggatgatataaacggggacaggatccaagatgttctttttctttataaaaacaccaacagcagcaacaatttcagccgatcctgtgtggacgaaggcttttcctctccctgcacctttgcagctgctgtgtcgggggccaacggcagcacgctctgggagagacctgtggcccaagacgtggccctcgtggagtgtgctgtgccccagccaagaggcagtgaggcaccttctgcctgcatcctggtgggcagacccagttctttcattgcagtcaacttgttcacaggggaaaccctgtggaaccacagcagcagcttcagcgggaatgcgtccatcctgagccctctgctgcaggtgcctgatgtggacggcgatggggccccagacctgctggttctcacccaggagcgggaggaggttagtggccacctctactccggcagcaccgggcaccagattggcctcagaggcagccttggtgtggacggggaaagtggcttcctccttcacgtcaccaggacaggtgcccactacatcctctttccctgcgcaagctccctctgcggctgctctgtgaagggtctctacgagaaggtgaccgggagcggcggcccgttcaagagtgacccgcactgggagagcatgctcaatgccaccacccgcaggatgctttcccacagctctggagcagtgcgctacctgatgcatgtcccagggaacgccggtgcagatgtgcttcttgtgggctcagaggccttcgtgctgctggacgggcaggagctgacgcctcgctggacacccaaggcagcccatgtcctgagaaaacccatcttcggccgctacaaaccagacaccttggctgtagccgttgaaaacggaactggcaccgacagacagatcctgtttctggaccttggcactggagccgtcctgtgtagcctagccctcccgagcctccctgggggtccactgtccgccagcctgccgaccgcagaccaccgctcagccttcttcttctggggcctccacgagctggggagcaccagcgagacggagaccggggaggcccggcacagcctgtacatgttccaccccaccctgccgcgcgtgctgctggagctggccaatgtctctacccacattgtcgcctttgacgccgtcctgtttgagccaagccgccacgccgcctacatccttctgacaggcccggcagactcagaggcacccggcctggtctctgtgatcaagcacaaggctcacactgggcgacagcggagaggctcttggacggggcagagctcgcgccgagacctgcatgtccgcgtcttgtga

SEQ ID NO: 222722 - DNA, 1659 bp, Artificial Sequence
  derived and/or modified sequence
atgctggaccacaaggacctggaggccgagatccaccccctgaagaatgaggagaggaagagccaggagaacctgggcaaccccagcaagaatgaagacaacgtgaagagcgccccaccccagagccggctgagccgctgcagagctgctgccttcttcctgagcctcttcctgtgcctgtttgtggtgtttgtggtgtcctttgtgatcccctgcccagacaggcctgccagccagaggatgtggagaattgactacagcgctgctgtgatctatgacttcctggccgtggatgacatcaatggagaccgcatccaggatgtgctcttcctgtacaagaacaccaacagcagcaacaacttcagccgcagctgtgtggatgagggcttcagcagcccctgcacctttgctgctgctgtgtctggggccaacggcagcaccctgtgggagaggcctgtggcccaggatgtggccctggtggagtgtgctgtgccccagccccggggcagcgaggcccccagcgcctgcatcctggtgggccggcccagcagcttcatcgctgtgaacctcttcaccggggagaccctgtggaaccacagcagcagcttctctggaaatgccagcatcctgagccccctgctgcaggtgcctgatgtggatggagatggagccccagacctgctggtgctgacccaggagcgggaggaggtgtctggccacctgtacagcggcagcacaggccaccagatcggcctgcggggcagcctgggcgtggatggagagagcggcttcctgctgcacgtgaccaggactggagcccactacatcctcttcccctgtgccagcagcctgtgtggctgcagcgtgaagggcctgtatgagaaggtgactggaagtggcggccccttcaagagtgacccccactgggagagcatgctgaatgccaccaccaggaggatgctgagccacagcagtggagctgtgcgctacctgatgcacgtgcctggaaatgctggagcagatgtgctgctggtgggcagcgaggcctttgtgctgctggatggccaggagctgaccccccgctggacccccaaggccgcccacgtgctgaggaagcccatcttcggccgctacaagccagacaccctggccgtggccgtggagaatggaactggaacagaccggcagatcctcttcctggacctgggcaccggggctgtgctgtgcagcctggccctgcccagcctgcccggcggccccctgagcgccagcctgcccacagctgaccacaggtctgccttcttcttctggggcctgcacgagctgggcagcaccagcgagacagagaccggggaggcccggcacagcctgtacatgttccaccccaccctgccccgggtgctgctggagctggccaacgtgtccacccacatcgtggcctttgatgctgtgctgtttgagcccagcagacatgctgcctacatcctgctgaccggccctgctgacagcgaggcccctggcctggtgtctgtcatcaagcacaaggtgcgggacctggtgcccagcagccgggtggtgcggctgggggagggcggccctgacagcgaccaggccatccgggaccgcttcagccggctgcgctaccagagcgaggcctag

SEQ ID NO: 222723 - DNA, 1596 bp, Artificial Sequence
  derived and/or modified sequence
atgctggaccacaaggacctggaggccgagatccaccccctgaagaatgaggagaggaagagccaggagaacctgggcaaccccagcaagaatgaagacaacgtgaagagcgccccaccccagagccggctgagccgctgcagagctgctgccttcttcctgagcctcttcctgtgcctgtttgtggtgtttgtggtgtcctttgtgatcccctgcccagacaggcctgccagccagaggatgtggagaattgactacagcgctgctgtgatctatgacttcctggccgtggatgacatcaatggagaccgcatccaggatgtgctcttcctgtacaagaacaccaacagcagcaacaacttcagccgcagctgtgtggatgagggcttcagcagcccctgcacctttgctgctgctgtgtctggggccaacggcagcaccctgtgggagaggcctgtggcccaggatgtggccctggtggagtgtgctgtgccccagccccggggcagcgaggcccccagcgcctgcatcctggtgggccggcccagcagcttcatcgctgtgaacctcttcaccggggagaccctgtggaaccacagcagcagcttctctggaaatgccagcatcctgagccccctgctgcaggtgcctgatgtggatggagatggagccccagacctgctggtgctgacccaggagcgggaggaggtgtctggccacctgtacagcggcagcacaggccaccagatcggcctgcggggcagcctgggcgtggatggagagagcggcttcctgctgcacgtgaccaggactggagcccactacatcctcttcccctgtgccagcagcctgtgtggctgcagcgtgaagggcctgtatgagaaggtgactggaagtggcggccccttcaagagtgacccccactgggagagcatgctgaatgccaccaccaggaggatgctgagccacagcagtggagctgtgcgctacctgatgcacgtgcctggaaatgctggagcagatgtgctgctggtgggcagcgaggcctttgtgctgctggatggccaggagctgaccccccgctggacccccaaggccgcccacgtgctgaggaagcccatcttcggccgctacaagccagacaccctggccgtggccgtggagaatggaactggaacagaccggcagatcctcttcctggacctgggcaccggggctgtgctgtgcagcctggccctgcccagcctgcccggcggccccctgagcgccagcctgcccacagctgaccacaggtctgccttcttcttctggggcctgcacgagctgggcagcaccagcgagacagagaccggggaggcccggcacagcctgtacatgttccaccccaccctgccccgggtgctgctggagctggccaacgtgtccacccacatcgtggcctttgatggcagccactgggccacagctgagcggctgctggatggagctgagctggcccccaggcctgcctgcccccggctggtgactggagtgtgggaggccgcccggctgtgcatcctgctgcccggcatccgctggctgatctactggttctag

SEQ ID NO: 222724 - DNA, 1623 bp, Artificial Sequence
  derived and/or modified sequence
atgctggaccacaaggacctggaggccgagatccaccccctgaagaatgaggagaggaagagccaggagaacctgggcaaccccagcaagaatgaagacaacgtgaagagcgccccaccccagagccggctgagccgctgcagagctgctgccttcttcctgagcctcttcctgtgcctgtttgtggtgtttgtggtgtcctttgtgatcccctgcccagacaggcctgccagccagaggatgtggagaattgactacagcgctgctgtgatctatgacttcctggccgtggatgacatcaatggagaccgcatccaggatgtgctcttcctgtacaagaacaccaacagcagcaacaacttcagccgcagctgtgtggatgagggcttcagcagcccctgcacctttgctgctgctgtgtctggggccaacggcagcaccctgtgggagaggcctgtggcccaggatgtggccctggtggagtgtgctgtgccccagccccggggcagcgaggcccccagcgcctgcatcctggtgggccggcccagcagcttcatcgctgtgaacctcttcaccggggagaccctgtggaaccacagcagcagcttctctggaaatgccagcatcctgagccccctgctgcaggtgcctgatgtggatggagatggagccccagacctgctggtgctgacccaggagcgggaggaggtgtctggccacctgtacagcggcagcacaggccaccagatcggcctgcggggcagcctgggcgtggatggagagagcggcttcctgctgcacgtgaccaggactggagcccactacatcctcttcccctgtgccagcagcctgtgtggctgcagcgtgaagggcctgtatgagaaggtgactggaagtggcggccccttcaagagtgacccccactgggagagcatgctgaatgccaccaccaggaggatgctgagccacagcagtggagctgtgcgctacctgatgcacgtgcctggaaatgctggagcagatgtgctgctggtgggcagcgaggcctttgtgctgctggatggccaggagctgaccccccgctggacccccaaggccgcccacgtgctgaggaagcccatcttcggccgctacaagccagacaccctggccgtggccgtggagaatggaactggaacagaccggcagatcctcttcctggacctgggcaccggggctgtgctgtgcagcctggccctgcccagcctgcccggcggccccctgagcgccagcctgcccacagctgaccacaggtctgccttcttcttctggggcctgcacgagctgggcagcaccagcgagacagagaccggggaggcccggcacagcctgtacatgttccaccccaccctgccccgggtgctgctggagctggccaacgtgtccacccacatcgtggcctttgatgctgtgctgtttgagcccagcagacatgctgcctacatcctgctgaccggccctgctgacagcgaggcccctggcctggtgtctgtcatcaagcacaaggcccacacaggccggcagaggcggggctcctggacaggccagagcagccggcgggacctgcacgtgcgggtgctgtag

SEQ ID NO: 222725 - DNA, 1659 bp, Artificial Sequence
  derived and/or modified sequence
atgctggaccacaaggacctggaggccgagatccaccccctgaagaatgaggagagaaaaagccaggaaaatctgggcaaccccagtaagaacgaagacaacgtgaagtccgccccgccgcagagtcgcctctccagatgtcgcgctgccgccttttttctgagcttattcctgtgcctttttgtggttttcgtggtttcctttgtcatcccctgtcctgataggccagcctcgcaacgtatgtggaggattgattactccgccgctgtgatctatgactttctcgctgtggatgatatcaatggcgatagaatccaggatgtgctgtttctgtacaaaaacacaaattcctcaaacaacttcagccgaagctgcgtcgacgagggcttttcaagcccttgcacattcgccgccgccgtgtctggggcaaacgggagcaccttgtgggagcgaccagtggcacaggacgttgccctggtggaatgtgccgtaccgcagcctcgcgggagcgaagccccttccgcctgtattctcgtcggcaggccctccagttttatcgcagtgaacctatttaccggggagaccctatggaatcattcctcctcattcagcggaaacgcaagtattctttcacctctcctccaagttcctgatgtggacggcgatggggccccggacctgttagtcctgacccaggaaagggaggaagtcagcggacatctgtactctggatccacaggccaccagataggtttacggggctccctgggagtggacggagaatctggtttcctgctccatgtgacccgaacaggggcacactacattctttttccctgtgctagcagcttatgcggttgtagtgtaaagggtctgtacgagaaggtaacaggcagcggaggaccatttaaatctgatccacattgggagtctatgctgaacgctaccactagacgcatgctgtcacatagcagtggcgcagtacgatatctcatgcacgtgcccggtaacgcaggtgccgacgttctcctggtaggcagcgaggctttcgtgctgttggatggtcaagagctgactccacgctggaccccaaaagccgcccacgtgctcaggaagccgatcttcgggagatacaagccagacacattagcagttgccgtcgaaaatgggaccggcaccgaccgccagatactattcctggaccttggcaccggggccgtgctttgctcattggcactgccgtcccttcccggagggcctctcagtgcctcactccctacagccgaccacagatcagctttttttttttgggggctccatgagcttggttctacatcggaaaccgagaccggtgaggccagacactccctgtatatgttccaccccacgctgccccgagtactgctggagttagcaaacgtcagcacccatatcgtggcttttgatgccgtcctctttgaaccatcccggcacgctgcttatatcctgttgacggggccggccgactccgaggcaccagggttggtgtcagtcatcaagcacaaggtgcgcgatttagttccatcgtccagagtggtgcggttaggggaggggggaccagactcggaccaggccattcgcgatagattctcgcgcctgcgctatcaatccgaggcctag

SEQ ID NO: 222726 - DNA, 1659 bp, Artificial Sequence
  derived and/or modified sequence
atgctggaccacaaggacctggaggccgagatccaccccctgaagaatgaagagcgcaaatcccaggaaaatctagggaatccttccaaaaacgaggacaacgttaagagcgccccaccgcagtcccggctgtcccgttgccgggccgctgcgttttttctcagtctgtttctgtgtctgttcgtggtgttcgtcgtcagcttcgtcatcccctgccccgatagacccgcctcccaacgcatgtggaggattgactactctgccgccgtaatttatgatttcctggccgtggacgacattaatggcgatcgcattcaagacgtgctgtttctttataaaaatactaattccagtaacaatttctccagaagctgcgtggatgagggattctcttcaccatgcaccttcgcagccgctgtaagcggggctaatgggtccaccttgtgggaacgtcctgtcgctcaggatgtggctttggttgaatgtgcagtgccccagccccgcggctcagaagctccttccgcctgcattctcgttgggcgccccagcagctttatcgcagtcaacttgtttacaggtgagaccctatggaaccatagctcttctttctctggaaacgcatccatcctatcccctctgttgcaggtgccagatgttgacggcgatggcgctcccgacctgctggtgctgacgcaggagcgtgaggaagtctccggtcacctgtactccgggtcaaccgggcaccagataggactgcgcgggagcttaggggtggatggcgagtctgggtttcttctgcacgtgacacgcacaggcgcccactatatactcttcccgtgcgctagtagtttgtgtgggtgcagcgttaagggcctgtacgaaaaggtgacaggatcaggcgggccttttaagtctgatcctcactgggaaagcatgcttaatgcgaccacgagaagaatgctgagtcattcatccggcgccgtccgatatcttatgcacgtcccaggtaatgcaggcgctgatgtgttattggtgggaagcgaggcctttgtgctcctggacggtcaggaattgacccctaggtggacacctaaggctgctcacgttctgcgcaagccaatatttggaagatataagccagatactcttgccgtggccgttgagaacgggactgggactgatagacagatccttttcctcgatctggggactggggcagtgttgtgctctctcgcactgccatctttgccaggaggaccactgagtgcctcactccctacagctgatcatcgttctgcgttctttttctgggggttgcacgagctgggtagtacctccgaaacagaaactggagaggcacggcatagtctgtatatgtttcatcccactcttcctcgcgtgctactcgaactggccaatgtgagtactcatatcgtggcgtttgatgccgtcttattcgagccctcccgtcacgccgcttacattctgttaacaggccctgctgactctgaggcacccggactggtgtcggtgatcaagcacaaagtgagggatttggtgccaagctctcgcgttgtgcgactcggcgaggggggccctgatagcgaccaggccatccgcgaccgattttcaagactgagataccaaagcgaggcctag

SEQ ID NO: 222727 - DNA, 1596 bp, Artificial Sequence
  derived and/or modified sequence
atgctggaccacaaggacctggaggccgagatccaccccctgaagaacgaggaacgaaagtctcaggagaatctgggtaatccttctaaaaatgaggacaatgtgaaatctgctcctccacagtctaggctgtctcgctgccgagccgccgcattttttctcagcctgtttctgtgtctatttgtggttttcgtggtgagtttcgtcattccctgtcccgatcgaccggccagccagcggatgtggagaatcgattacagtgctgctgttatttatgactttctggccgtggacgatatcaacggcgatcgcatccaggatgtgctctttttgtacaagaacaccaacagctctaacaacttcagtcgctcttgtgtggacgaagggttcagcagcccatgtactttcgccgccgcggtgagtggcgccaacggatcaacactgtgggaacggccggtcgcccaggatgtcgctctggtagagtgcgccgttccccagcctcgggggagtgaggcccccagcgcatgtatcctggttggtaggccctcaagttttattgccgtcaacctttttactggagagaccctatggaatcactcgagcagttttagcggcaatgcatctattctgagccctctgctgcaggttccagacgtggacggggatggggccccagacctgctggtactcacccaagaacgggaggaagtgtctggtcacttatatagcgggagcacaggacatcagatcggtctgagggggtctctgggtgtagacggtgagtccgggtttctcctccatgtgactagaaccggagcccactacattctgtttccctgcgctagcagtctttgcggctgttccgttaagggcctgtatgaaaaagttacaggctctggaggccccttcaagagcgatccacactgggaaagtatgcttaacgccaccacaagaagaatgctctcccactcaagtggagccgttagatacctgatgcatgtgccagggaatgccggggccgacgtcctgttagtcggtagcgaggcattcgtgctgctagacggccaagagctgactcccaggtggacacctaaggcggctcacgtgctgcgcaagcccatctttggacggtataagcccgatacactcgcagtagccgtggaaaatgggacaggaacagataggcagattctttttctagaccttgggactggggcagtgctgtgctctttggcccttcctagcctgcctggggggccactgtccgcatccctacccaccgctgatcatcgttccgccttctttttttggggactgcatgaattgggatctacgtccgagacagagacaggagaagcccgccacagcctgtacatgttccaccccacactgccacgggttctgctggagttagcaaatgtgagcactcacatcgtcgcctttgatggatcacactgggcgacagctgagcggttgctggatggcgcagagctggcccctcggcccgcgtgccccagacttgtaacaggcgtgtgggaggccgctaggttgtgtatacttctgcccggtattaggtggctgatttactggttctag

SEQ ID NO: 222728 - DNA, 1623 bp, Artificial Sequence
  derived and/or modified sequence
atgctggaccacaaggacctggaggccgagatccaccccctgaagaatgaggaaaggaaatcccaggagaatctcggtaatccaagtaagaatgaggacaatgtcaagtccgcccccccacagtctagactcagtcgttgccgagccgccgccttctttttaagcctattcctctgcctcttcgtagtatttgtggtgtctttcgtgatcccatgccccgacaggccggcttcacagagaatgtggcgcatagattatagtgcggctgtgatctacgacttcctggccgtcgatgatatcaacggggacagaatacaagacgtcctcttcttatataagaataccaacagcagcaataatttctctcgttcttgcgtggacgaaggatttagctcgccatgcactttcgctgctgctgtaagcggggctaacggcagtaccctttgggagcggccagtggcccaagacgttgcattagtggagtgtgcggttccccagccccggggctcagaagccccgtctgcttgcattcttgtggggcggccgtccagttttatcgccgtgaacctgtttacgggcgagactttgtggaatcactcttcttccttttctgggaacgccagcattctctctccactgctgcaggtccccgacgtcgatggtgatggagcccccgacctgttagtgcttacacaggagcgcgaagaggtgagcggacacctctactctggctccactggtcaccagattgggctgagaggatctctgggagttgatggagagagtgggttccttctgcacgtgacaagaaccggcgcccattacattctatttccatgcgcttcatctctgtgcggctgttcagtgaagggcttgtatgagaaggttaccggtagcggaggtccatttaagagcgacccgcattgggaatccatgctaaatgccaccaccaggagaatgcttagtcactcatccggtgcagttcggtatctcatgcacgtgcccgggaatgcaggcgccgacgtacttttggtgggatcagaagccttcgttctcctggatggccaggaactgacccctaggtggacacctaaagcagctcacgtactgcggaagcctattttcgggcggtataagcctgatacgctagcagtcgccgtagaaaatggcaccggaaccgaccgacagattctcttcctggatctggggacaggggccgtgctctgcagcctggcattgcctagcctgccaggtggccctctgtctgcttcactcccaaccgctgatcatcggtctgctttctttttttgggggctccacgagctgggaagcaccagtgagactgagactggagaggcaagacacagcctctatatgttccatcccaccctccccagagtcctgctcgagcttgctaatgtttcgacccacatcgttgcctttgacgccgtgctgtttgagcccagccggcatgctgcctacatcctgttaactggacctgcagactctgaggccccaggcctggtgagtgtgattaagcataaggcccatacgggccgccagcgccgcggctcatggacgggccagagttcgaggcgcgacttgcacgtgagggttttgtag

SEQ ID NO: 222729 - DNA, 1659 bp, Artificial Sequence
  derived and/or modified sequence
atgcttgaccataaggacctcgaagccgaaattcatcccctgaagaatgaagagcgcaaaagtcaggaaaacctcggaaacccatctaagaatgaggataacgttaagtccgctccgcctcagagccggctgtccaggtgcagagccgctgccttctttctgagcctgtttctgtgtctgtttgtggtgttcgtcgtgtcctttgttatcccctgccctgaccgccctgcgtctcaacggatgtggagaatcgattatagtgccgctgtgatatacgatttcttagctgtggacgatataaacggggacagaatccaggatgtgctcttcctctataaaaacaccaactcttctaataatttcagtcgaagttgcgtagatgaaggattcagtagtccatgtaccttcgccgctgccgtgagcggggcaaacgggtctactctgtgggagagaccggtggcgcaggacgtagctctcgtcgagtgcgccgtaccgcaaccaaggggatctgaagcgccatccgcgtgtatcctggtcggcaggccctcctctttcattgccgtgaatctcttcactggagagaccctgtggaatcattcctcttcgttcagcggtaacgcatcaatcctgagcccgcttttgcaagtgccagacgtggacggtgacggtgcccctgacctccttgtcctgacacaggagcgagaagaagtcagtgggcatctctactccggctctactgggcaccagatcggcctcaggggatccctgggtgtagatggggaatctggattcctgctgcacgtgacccggacaggcgctcattacattctgttcccatgtgctagctccctgtgtggttgcagcgtgaaaggcctgtacgagaaggtaacgggatcagggggtccctttaaatcagatccccattgggaaagcatgcttaacgccactactcgtcggatgctaagccacagtagcggcgctgtgcggtatctgatgcacgtaccaggtaacgccggagccgatgtgctgcttgtaggcagtgaggcatttgtcttgctggacggtcaggagctgacacctcgctggacccctaaggccgctcacgtccttagaaagcccatttttggcaggtacaagcctgataccctggccgtggccgttgaaaatggtacgggtacagaccgtcaaattctattcctggatctcggaacaggcgctgtgctctgctccctggccctccctagcctgcccggaggtccactgtcagctagtctccccaccgctgatcacagatccgcctttttcttttggggtctgcatgaactgggaagtacaagtgaaaccgaaactggcgaggcaagacacagcctgtatatgtttcatcctaccctacctcgcgttctgctagaattagcaaatgttagcacgcatattgtggcatttgatgcagtgctcttcgagccaagtcggcacgcagcctatattctgctcaccggcccagctgacagcgaagccccagggctagtgtctgtcatcaaacacaaggtgagagatctagtgccctcttcccgtgtggtgagattaggcgaaggcggacctgacagcgaccaagccataagggaccgtttttctcgcttacgataccaatccgaggcgtag

SEQ ID NO: 222730 - DNA, 1659 bp, Artificial Sequence
  derived and/or modified sequence
atgctagatcataaagacttagaagccgaaatccatcctcttaagaacgaagagagaaaatcccaagagaacctgggcaatccgtcaaaaaatgaggataatgtcaagtcagcgcctccacagtcccggctgtcccggtgccgagcggcagctttctttctgagtctcttcctgtgcctattcgtagtcttcgtcgtgtccttcgtgatcccttgtcccgataggcctgcttcacagagaatgtggcggattgattactccgcagcagtaatctacgacttcctcgccgtggacgatatcaacggcgatcggatacaagatgttctcttcctctataaaaataccaattcttctaataacttcagtcgctcatgcgttgatgagggattctcttccccatgtactttcgccgctgctgtgtctggcgcaaatggctccacattatgggaacggcctgtagcccaggatgttgcgctggttgaatgtgcagtgcctcaaccaagaggttcagaagccccatctgcatgtatcctggttggccgacccagctctttcatagcggttaacctgtttacaggggagactttgtggaaccatagtagctcgttctccgggaacgctagtattttatccccacttctacaggtgcccgacgttgacggagatggcgctccagacttacttgtgctgacccaagaaagagaggaggttagtggccacctgtactctgggagtacaggtcatcaaatcggcctgcgagggtcgttgggcgtggatggagagtccgggttcctactgcacgtgacgaggaccggcgcacattatatcctgtttccttgcgcctcaagtctctgcggttgcagcgtaaaaggcctatatgagaaggtgacaggctccggaggcccttttaagagcgacccccattgggaatccatgctgaacgctaccacacggcgaatgctgtcgcactcatccggagctgttcggtacctgatgcatgtcccgggtaatgccggagcagatgtgctgttagtgggatcagaggcctttgtcttgctggacggtcaggagctgacaccaagatggacaccgaaggctgcacacgtccttaggaaaccaatcttcggtcggtataagccagatacccttgctgtggccgtggagaatgggaccggtactgatagacagatccttttcctagatttgggcacgggcgctgtcctctgctcgctggctctaccttccctccctggtggaccactgtcagcatcccttcccaccgccgatcaccgatctgccttcttcttctgggggctgcacgaactgggctctaccagtgagaccgaaactggcgaagctcgacattcactgtatatgtttcacccaaccttacctcgagtgctgctggagcttgcaaatgtcagtacgcacattgtggcgttcgatgcagtcctgtttgagccatcaaggcacgcagcatatatcctcctgacaggccctgcggactcagaagcgccagggctggtgtccgtcatcaagcataaggtgcgggatctggtaccctctagtcgggttgtgagactgggggagggtgggccagacagcgaccaggccatcagagaccgatttagtcgactcagatatcagagcgaagcctag

SEQ ID NO: 222731 - DNA, 1596 bp, Artificial Sequence
  derived and/or modified sequence
atgttggaccataaagacctagaagctgagattcaccctcttaagaacgaggagaggaagtcccaggagaaccttggcaacccgtcaaagaatgaagacaacgtgaagagtgcccctccacagtctagactttcgcggtgtcgggctgctgccttcttcctgtcattgttcctgtgcctgtttgttgtctttgtagtctcctttgtaataccatgccccgatagaccggcttcccaaagaatgtggaggattgactattccgctgccgttatttacgactttttagcggtggacgatatcaatggggaccggatccaagacgttctgtttctgtacaaaaacacgaatagcagcaataacttcagtagaagttgtgttgacgaggggttctctagcccctgcacatttgccgcagccgtgtctggagcgaatggcagtacactctgggagaggcctgtggcccaggatgtcgccttggtggagtgtgccgtgccacagcctcgaggctccgaagctccctccgcttgcatccttgtcgggaggcctagttcattcattgccgtgaacctcttcacaggagaaacgctgtggaaccattccagttcctttagcggcaatgccagtatcctgagccccctgctgcaggttccagatgtggacggagatggagcgcctgacctcctggtattaacccaagaaagagaggaagtatctggacatctgtattccggtagtactgggcaccagatcggtctgagggggtctctgggtgtggatggtgaatctggcttcctgttgcatgtgacaagaacaggtgcacactatatcctctttccctgtgcctcatctttatgtggttgttcagttaaagggttgtatgagaaggtgaccggctctggtgggccattcaagagtgacccacactgggagtccatgctgaatgctaccactcgtcggatgctctcgcattcaagcggtgcggttcgatatttgatgcatgtccctggaaacgctggagcagatgtgctcctggtcgggagcgaagccttcgtgctactggatggacaagagctgacacccagatggactcctaaagctgctcatgtgcttcgaaagccaattttcggaaggtataagccagacactctggcggtagcggtggaaaacggcactgggactgaccgccagatacttttcctagatctcggaacaggtgcagtgctgtgctctcttgccctgccatcactccccggtggcccactcagcgcgagcctgcccacggctgaccataggagtgccttcttcttttggggcctccatgaactcggaagtacgtcagaaaccgaaaccggagaagcacgtcactccttatatatgttccatcccaccctgcctagggtgctgctggaactggcaaacgtgagcacccacattgtggccttcgatggctctcactgggctacggccgagcgtttgctggacggcgcagagttggcccctagaccggcttgtccacgcctcgtgactggtgtgtgggaggctgcccgtctgtgtatactgttgccaggcatcaggtggctcatttattggttctag

SEQ ID NO: 222732 - DNA, 1623 bp, Artificial Sequence
  derived and/or modified sequence
atgctggaccacaaagacctggaagccgaaattcatcctctgaaaaatgaggagcgtaaatctcaggagaacttgggaaacccaagtaagaatgaggacaacgttaagagcgcacccccacagtcaagattgtcaaggtgcagagcagctgcctttttcctgagtctcttcttatgcctctttgtggtgtttgtggtcagtttcgtgatcccatgtcctgaccgcccagctagccagagaatgtggaggattgattactcagcagctgtgatttacgacttcctggccgttgatgatattaatggagataggattcaggacgtgctttttttatacaagaacactaacagttccaacaatttctcacgctcttgtgtggacgagggcttctcttctccatgtacgtttgccgctgcagtgtcaggagctaatggtagcacactgtgggaacgcccagtcgcccaagacgttgccttggtggaatgcgcggtcccacagccccgtggaagcgaggccccaagtgcttgtatcctcgtcggacggccatctagctttatagccgtgaatttattcacaggagagaccctgtggaatcactcctcttctttcagtggcaatgcttccatactaagtcctctgctgcaagttccggacgtggacggtgacggcgcacccgatttgctggtgttgacccaggaacgggaagaggtgtcaggccacttgtactctggctccaccgggcaccagattggcctacggggaagcctgggtgtcgatggtgaaagcggatttctgcttcatgtcacccgaactggagcccactatatcctgttcccttgtgcatcctccctttgcggatgtagcgtgaagggtctgtatgagaaggtcacaggcagtgggggaccgttcaagtcggaccctcattgggaatccatgttgaatgcaaccaccaggcgaatgctgtctcacagctctggcgcagtcaggtatctgatgcacgtccccggtaatgccggagcagatgtgctgcttgtgggttcagaggctttcgtgttgcttgatggccaagaattgacaccaagatggactcctaaggcagcccacgtgctcagaaaaccgatttttggaagatacaagcctgatactctggccgtggcagtggaaaacgggaccggcactgatcgccagatactgttccttgacctcggcactggcgcagtcctatgttctctcgctctcccctccctgccaggtgggcctctgagcgcctctctcccaaccgccgatcaccgctcagcattcttcttctggggcctgcacgaactcggtagtacctctgaaacagagaccggagaagcaaggcacagtctctacatgtttcacccgactctgccaagagtgttactcgaattagctaacgtctccacgcacatagtggcctttgatgccgtcctcttcgagccatcacggcacgccgcatatattctccttaccggccctgcagattctgaagcgccagggctggtctccgtcattaagcacaaggcccataccggaagacagcgacgcggaagttggactgggcaatcctctcggagagacttgcacgtcagagttctttag

SEQ ID NO: 222733 - protein, 538 aa, Artificial Sequence
  derived and/or modified sequence
MLQIGEDVDYLLIPREVRLAGGVWRVISKPATKEAEFRERLTQFLEEEGRTLEDVARIMEKSTPHPPQPPKKPKEPRVRRRVQQMVTPPPRLVVGTYDSSNASDSEFSDFETSRDKSRQGPRRGKKVRKMPVSYLGSKFLGSDLESEDDEELVEAFLRRQEKQPSAPPARRRVNLPVPMFEDNLGPQLSKADRWREYVSQVSWGKLKRRVKGWAPRAGPGVGEARLASTAVESAGVSSAPEGTSPGDRLGNAGDVCVPQASPRRWRPKINWASFRRRRKEQTAPTGQGADIEADQGGEAADSQREEAIADQREGAAGNQRAGAPADQGAEAADNQREEAADNQRAGAPAEEGAEAADNQREEAADNQRAEAPADQRSQGTDNHREEAADNQRAEAPADQGSEVTDNQREEAVHDQRERAPAVQGADNQRAQARAGQRAEAAHNQRAGAPGIQEAEVSAAQGTTGTAPGARARKQVKTVRFQTPGRFSWFCKRRRAFWHTPRLPTLPKRVPRAGEARNLRVLRAEARAEAEQGEQEDQL

SEQ ID NO: 222734 - protein, 324 aa, Artificial Sequence
  derived and/or modified sequence
MLQIGEDVDYLLIPREVRLAGGVWRVISKPATKEAEFRERLTQFLEEEGRTLEDVARIMEKSTPHPPQPPKKPKEPRVRRRVQQMVTPPPRLVVGTYDSSNASDSEFSDFETSRDKSRQGPRRGKKVRKMPVSYLGSKFLGSDLESEDDEELVEAFLRRQGLQVIRGQGPQLTRGQRLQIIRGKRLQIIRGQGPQLRRGQRLQITRGKRLQIIRGQRPQLTRGHRAQITTGKRLQIIRGRRPQLTRGQRLQIIKGKRPYMTRGKGPQLSRVQIIRGHRPGLARGQRLHIIRGQGPQVSRKLKSQLPKGPQEQLQEPGPGNRSRQ

SEQ ID NO: 222735 - DNA, 1617 bp, Artificial Sequence
  derived and/or modified sequence
atgctgcagataggtgaggacgtggattacttgctcatccctcgggaggtgcgcctggccggtggcgtatggagggtgatcagcaagcctgccacaaaagaagccgaattccgcgagcggctgactcaattcctggaagaggaggggagaactttagaggacgttgctagaattatggagaaatcaacacctcacccaccccagccaccaaaaaagcccaaggaacctagggtgcgccggagagtgcagcagatggtcactcccccaccaagactagtcgtgggcacctatgacagttcaaatgcgagtgatagcgaattttccgacttcgagaccagccgggacaaatcccgccagggcccaaggaggggaaaaaaggttcgcaagatgccagtgtcctatttagggagcaaattccttggctctgacctcgaaagtgaggacgacgaagagctcgttgaggcctttttgaggcgccaggaaaagcagcccagcgcccctccggcgcggcgccgggtcaatctgcccgtgcccatgttcgaggacaacctcggcccccagctatccaaggctgatcgctggcgcgagtacgtcagccaggtgagttggggcaagctgaagcgaagagtgaaagggtgggcacccagagccggtccgggagtgggcgaagctcgactcgccagcacagccgttgagagcgcaggcgtgagcagtgctccagaaggtacaagtccgggagaccgccttggaaatgcaggtgacgtgtgtgtcccccaggcatcacctcggagatggcggccgaaaattaattgggccagtttcagacgccggaggaaggaacagactgcaccaaccggccaaggcgccgatattgaagccgaccaggggggggaggccgccgacagtcagcgggaggaggcaattgcggatcagcgtgaaggggctgcaggcaatcagagggccggagcccctgctgaccaaggcgcagaggccgctgacaatcagcgcgaagaggcagccgacaatcagcgggctggagcccccgcggaggagggcgccgaagccgccgacaaccagcgagaggaggcggctgacaaccagcgcgctgaagcccctgccgatcagcgtagccaggggacggataatcaccgcgaagaagctgctgacaaccagcgcgcggaggctcccgcagatcaggggtcggaagtgaccgacaatcaaagagaggaagccgtgcacgatcagcgagaacgcgctcctgcagtgcagggagccgacaaccaaagagcccaggccagagctggccagcgggccgaggccgcccataaccagcgagccggcgctcccggtatccaagaagcagaggtgtcagccgctcaggggaccacaggcaccgctcccggcgcaagggcccggaagcaggtaaaaactgtgcgcttccagacaccaggcaggttttcttggttctgtaagcgtcgcagagccttctggcacactcctagactgcccacactgcccaagagggtgcctcgagccggggaggctagaaatctccgcgtcctgcgggcggaagctagggccgaggccgaacagggtgaacaggaagaccagctgtag

SEQ ID NO: 222736 - DNA, 975 bp, Artificial Sequence
  derived and/or modified sequence
atgctgcagatcggcgaagacgttgattacctgttgatccccagagaggtcagactcgccggcggcgtttggagggtcatcagtaaaccagccacgaaggaggccgagttcagggaacggctcactcagtttctggaagaggagggcaggaccctggaagacgtggctcgtatcatggaaaagagcacgccacatcctccccagccacccaagaagccaaaagagccacgcgtgcgccgtcgagtgcagcagatggtcactcctccaccccggctcgtagtgggaacttacgactcttcgaatgcttctgattccgagttttccgactttgagacaagcagagacaaatcgaggcaggggccacggagaggcaaaaaggttcgcaagatgcccgtgtcgtatcttggatcaaagttcctgggttctgacttagagtcagaagacgacgaagaactagttgaagccttcctgaggcgccaagggctgcaggtgatccgaggccaaggaccccagctaactcgcggccagcgcctgcagataatcaggggaaaacgccttcaaatcattcgtggtcagggtccacagctcaggcggggacaacggctgcagataacgcgcggcaagcgccttcagataatccgggggcagagaccccaattaactcgcgggcaccgggcgcagatcaccacagggaagaggctccagatcatcaggggccggaggccacagctcacaagagggcagcgtctgcagattatcaaagggaagcgcccttatatgactagaggcaagggtccgcagctgagtagggttcagatcatccgcggccatcggcctggactggcccggggtcagcgtttgcatatcatccggggccaaggcccgcaggtctcaaggaaactgaagagccaactgccgaaagggccacaggaacagttacaggaaccgggcccgggcaatagatccagacagtag

SEQ ID NO: 222737 - DNA, 1617 bp, Artificial Sequence
  derived and/or modified sequence
atgctgcagatcggggaggatgtggactacctgctgatcccccgggaggtgcggctggccggcggcgtgtggagggtcatcagcaagccagccaccaaggaggccgagttccgggagcggctgacccagttcctggaggaggagggccgcaccctggaggatgtggcccgcatcatggagaagagcaccccccaccccccccagccccccaagaagcccaaggagccccgggtgagaagaagagtgcagcagatggtgaccccaccaccccggctggtggtgggcacctatgacagcagcaatgccagtgacagcgagttcagtgactttgagaccagccgggacaagagccggcagggcccccggcggggcaagaaggtgaggaagatgcctgtgtcctacctgggcagcaagttcctgggcagtgacctggagagtgaagatgatgaggagctggtggaggccttcctgcggcggcaggagaagcagcccagcgcccccccagccaggagaagagtgaacctgcctgtgcccatgtttgaggacaacctgggcccccagctgagcaaggctgaccgctggagagaatatgtgtcccaggtgtcctggggcaagctgaagagaagagtgaagggctgggcccccagggctggccctggggtgggggaggcccggctggccagcacagctgtggagagcgctggggtgagcagcgcccctgagggcaccagccctggggaccggctgggcaatgctggagatgtgtgtgtgccccaggccagcccccggcgctggaggcccaagatcaactgggccagcttcagaagaagaaggaaggagcagacagcccccaccggccagggcgctgacattgaagctgaccagggcggggaggccgctgacagccagcgggaggaggccatcgctgaccagcgggagggcgccgccggcaaccagagagctggggccccagctgaccagggcgctgaggccgctgacaaccagcgggaggaggccgctgacaaccagagagctggggccccagctgaggagggcgctgaggccgctgacaaccagcgggaggaggccgctgacaaccagagagctgaggccccagctgaccagaggagccagggcacagacaaccaccgggaggaggccgctgacaaccagagagctgaggccccagctgaccagggcagcgaggtgacagacaaccagcgggaggaggccgtgcatgaccagcgggagcgggccccagctgtgcagggcgctgacaaccagagggcccaggcccgggccggccagagagctgaggccgcccacaaccagagagctggggcccctggcatccaggaggccgaggtgtctgctgcccagggcaccactggaacagcccctggggcccgggccaggaagcaggtgaagacagtgcgcttccagaccccaggccgcttctcctggttctgcaagagaagaagagccttctggcacaccccccggctgcccaccctgcccaagagggtgccccgggccggggaggccaggaacctgcgggtgctgcgggcagaggcccgggcagaggccgagcagggcgagcaggaggaccagctgtag

SEQ ID NO: 222738 - DNA, 975 bp, Artificial Sequence
  derived and/or modified sequence
atgctgcagatcggggaggatgtggactacctgctgatcccccgggaggtgcggctggccggcggcgtgtggagggtcatcagcaagccagccaccaaggaggccgagttccgggagcggctgacccagttcctggaggaggagggccgcaccctggaggatgtggcccgcatcatggagaagagcaccccccaccccccccagccccccaagaagcccaaggagccccgggtgagaagaagagtgcagcagatggtgaccccaccaccccggctggtggtgggcacctatgacagcagcaatgccagtgacagcgagttcagtgactttgagaccagccgggacaagagccggcagggcccccggcggggcaagaaggtgaggaagatgcctgtgtcctacctgggcagcaagttcctgggcagtgacctggagagtgaagatgatgaggagctggtggaggccttcctgcggcggcagggcctgcaggtgatccggggccagggcccccagctgacccggggccagaggctgcagatcatccggggcaagaggctgcagatcatccggggccagggcccccagctgcggcggggccagaggctgcagatcacccggggcaagaggctgcagatcatccggggccagaggccccagctgacccggggccaccgggcccagatcaccaccgggaagaggctgcagatcatccggggccggcggccccagctgacccggggccagaggctgcagatcatcaagggcaagaggccctacatgacccggggcaagggcccccagctgagccgggtgcagatcatccggggccacaggcctggcctggcccggggccagaggctgcacatcatccggggccagggcccccaggtgtccaggaagctgaagagccagctgcccaagggcccccaggagcagctgcaggagcccggccctggcaacagaagccggcagtag

SEQ ID NO: 222739 - DNA, 1617 bp, Artificial Sequence
  derived and/or modified sequence
atgctgcagatcggcgaggacgtggactacctgctgatcccccgggaggtccggctggctggaggtgtgtggagggtcatttccaaacctgcaaccaaggaggccgagttccgggaacggctgacacagttcctggaagaagaaggccgcaccctcgaggatgttgcccgcatcatggagaagtcgactccccatccaccgcagccacctaaaaaaccgaaagaaccacgtgtgaggcgtcgggtgcaacagatggtgacacctccccctcgcctcgttgttggtacatacgacagttctaacgcctccgactccgagttctcggattttgagaccagcagggacaaatccaggcaaggacctaggagagggaaaaaagtaagaaagatgccagtgtcctatttgggttctaagttccttggttctgatttagagagcgaggatgacgaagaactcgtcgaagcctttctgcggcgccaggagaagcagccctctgctccgcccgcgcggaggagagtgaaccttccagtgcccatgtttgaagataacctggggccacaactgtccaaggcggacaggtggcgggagtacgtctcccaggtctcttggggtaagctaaaacggcgtgtgaaagggtgggccccgcgcgctgggccaggagtgggcgaggcaagactcgcatcaactgctgtcgagagcgccggcgtgtcaagtgcccccgagggaacaagccctggggataggctggggaacgctggcgacgtatgtgtcccgcaggcctcccctcgccgttggagacctaaaattaactgggcatcctttcgtaggcgtcggaaagagcagacggcaccaactggacagggagctgacatagaggcagaccagggcggcgaagccgccgacagccagcgggaggaggcgatcgctgaccaacgagaaggcgctgcaggcaaccagcgcgcgggcgcccccgccgaccagggagctgaggcagcagataaccagagagaggaggcagccgataatcaacgcgcgggtgccccagccgaggagggtgctgaggcagccgataatcagcgtgaagaggcggcagataatcagagagccgaggcacctgctgatcagcggagccaaggcacagataatcatagggaagaagccgctgataatcagcgcgcagaggctcctgccgatcaggggagcgaggttacagacaatcagcgcgaagaggcggtccatgatcagcgcgaaagagccccagcagtgcaaggcgccgacaaccaaagggcccaggcccgagcggggcagagagccgaggccgcgcataaccagcgagctggagcacctgggattcaggaagccgaggtgagcgcagcccaaggaacgacgggtaccgcccctggcgcgcgagcccgcaagcaggtaaagaccgtgaggttccaaacgccaggacgattttcatggttctgtaagcgccgtcgagctttctggcacacgccaaggctccctacgctccctaagagggtccctcgcgccggcgaagcccgcaatcttcgggttctgagagcggaggcccgcgcagaggccgagcagggggagcaggaggaccagctgtag

SEQ ID NO: 222740 - DNA, 975 bp, Artificial Sequence
  derived and/or modified sequence
atgctgcagatcggcgaggacgtggactacctgctgatcccccgggaagtgcgcctggccggcggagtgtggcgcgtcatcagcaagcctgcgaccaaggaggcagaattcagagagagactgacccaatttctggaggaagagggtcgcaccctcgaggatgttgcaagaataatggagaaatcgactcctcatcccccccagccacctaaaaaacccaaggaacctcgagtgcgaaggcgagttcagcaaatggtgacacccccgccgaggcttgtcgttggcacctatgatagctcgaacgcttcagatagcgagttttcagacttcgagactagcagggataaaagtcggcagggaccccgtagaggcaagaaagtgagaaagatgcctgtaagctatctaggttctaaattcctcggttccgatcttgagtccgaggacgacgaggagctcgtagaagctttcttgcgccggcagggcctccaagtcatcagagggcaaggacctcagctaaccagggggcagagactgcagattatcagagggaagcgcctacagatcatccgggggcagggtccccagctgcggagaggccagaggctccaaatcacgaggggaaagcgcctccagatcatcagaggccagcgccctcaactgactaggggccacagggcccaaatcactaccggaaagcgcctgcaaattatcaggggacggcgccctcagcttactcgggggcagcgacttcagattataaagggcaagagaccctatatgactagagggaagggaccccagttgtccagggtgcaaattatccgcgggcaccgccctggactcgctagaggccagagactgcatatcatccggggccagggccctcaggtatctcgaaagctcaagagtcaactccccaaggggccacaggaacaactgcaggagccgggccctgggaataggagtagacagtag

SEQ ID NO: 222741 - DNA, 1617 bp, Artificial Sequence
  derived and/or modified sequence
atgcttcagattggagaggatgtggactatctgttgatccctcgtgaagtacggctagctggcggtgtctggcgcgtcatcagcaaacccgctacaaaagaggcagaattcagagagcggctgacgcagtttctcgaagaagaaggtagaactctggaggatgttgcaagaatcatggagaagagcactccccaccccccacagcccccaaagaagcccaaagagcccagggtgcgccgacgcgtgcagcagatggtaaccccacctcctcgccttgttgtggggacatacgacagcagcaatgctagcgattctgaattcagtgatttcgaaacctcgcgtgacaaaagccggcagggaccacgacggggaaagaaagtgcggaagatgcctgtttcatatttaggcagcaagtttctaggatcggacctggagtccgaggatgacgaagagctggttgaggcatttctacgcagacaagagaaacaaccaagtgccccacctgctagaaggagagtgaatctcccggtgcccatgttcgaggataatcttggccctcagctgagtaaggcggaccgctggagggagtacgtgtcccaagtttcctggggtaagctgaagaggcgagttaaaggctgggcacccagagctggcccaggagtcggggaggcgcgacttgccagcaccgctgtcgagtccgcaggcgtctcgtctgcacccgagggtacctcaccaggagatcgcttgggaaatgccggtgacgtgtgtgtgccccaggcttccccccgtaggtggagacctaaaataaattgggcctctttccggcgtaggcgaaaggaacaaaccgctcctacaggtcagggtgccgacatcgaagccgatcaggggggagaggctgctgactctcaacgcgaggaagccatcgccgaccagagggagggcgcagctggaaaccagagggctggagcacctgctgaccagggcgcagaagccgcagataaccagcgagaagaggctgccgataaccagcgggcaggcgctccggctgaggagggggcagaggccgcagataatcagagagaagaagctgccgataaccagcgcgctgaggctcctgccgaccaacggtcgcaaggaacagataatcaccgagaggaggccgcagataaccaacgcgcagaagctcctgccgatcaaggctctgaagtgaccgacaaccaaagagaggaggcagtacacgaccagagggagagggcgcctgctgtacagggtgctgacaaccagcgtgcccaggcgagagccggacagagagccgaggctgcccataaccagcgagccggagctcccggaatccaggaagcagaggtatcagccgctcaggggactaccggaactgcgccaggtgctcgcgctcgaaaacaggtgaaaacagtgcggttccagacccccggaagatttagttggttttgtaaacggaggagagcgttctggcacacccctagactgcccacactaccgaagagggtccctagagccggtgaggccagaaatctgagagttctgagagcagaggccagagctgaagctgaacagggggaacaggaagaccaactttag

SEQ ID NO: 222742 - DNA, 975 bp, Artificial Sequence
  derived and/or modified sequence
atgttacaaatcggggaagatgtggattacttgctcatccctcgagaggtgcgtctggcaggtggagtctggcgggtcatttctaagcccgctacaaaagaggctgagtttcgagagaggctaacacaattcctcgaggaagaaggacgaactcttgaggatgtggctaggataatggaaaagagcactccacatcccccacagcctcctaaaaagccaaaagaacccagagtgcgtagacgggtccagcaaatggtcacacctccgccacgcctggtggtgggcacatatgatagcagcaacgcatccgacagtgagttttcagatttcgagactagccgagacaaatcccggcaagggcctagacggggaaagaaggtccgcaaaatgcccgtgagttaccttggctctaaatttttaggaagcgaccttgagtcagaagatgacgaagagctagtcgaggcgttcctgcgacgccaggggctgcaagtgatccgaggccaaggcccacagctgacaagggggcagcgcctccagattattcgcggaaagaggctgcagattattcgtggacagggaccccagcttcgaaggggacagagactccagattacaaggggcaagcggctgcagattatcagaggacagcgcccacagctgaccagagggcaccgcgcacagataaccacgggcaagcggctgcaaattattcggggacggaggccccagctcaccaggggacaacgactccaaattatcaagggtaaacggccttatatgaccagaggaaagggaccacagctctcacgagttcagatcatccggggtcaccggcctgggttggccagaggacagcggctgcatatcatccgcggacaagggcctcaggtcagcagaaagttaaaaagtcagttacctaagggccctcaggaacaattacaggagccaggccctggaaatcggtcacggcaatag

SEQ ID NO: 222743 - DNA, 3213 bp, Artificial Sequence
  derived and/or modified sequence
ctgcccgcgcgctccacggtgcagagctctaagcgcgcgggctggcaggctgcggcgcgtcaaggtcagcctggagctgggtggcggcctgcctgggggcgggggaccctactggaggcccgggctggggcctcccagcgcctcggccatattgaatagcttcgactggaccgtctttgtctgcgaagtcctgtcccaagttccagccgcgtccctggggcctggggcaggaagagtcgctggcagcccgcgcgccccaacttggagctgggacaccacgtttccagcttggagtgggccttgagccttgggactgacctcgcccccggctcacgtaggcatcctggaaattgattcccccaagtccttggtgggggagccggacttggtcaagactgtacttgttgcaggcgaagagattggaggcgtttggctcgtccctggctagggaggtgagactctccggtcagcgttgctggaactccccccatccagtccctccctcaagactaagggctacagtagtttgttggggctcattgccccctcaccccagatatcaccctggagatcttaaagactctcgagaaaagccacgtggggggctggttcccctggggcttcctgccgtcccccgactgcctcattctttggagcgtccccgatgtctgcaaagatgtggatttggacgtcctcgtggaagccctaaagcccgtggggacatttaagaagatcggcaaggtgttccgcaaggaggaggactccacggtggggatgctgcagatcggggaggacgtcgactatttgctcatcccccgggaggtcaggctggctgggggcgtctggagagtcatctctaagcccgccaccaaggaagcagaatttcgggagcggctgacccagttcctggaagaagagggccgcaccctggaggacgtggcccgcatcatggagaagagcaccccgcacccgccccagccccccaaaaagcccaaggagccccgagtgaggaggagagtgcagcagatggtgactcctccgccccggctggtcgtgggcacgtacgacagcagcaacgccagcgacagcgagttcagcgacttcgagacctccagagacaagagccgccagggcccgcggcggggcaagaaggtgcgcaaaatgcccgtcagctacctgggcagcaagttcctgggaagcgacctggagagtgaggatgatgaggaactggtcgaggccttcctccggcgacaggagaagcagcccagcgcgccgcctgcccgccgccgcgtcaacctgccagtgcccatgtttgaggacaacctggggcctcagctgtccaaagcggacaggtggcgggagtatgtcagccaggtgtcctgggggaagctgaagcggagggtgaagggttgggcgccgagggcgggccccggggtgggcgaggcccggctggcctccaccgcagtggagagcgcaggggtatcatcggcgccagagggcaccagcccgggggatcgcttgggaaacgcgggagatgtttgtgtgccccaggcttcccctaggcgatggaggcccaagatcaactgggcctcctttcggcgccgcaggaaggagcagacagcacccacaggtcagggggcagacatcgaggctgatcaggggggagaggctgcagatagtcaaagggaagaggccatagctgaccagcgggaaggggctgcaggtaatcagagggcaggggccccagctgaccagggggcagaggctgcagataatcagagggaagaggctgcagataatcagagggcaggggccccagctgaggagggggcagaggctgcagataaccagagggaagaggctgcagataatcagagggcagaggccccagctgaccagaggtcacagggcacagataaccacagggaagaggctgcagataatcagagggcggaggccccagctgaccaggggtcagaggttacagataatcaaagggaagaggccgtacatgaccagagggaaagggccccagctgtccagggtgcagataatcagagggcacaggcccgggctggccagagggcagaggctgcacataatcagagggcaggggccccaggtatccaggaagctgaagtctcagctgcccaagggaccacaggaacagctccaggagccagggcccggaaacaggtcaagacagtgaggttccagacccctggacgcttttcgtggttttgcaagcgccggagagccttctggcacactccccggttgccaaccctgcccaagagagtccccagggcaggagaggccaggaacctcagggtgctgagggccgaggccagagcagaagctgagcagggagagcaagaagaccagctgtgaggtgagggctagagacagcccacgggccctccctccaagtgtgggagggagagatgctctgcctctgaacttcaaagtggaggtggagtgctggccacgtctccacctaacaaccctctttattctcttgttaaagttttgttcatgctttgatttttttttaaattttttagagacagggtctcactctgttgcccaggctggagtgcagtggcatgatcataactcactgcagcctcaaacttctggcctcaagtgatcctcctgcctcggcctcccaaaatgctgggattacagatgtgagccaccacacacaccatctgattaaaaaaaaaaaatactgattccttgtagcaacccaaaaaatgtaaagaaagaattcgacacaatggggttgcgtcacctatagttttcatttcctcaaatgcaactcaaggtgctcagcttgataaagggagagagggagggcaggggagaaactgactcctttttccatctcttttttgcctgcacacttaatgtggactgcctccttggacttaaaaagagttgagccaacatgcaaatcaaaaaacatttatgaactgatttcttagctttggacttgacaactgacgaatgctctgggggtgacctggcccttgctgtccgttccactcccatccttgatgatggagacacctgtgtttatgttgtcacttcgcttgccatcctcatgccccgggctctgctggtttggaggggacagggcccttggtttgcacacctcacccgatcttggttataaggtacagtaaaagcgtctgaaaaatgcattcaaaa

SEQ ID NO: 222744 - DNA, 2097 bp, Artificial Sequence
  derived and/or modified sequence
acggtgcagagctctaagcgcgcgggctggcaggctgcggcgcgtcaaggtcagcctggagctgggtggcggcctgcctgggggcgggggaccctactggaggcccgggctggggcctcccagcgcctcggccatattgaatagcttcgactggaccgtctttgtctgcgaagtcctgtcccaagttccagccgcgtccctggggcctggggcaggaagagtcgctggcagcccgcgcgccccaacttggagctgggacaccacgtttccagcttggagtgggccttgagccttgggactgacctcgcccccggctcacgtaggcatcctggaaattgattcccccaagtccttggtgggggagccggacttggtcaagactgtacttgttgcaggcgaagagattggaggcgtttggctcgtccctggctagggaggtgagactctccggtcagcgttgctggaactccccccatccagtccctccctcaagactaagggctacagtagtttgttggggctcattgccccctcaccccagatatcaccctggagatcttaaagactctcgagaaaagccacgtggggggctggttcccctggggcttcctgccgtcccccgactgcctcattctttggagcgtccccgatgtctgcaaagatgtggatttggacgtcctcgtggaagccctaaagcccgtggggacatttaagaagatcggcaaggtgttccgcaaggaggaggactccacggtggggatgctgcagatcggggaggacgtcgactatttgctcatcccccgggaggtcaggctggctgggggcgtctggagagtcatctctaagcccgccaccaaggaagcagaatttcgggagcggctgacccagttcctggaagaagagggccgcaccctggaggacgtggcccgcatcatggagaagagcaccccgcacccgccccagccccccaaaaagcccaaggagccccgagtgaggaggagagtgcagcagatggtgactcctccgccccggctggtcgtgggcacgtacgacagcagcaacgccagcgacagcgagttcagcgacttcgagacctccagagacaagagccgccagggcccgcggcggggcaagaaggtgcgcaaaatgcccgtcagctacctgggcagcaagttcctgggaagcgacctggagagtgaggatgatgaggaactggtcgaggccttcctccggcgacaggggctgcaggtaatcagagggcaggggccccagctgaccagggggcagaggctgcagataatcagagggaagaggctgcagataatcagagggcaggggccccagctgaggagggggcagaggctgcagataaccagagggaagaggctgcagataatcagagggcagaggccccagctgaccagaggtcacagggcacagataaccacagggaagaggctgcagataatcagagggcggaggccccagctgaccaggggtcagaggttacagataatcaaagggaagaggccgtacatgaccagagggaaagggccccagctgtccagggtgcagataatcagagggcacaggcccgggctggccagagggcagaggctgcacataatcagagggcaggggccccaggtatccaggaagctgaagtctcagctgcccaagggaccacaggaacagctccaggagccagggcccggaaacaggtcaagacagtgaggttccagacccctggacgcttttcgtggttttgcaagcgccggagagccttctggcacactccccggttgccaaccctgcccaagagagtccccagggcaggagaggccaggaacctcagggtgctgagggccgaggccagagcagaagctgagcagggagagcaagaagaccagctgtgaggtgagggctagagacagcccacgggccctccctccaagtgtgggagggagagatgctctgcctctgaacttcaaagtggaggtggagtgctggccacgtctccacctaacaaccctctttattctcttgttaaagttttgttcatgctttgatttttttttaaattttttagagacaggg

SEQ ID NO: 222745 - DNA, 1617 bp, Artificial Sequence
  derived and/or modified sequence
atgctgcagatcggcgaggacgtggactacctgctgatccccagagaggtgagactggccggcggcgtgtggagagtgatcagcaagcccgccaccaaggaggccgagttcagagagagactgacccagttcctggaggaggagggcagaaccctggaggacgtggccagaatcatggagaagagcaccccccaccccccccagccccccaagaagcccaaggagcccagagtgagaagaagagtgcagcagatggtgacccccccccccagactggtggtgggcacctacgacagcagcaacgccagcgacagcgagttcagcgacttcgagaccagcagagacaagagcagacagggccccagaagaggcaagaaggtgagaaagatgcccgtgagctacctgggcagcaagttcctgggcagcgacctggagagcgaggacgacgaggagctggtggaggccttcctgagaagacaggagaagcagcccagcgccccccccgccagaagaagagtgaacctgcccgtgcccatgttcgaggacaacctgggcccccagctgagcaaggccgacagatggagagagtacgtgagccaggtgagctggggcaagctgaagagaagagtgaagggctgggcccccagagccggccccggcgtgggcgaggccagactggccagcaccgccgtggagagcgccggcgtgagcagcgcccccgagggcaccagccccggcgacagactgggcaacgccggcgacgtgtgcgtgccccaggccagccccagaagatggagacccaagatcaactgggccagcttcagaagaagaagaaaggagcagaccgcccccaccggccagggcgccgacatcgaggccgaccagggcggcgaggccgccgacagccagagagaggaggccatcgccgaccagagagagggcgccgccggcaaccagagagccggcgcccccgccgaccagggcgccgaggccgccgacaaccagagagaggaggccgccgacaaccagagagccggcgcccccgccgaggagggcgccgaggccgccgacaaccagagagaggaggccgccgacaaccagagagccgaggcccccgccgaccagagaagccagggcaccgacaaccacagagaggaggccgccgacaaccagagagccgaggcccccgccgaccagggcagcgaggtgaccgacaaccagagagaggaggccgtgcacgaccagagagagagagcccccgccgtgcagggcgccgacaaccagagagcccaggccagagccggccagagagccgaggccgcccacaaccagagagccggcgcccccggcatccaggaggccgaggtgagcgccgcccagggcaccaccggcaccgcccccggcgccagagccagaaagcaggtgaagaccgtgagattccagacccccggcagattcagctggttctgcaagagaagaagagccttctggcacacccccagactgcccaccctgcccaagagagtgcccagagccggcgaggccagaaacctgagagtgctgagagccgaggccagagccgaggccgagcagggcgagcaggaggaccagctgtag

SEQ ID NO: 222746 - DNA, 975 bp, Artificial Sequence
  derived and/or modified sequence
atgctgcagatcggcgaggacgtggactacctgctgatccccagagaggtgagactggccggcggcgtgtggagagtgatcagcaagcccgccaccaaggaggccgagttcagagagagactgacccagttcctggaggaggagggcagaaccctggaggacgtggccagaatcatggagaagagcaccccccaccccccccagccccccaagaagcccaaggagcccagagtgagaagaagagtgcagcagatggtgacccccccccccagactggtggtgggcacctacgacagcagcaacgccagcgacagcgagttcagcgacttcgagaccagcagagacaagagcagacagggccccagaagaggcaagaaggtgagaaagatgcccgtgagctacctgggcagcaagttcctgggcagcgacctggagagcgaggacgacgaggagctggtggaggccttcctgagaagacagggcctgcaggtgatcagaggccagggcccccagctgaccagaggccagagactgcagatcatcagaggcaagagactgcagatcatcagaggccagggcccccagctgagaagaggccagagactgcagatcaccagaggcaagagactgcagatcatcagaggccagagaccccagctgaccagaggccacagagcccagatcaccaccggcaagagactgcagatcatcagaggcagaagaccccagctgaccagaggccagagactgcagatcatcaagggcaagagaccctacatgaccagaggcaagggcccccagctgagcagagtgcagatcatcagaggccacagacccggcctggccagaggccagagactgcacatcatcagaggccagggcccccaggtgagcagaaagctgaagagccagctgcccaagggcccccaggagcagctgcaggagcccggccccggcaacagaagcagacagtag

SEQ ID NO: 222747 - protein, 416 aa, Artificial Sequence
  derived and/or modified sequence
MSISLSSLILLPIWINMAQIQQGGPDEKEKTTALKDLLSRIDLDELMKKDEPPLDFPDTLEGFEYAFNEKGQLRHIKTGEPFVFNYREDLHRWNQKRYEALGEIITKYVYELLEKDCNLKKVSIPVDATESEPKSFIFMSEDALTNPQKLMVLIHGSGVVRAGQWARRLIINEDLDSGTQIPFIKRAVAEGYGVIVLNPNENYIEVEKPKIHVQSSSDSSDEPAEKRERKDKVSKETKKRRDFYEKYRNPQREKEMMQLYIRENGSPEEHAIYVWDHFIAQAAAENVFFVAHSYGGLAFVELMIQREADVKNKVTAVALTDSVHNVWHQEAGKTIREWMRENCCNWVSSSEPLDTSVESMLPDCPRVSAGTDRHELTSWKSFPSIFKFFTEASEAKTSSLKPAVTRRSHRIKHEEL

SEQ ID NO: 222748 - protein, 370 aa, Artificial Sequence
  derived and/or modified sequence
MKKDEPPLDFPDTLEGFEYAFNEKGQLRHIKTGEPFVFNYREDLHRWNQKRYEALGEIITKYVYELLEKDCNLKKVSIPVDATESEPKSFIFMSEDALTNPQKLMVLIHGSGVVRAGQWARRLIINEDLDSGTQIPFIKRAVAEGYGVIVLNPNENYIEVEKPKIHVQSSSDSSDEPAEKRERKDKVSKETKKRRDFYEKYRNPQREKEMMQLYIRENGSPEEHAIYVWDHFIAQAAAENVFFVAHSYGGLAFVELMIQREADVKNKVTAVALTDSVHNVWHQEAGKTIREWMRENCCNWVSSSEPLDTSVESMLPDCPRVSAGTDRHELTSWKSFPSIFKFFTEASEAKTSSLKPAVTRRSHRIKHEEL

SEQ ID NO: 222749 - DNA, 4312 bp, Artificial Sequence
  derived and/or modified sequence
ggtcggggcgcggatcccgagagggaaagtcataacaaccgcacgagggagttcgactggcgaactggaaggccacgcctcctcccgcctgccccctcagccctgtggctgggggcagagctcagactgtcttctgaagattgatgtctatttccttgagctctttaattttgttgccaatttggataaacatggcacaaatccagcagggaggtccagatgaaaaagaaaagactaccgcactgaaagatttattatctaggatagatttggatgaactaatgaaaaaagatgaaccgcctcttgattttcctgataccctggaaggatttgaatatgcttttaatgaaaagggacagttaagacacataaaaactggggaaccatttgtttttaactaccgggaagatttacacagatggaaccagaaaagatacgaggctctaggagagatcatcacgaagtatgtatatgagctcctggaaaaggattgtaatttgaaaaaagtatctattccagtagatgccactgagagtgaaccaaagagttttatctttatgagtgaggatgctttgacaaatccacagaaactgatggttttaattcatggtagtggtgttgtcagggcagggcagtgggctagaagacttattataaatgaagatctggacagtggcacacagataccgtttattaaaagagctgtggctgaaggatatggagtaatagtactaaatcccaatgaaaactatattgaagtagaaaagccgaagatacacgtacagtcatcatctgatagttcagatgaaccagcagaaaaacgggaaagaaaagataaagtttctaaagaaacaaagaagcgacgtgatttctatgagaagtatcgtaacccccaaagagaaaaagaaatgatgcaattgtatatcagagaaaatggttctcctgaagaacatgcaatctatgtttgggatcatttcatagctcaggctgctgctgagaatgtgtttttcgttgctcacagctatggaggacttgcttttgttgaactgatgattcaacgagaagccgatgtaaaaaataaggtaactgctgtggcattgacagactctgttcacaatgtgtggcatcaagaagctggcaaaacgattcgagaatggatgagagagaactgttgtaattgggtctctagctcagaaccattagacacatcagtggagtccatgctacctgattgcccccgggtctcagcaggcaccgaccgtcacgagctaacttcctggaagagctttccgtctattttcaaattctttaccgaagcctcagaggccaagaccagctccctgaagccggctgtgacgcgccgctcccaccgcatcaagcacgaagagctgtaagaggagcgagcgcgacgggggaggccgccctggcgcacccacccgcacgcctcctcactgcttgtgtcgagcggactcccagcccctcattagattgttttcttcccagagcccagggtcgtgatatatacatctaaatagcgttttgcattatttctagatgagtgcaactgtcaaagcaatatgggttcactggtcgtgcttcctgcgggctgagcgcgggctgagcgctgccagtcagcgctcacattaaggctgacagcgccctgcctggctcggccggcgaagctctaattgccctgaaggagaccgcgcgggcgctgcgggtccggcggcgtcggcgcggtcctagcgcccgccgtagcggagccgctgctgcttccccctccttaatcatgtccatctttccccgctctcaactggagcaaacttctattccagacttcagatttccattttcactaggtttttccctgagggcatcttattacccacctctttttttttttttttaaggaagttccacacacactccaaagccgatttcaaattcagaacctgaatgccatgatgtaccatgtagtttggggaatgcaaattgttctctccctgttttcatttcgggaccagaaaaaaaaacaactctgcataaaaatctataaagtactgaatccgcattactgctgaaaatccttttgccagctaattgtgagagtttacacaagtctctgatttcagaagagactgttaaaaccaaaacaatgatgggcagctcttttaagtgtaggtgtgaaggtcccattttcaatggaatttccaactgttatcactgggattgactttactttttaaacacataatgtgtactgtgtggcattgtaatttagatataacacacttaagttttgctttttaaatctctctgtggagaaaggttgttgttaatcctttccagaatgatctattctgagctttcctggagttaggcccttctagggagagaatttttttattgtcatcaggaaacgaaacctttgtgctctgcagcctttttcttctgaaaggctaagtggggctaaaattatccttttagttttctgctttaacaagaagagaaggacttggtgtgaaagaatttcttctctcagtccaatggtataatttttagcactccgcttcctctgtagggtttagccctacagtttgaacaattattttaatccagctaagatgtggccaacactgtgaaatacaggagatgttaaggttttgctgacttttagattaaaatcttaaaatttcacattatattttaattacttgaaaagtttaattacctagtaaagattgtttctaatagatgagaacataaatttaatagttttcatccttttttaaagtgtgtgcaacaattaatatgcctgccttatttgaggacatgataaaatgtacccaaaatgacttcgaactgtctaatgcctcagaaaagtaacttaaaatcaaccacttcgtgcttaaatgtttttatattatgaaccgatttcaacaagttttaaagctgttaatatctcattgctgtgtttgacatacaagtacattcattggttctatagtcttaatgatgacaaattaaagatgttttttcagtgctcaggtatgcatatattttcgtgttacttaagcaaaatcaactatataggaggaaaaatcaaaatggcattttattcagctaccagatggcttaaaatgagtaaaccccaacaacatcaagcacatttgtctgtgatattgaccctttttatccaatcattactattttagaagtagtggtgaactgtgtaaaataatggtatcttcagcagtgttccggaatcttagttgagggacaaacattccttccagtgagagattcaagaattgatgtgaattgaatatatttttcaaggtattataaattgtgttgtgttttcagtataagaaaatgttgacaggaaacaattttatagcatttataaaaaaccaacacttgtgcaatgctaaattggcgaagcttctgcacctgaattagagcacaataaatatgctgtttataaaccaaatcactgctattccttctctgaaatcatctctcctctttttaaacctttacttatagctagaataaatcactatttaattgcctctaatactttaaaactactggatggttaggcctggtttaactatttatggagagctatttgcaaacttaagttgtgtaaatgtaatttctacttgtgaatctgagctgtagcagcccagagggagctaggcaaactattccagaccaccaactgataagtgatcagattctttgtaatgtaggattttttaacctgttgattatgggtttgttgatataaatgtaataatgttcacctcgattttcctggagtaacaaccagcgttggtagtagcccacctgcatgaggacggccagtgttaacaatatttttgttctgatcttcttccccatttttgtttcctcaaacaggtttttaggagagtggagatttaaagtcaggatgtggcctttttattttaattatatacttaattcttagaacaagtagaatgggaaaggagtgactgataaatctaagattcaaaatagtcccgtcgaaacttaaaggccagattattgctttggagctttctataggtactagccatcccgtcgttaaatgttttcatggatatttgaaaagaagaccatgtacctttaataactgttcttttctcgagtttctgcctcgtgctttgacctggattgcattattattgtttatgcgaagtaaaaaaaaaaaaggaaagcacaagcttttcctgtatattatatttccatttccattttaaaataaaaacaattttcccaacaa

SEQ ID NO: 222750 - DNA, 1251 bp, Artificial Sequence
  derived and/or modified sequence
atgagtatcagtctaagctcattgatcctgctgcccatctggattaatatggcccagatacagcagggcggacccgatgagaaagagaagacaaccgcgctcaaagacctactgtcccggatcgaccttgacgagctcatgaagaaggacgaaccgcctctggatttccctgacaccctggaggggtttgaatacgccttcaatgaaaagggccaactgagacatataaaaaccggggagccattcgtgttcaactaccgcgaggatttgcatcggtggaaccagaaacgttatgaggcactgggtgaaattattacgaagtatgtgtatgagcttctcgaaaaggactgtaatctcaaaaaagtaagtatcccggtggacgctaccgagtctgaaccaaagagctttatattcatgtcagaggatgcactaaccaacccgcagaaactgatggtgctgatccacggctcaggcgttgtccgagctggacaatgggccagaagattgatcatcaatgaggatctggactcaggtacacagattccattcatcaaacgcgcagtcgctgaaggatacggggtaatcgtgctaaaccccaacgagaactatattgaggttgaaaaaccaaaaatccatgtgcagagttcatccgattctagcgacgagccagccgagaagagagaacgaaaggacaaggtcagtaaagagacaaaaaaacggcgagacttttatgagaagtaccgcaatccccagcgcgagaaagaaatgatgcaattgtacattcgggagaatggctctcccgaagagcatgctatatacgtgtgggatcacttcatcgcccaggctgccgcagaaaacgtgtttttcgtagcccacagttacgggggattggcctttgtggagcttatgatacagagagaggccgacgttaaaaataaagtaaccgccgtggccctcaccgacagcgtccacaacgtctggcatcaggaggccggaaaaacaatacgggaatggatgcgagagaattgctgcaactgggttagtagcagtgaaccactggacacctcagtcgagtccatgctgccagactgccctagagtctccgctggaaccgaccgtcatgagctgacgtcttggaagagtttccccagcatctttaagtttttcaccgaagcctcagaggctaaaacctcctccttgaagcctgccgtgactcggaggagtcacaggatcaagcacgaggaactttag

SEQ ID NO: 222751 - DNA, 1251 bp, Artificial Sequence
  derived and/or modified sequence
atgagtatctctctgtctagccttatccttctgccgatttggatcaatatggcccagattcagcaaggcggtccagatgagaaagaaaagacgaccgcactgaaagatctgctgtctcgaatcgacctggacgagctgatgaaaaaagacgagccgccccttgactttcctgacactctagaaggatttgagtacgccttcaatgaaaagggacagctccggcacatcaaaaccggggagccctttgtgtttaactatcgcgaagacctgcacagatggaaccagaaacgttatgaagcactgggggagattatcacaaaatacgtctatgaactgctagaaaaggactgtaatcttaagaaggtaagtattccagtggatgctaccgaaagcgaacctaaaagtttcatcttcatgtctgaggacgctctgaccaatccccaaaagttgatggttctgatccacggatccggagtggtgagagcaggacagtgggcgcggaggctgatcattaacgaggacctggattctggcacacaaatcccctttattaaacgggccgttgccgaagggtacggtgtcattgtgctcaaccccaatgagaactacatcgaagtggagaagcccaaaatccacgttcagtccagcagcgattcctcagatgagcctgcggagaaacgggaaagaaaagacaaggttagcaaagaaaccaaaaaaaggagggatttttatgaaaaatatcgcaatccacagcgggaaaaggaaatgatgcaactgtatatccgcgagaacgggtcccccgaagaacacgccatatatgtctgggaccacttcattgcacaggctgctgcagagaatgtattcttcgtcgctcacagctatggtggtctggcttttgtggagctcatgatccagcgggaagctgacgtcaaaaacaaagtcacagctgtagctctaacagactccgtgcataatgtgtggcatcaagaagccgggaaaacgatccgagaatggatgagggaaaactgctgcaactgggtgagttccagtgagccgctagatacatccgtcgaatccatgctgccagactgtccacgggtgtccgccgggacagatcgccacgagctgacaagctggaaatcctttcctagcatcttcaaattcttcaccgaggcatccgaggcaaaaacaagttcacttaaaccagccgtgactagaagaagccatagaatcaaacacgaagaactctag

SEQ ID NO: 222752 - DNA, 1251 bp, Artificial Sequence
  derived and/or modified sequence
atgagcatcagcctgagctctctgatcctgcttcctatctggatcaacatggcccaaatccagcaagggggtcccgacgaaaaggaaaaaactaccgcattgaaagatctgctgtcccgcatcgatcttgatgaactgatgaagaaagatgaaccccctcttgactttccagataccttagagggctttgagtatgcgtttaacgaaaaagggcaattgcgacacattaagaccggcgagccgtttgtattcaactatagagaggatctgcacagatggaaccagaagagatatgaggccctcggcgaaattatcacgaaatacgtgtacgagcttcttgaaaaggattgcaatcttaaaaaagtctctattccggtggacgcaactgaatccgagccaaaatcatttatattcatgagcgaggacgcgctgacgaaccctcagaaacttatggtgctcattcacgggagcggagttgttagagcgggtcaatgggcacggaggctaatcatcaacgaagatctggatagtggcacccagattccatttatcaaacgcgctgtggccgaaggatatggtgtaattgtgctaaatcctaacgaaaattacatcgaagtagagaagccaaaaattcacgtgcagtctagtagcgattcaagcgacgaaccagctgaaaaacgggagcggaaagacaaagtgtcaaaagagaccaaaaaacgcagggatttctacgaaaaataccgcaacccacaacgcgagaaagagatgatgcagttatacatcagagagaatggatcaccggaggaacacgccatatatgtctgggaccactttatagctcaagccgccgcagagaacgtgtttttcgtggctcatagttacggtggactcgcatttgtggaactcatgattcagagagaagccgacgtcaaaaataaagtaaccgctgtggccctcaccgattctgtacataatgtgtggcatcaggaagccggcaagacgatcagagaatggatgcgtgagaactgctgtaactgggtgtcatcttcagaaccgctggacactagtgtggaatctatgctccctgattgcccccgggtctcagcaggaaccgaccgacatgagctgacatcatggaaaagtttcccttctatattcaaattctttacggaagcctcagaagccaagacatctagccttaaaccagcggtaacaagaaggtctcacagaatcaagcatgaagaactctag

SEQ ID NO: 222753 - DNA, 1369 bp, Artificial Sequence
  derived and/or modified sequence
gtatcaatctcctgaagaccccggaagtgcaactcgaacttggtcggggcgcggatcccgagagggaaagtcataacaaccgcacgagggagttcgactggcgaactggaaggccacgcctcctcccgcctgccccctcagccctgtggctgggggcagagctcagatttattatctaggatagatttggatgaactaatgaaaaaagatgaaccgcctcttgattttcctgataccctggaaggatttgaatatgcttttaatgaaaagggacagttaagacacataaaaactggggaaccatttgtttttaactaccgggaagatttacacagatggaaccagaaaagatacgaggctctaggagagatcatcacgaagtatgtatatgagctcctggaaaaggattgtaatttgaaaaaagtatctattccagtagatgccactgagagtgaaccaaagagttttatctttatgagtgaggatgctttgacaaatccacagaaactgatggttttaattcatggtagtggtgttgtcagggcagggcagtgggctagaagacttattataaatgaagatctggacagtggcacacagataccgtttattaaaagagctgtggctgaaggatatggagtaatagtactaaatcccaatgaaaactatattgaagtagaaaagccgaagatacacgtacagtcatcatctgatagttcagatgaaccagcagaaaaacgggaaagaaaagataaagtttctaaagaaacaaagaagcgacgtgatttctatgagaagtatcgtaacccccaaagagaaaaagaaatgatgcaattgtatatcagagaaaatggttctcctgaagaacatgcaatctatgtttgggatcatttcatagctcaggctgctgctgagaatgtgtttttcgttgctcacagctatggaggacttgcttttgttgaactgatgattcaacgagaagccgatgtaaaaaataaggtaactgctgtggcattgacagactctgttcacaatgtgtggcatcaagaagctggcaaaacgattcgagaatggatgagagagaactgttgtaattgggtctctagctcagaaccattagacacatcagtggagtccatgctacctgattgcccccgggtctcagcaggcaccgaccgtcacgagctaacttcctggaagagctttccgtctattttcaaattctttaccgaagcctcagaggccaagaccagctccctgaagccggctgtgacgcgccgctcccaccgcatcaagcacgaagagctgtaagaggagcgagcgcgacgggggaggccgccctggcgcacccacccgcacgcctcctcac

SEQ ID NO: 222754 - DNA, 1251 bp, Artificial Sequence
  derived and/or modified sequence
atgagcatcagcctgagcagcctgatcctgctgcccatctggatcaacatggcccagatccagcagggcggccccgacgagaaggagaagaccaccgccctgaaggacctgctgagcagaatcgacctggacgagctgatgaagaaggacgagccccccctggacttccccgacaccctggagggcttcgagtacgccttcaacgagaagggccagctgagacacatcaagaccggcgagcccttcgtgttcaactacagagaggacctgcacagatggaaccagaagagatacgaggccctgggcgagatcatcaccaagtacgtgtacgagctgctggagaaggactgcaacctgaagaaggtgagcatccccgtggacgccaccgagagcgagcccaagagcttcatcttcatgagcgaggacgccctgaccaacccccagaagctgatggtgctgatccacggcagcggcgtggtgagagccggccagtgggccagaagactgatcatcaacgaggacctggacagcggcacccagatccccttcatcaagagagccgtggccgagggctacggcgtgatcgtgctgaaccccaacgagaactacatcgaggtggagaagcccaagatccacgtgcagagcagcagcgacagcagcgacgagcccgccgagaagagagagagaaaggacaaggtgagcaaggagaccaagaagagaagagacttctacgagaagtacagaaacccccagagagagaaggagatgatgcagctgtacatcagagagaacggcagccccgaggagcacgccatctacgtgtgggaccacttcatcgcccaggccgccgccgagaacgtgttcttcgtggcccacagctacggcggcctggccttcgtggagctgatgatccagagagaggccgacgtgaagaacaaggtgaccgccgtggccctgaccgacagcgtgcacaacgtgtggcaccaggaggccggcaagaccatcagagagtggatgagagagaactgctgcaactgggtgagcagcagcgagcccctggacaccagcgtggagagcatgctgcccgactgccccagagtgagcgccggcaccgacagacacgagctgaccagctggaagagcttccccagcatcttcaagttcttcaccgaggccagcgaggccaagaccagcagcctgaagcccgccgtgaccagaagaagccacagaatcaagcacgaggagctgtag

SEQ ID NO: 222755 - DNA, 1251 bp, Artificial Sequence
  derived and/or modified sequence
atgtccattagccttagctcactcattctgctgcccatctggatcaatatggcgcagattcagcagggaggcccagatgagaaggagaagacaaccgcacttaaagatctgctctcccgcatcgacctggacgagctcatgaagaaggacgaaccaccgctcgactttcccgacacccttgaaggcttcgagtacgcttttaatgaaaaagggcagctgagacatattaagacgggagagcccttcgttttcaactacagggaggaccttcatcgttggaaccaaaaacggtatgaagccctgggcgaaattatcaccaaatacgtgtatgaactgttggagaaagattgcaacctgaagaaggtgagtatcccggtggacgcgacggaatccgagccgaagtctttcatttttatgagcgaggatgccctgacaaacccacaaaaattgatggtgctgattcacggctctggggtcgttcgggccggccagtgggctcgcaggctgattattaacgaggatctagattccggaacccagattccttttataaagagggcagtggcagagggttacggggtgatcgttctgaaccctaatgaaaattacatagaagtggaaaagcctaagatccacgtgcagtccagttctgattcctctgacgaaccagctgaaaagcgcgagcggaaagacaaagtaagcaaggaaactaaaaagaggcgggacttttatgagaaatataggaatccacagagagagaaggagatgatgcagctctatattcgggaaaatggctcacccgaagaacacgccatttacgtttgggaccacttcattgcccaggccgcggcggagaatgttttctttgtcgcgcatagctacgggggactggccttcgttgagctcatgattcagcgggaggccgacgtgaaaaataaggtaaccgctgtggcactgactgatagcgtgcacaacgtgtggcatcaggaggctggcaagacaatcagggagtggatgcgagagaactgttgtaattgggtgtcatcaagcgagcccctcgacacgtctgtggaaagcatgctgccagattgccctcgagtgagcgccggaaccgataggcacgaactcacatcttggaagagcttccccagtatcttcaaatttttcacagaggcatccgaagctaaaaccagctctttaaaaccagcggtgactagacgaagccatcggattaagcacgaggaactgtag

SEQ ID NO: 222756 - DNA, 1251 bp, Artificial Sequence
  derived and/or modified sequence
atgagcatcagcctgagcagcctcatcctgctgcccatctggatcaacatggcccagatccagcagggcggcccagatgagaaggagaagaccacagccctgaaggacctgctgagcagaattgacctggatgagctgatgaagaaggatgagccccccctggacttcccagacaccctggagggctttgaatatgccttcaatgagaagggccagctgcggcacatcaagacaggagagccctttgtgttcaactaccgggaggacctgcaccgctggaaccagaagagatatgaggccctgggggagatcatcaccaagtatgtgtatgagctgctggagaaggactgcaacctgaagaaggtgtccatccctgtggatgccacagaaagtgagcccaagagcttcatcttcatgtctgaagatgccctgaccaacccccagaagctgatggtgctgattcatggcagcggcgtggtgcgggccggccagtgggcccggcggctcatcatcaatgaagacctggacagcggcacccagatccccttcatcaagagagctgtggccgagggctacggcgtgattgtgctgaaccccaatgaaaactacatcgaggtggagaagcccaagatccacgtgcagagcagcagtgacagcagtgatgagcctgctgagaagcgggagaggaaggacaaggtgtccaaggagaccaagaagaggcgggacttctatgagaagtacagaaacccccagcgggagaaggagatgatgcagctgtacatcagagaaaatggcagccctgaggagcacgccatctacgtgtgggaccacttcatcgcccaggccgctgctgaaaatgtgttctttgtggcccacagctatggaggcctggcctttgtggagctgatgatccagcgggaggctgatgtgaagaacaaggtgacagctgtggccctgacagacagcgtgcacaacgtgtggcaccaggaggccggcaagaccatccgggagtggatgagggagaactgctgcaactgggtgagcagcagcgagcccctggacacctctgtggagagcatgctgcctgactgcccccgggtgtctgctggaacagacagacatgagctgacctcctggaagagcttccccagcatcttcaagttcttcacagaggccagcgaggccaagaccagcagcctgaagccagctgtgacccggcgcagccaccgcatcaagcatgaggagctgtag

SEQ ID NO: 222757 - DNA, 1251 bp, Artificial Sequence
  derived and/or modified sequence
atgagcatcagcctgagcagcctgatcctgctgcccatctggatcaatatggcgcagattcagcagggcggtcccgacgagaaggagaagaccacggcccttaaagatttgctttccagaatcgacctggacgagttaatgaaaaaggacgaacctcctctggacttcccagatacactagagggatttgagtacgcttttaacgagaagggccagctccgccatataaaaactggcgagcctttcgtgttcaactaccgcgaggatctgcaccggtggaatcagaaaaggtacgaggcactcggcgaaatcattactaaatacgtgtacgagctccttgaaaaagactgcaacctgaaaaaggtgtcaatccctgttgatgccactgaatctgagccgaagagctttattttcatgtctgaggatgcccttaccaacccccagaagctcatggtgctcattcacgggagcggggttgttcgcgctggccagtgggctcgcaggctcattattaacgaagacctcgatagcgggacccagatcccattcattaagcgggccgtcgcagaaggatatggtgtgattgtcctgaatcccaacgagaactatatcgaggtagaaaaacccaagatccacgtccagtcttctagcgattccagcgacgaaccagccgaaaaacgcgaacggaaagataaagtgtctaaggagactaaaaagagacgggatttctatgaaaaataccgcaacccccagcgggagaaggaaatgatgcaactttatatcagggaaaacggcagccctgaagagcacgccatctacgtttgggatcattttatcgcacaggcagccgccgaaaatgttttttttgttgcccatagctatggtgggcttgcttttgtcgaactcatgattcagagagaggcagacgtcaagaacaaggttaccgcagtagccctaactgactctgtgcacaatgtgtggcaccaggaagccgggaaaacaattagagagtggatgagagagaattgctgcaactgggtgagctcatcagagccccttgatacttcagttgaatcaatgctgcccgactgccctagggtgtccgccggtacagataggcacgagctcacatcatggaaatcctttcctagcatcttcaagttctttaccgaagcttccgaagcaaagacatccagcctgaaaccagctgtcacaagacgcagtcataggatcaagcacgaggaattatag

SEQ ID NO: 222758 - RNA, 1251 nt, Artificial Sequence
  derived and/or modified sequence
augaguaucucucugucuagccuuauccuucugccgauuuggaucaauauggcccagauucagcaaggcgguccagaugagaaagaaaagacgaccgcacugaaagaucugcugucucgaaucgaccuggacgagcugaugaaaaaagacgagccgccccuugacuuuccugacacucuagaaggauuugaguacgccuucaaugaaaagggacagcuccggcacaucaaaaccggggagcccuuuguguuuaacuaucgcgaagaccugcacagauggaaccagaaacguuaugaagcacugggggagauuaucacaaaauacgucuaugaacugcuagaaaaggacuguaaucuuaagaagguaaguauuccaguggaugcuaccgaaagcgaaccuaaaaguuucaucuucaugucugaggacgcucugaccaauccccaaaaguugaugguucugauccacggauccggaguggugagagcaggacagugggcgcggaggcugaucauuaacgaggaccuggauucuggcacacaaauccccuuuauuaaacgggccguugccgaaggguacggugucauugugcucaaccccaaugagaacuacaucgaaguggagaagcccaaaauccacguucaguccagcagcgauuccucagaugagccugcggagaaacgggaaagaaaagacaagguuagcaaagaaaccaaaaaaaggagggauuuuuaugaaaaauaucgcaauccacagcgggaaaaggaaaugaugcaacuguauauccgcgagaacgggucccccgaagaacacgccauauaugucugggaccacuucauugcacaggcugcugcagagaauguauucuucgucgcucacagcuaugguggucuggcuuuuguggagcucaugauccagcgggaagcugacgucaaaaacaaagucacagcuguagcucuaacagacuccgugcauaauguguggcaucaagaagccgggaaaacgauccgagaauggaugagggaaaacugcugcaacugggugaguuccagugagccgcuagauacauccgucgaauccaugcugccagacuguccacggguguccgccgggacagaucgccacgagcugacaagcuggaaauccuuuccuagcaucuucaaauucuucaccgaggcauccgaggcaaaaacaaguucacuuaaaccagccgugacuagaagaagccauagaaucaaacacgaagaacucuag

SEQ ID NO: 222759 - RNA, 1251 nt, Artificial Sequence
  derived and/or modified sequence
augagcaucagccugagcucucugauccugcuuccuaucuggaucaacauggcccaaauccagcaagggggucccgacgaaaaggaaaaaacuaccgcauugaaagaucugcugucccgcaucgaucuugaugaacugaugaagaaagaugaacccccucuugacuuuccagauaccuuagagggcuuugaguaugcguuuaacgaaaaagggcaauugcgacacauuaagaccggcgagccguuuguauucaacuauagagaggaucugcacagauggaaccagaagagauaugaggcccucggcgaaauuaucacgaaauacguguacgagcuucuugaaaaggauugcaaucuuaaaaaagucucuauuccgguggacgcaacugaauccgagccaaaaucauuuauauucaugagcgaggacgcgcugacgaacccucagaaacuuauggugcucauucacgggagcggaguuguuagagcgggucaaugggcacggaggcuaaucaucaacgaagaucuggauaguggcacccagauuccauuuaucaaacgcgcuguggccgaaggauaugguguaauugugcuaaauccuaacgaaaauuacaucgaaguagagaagccaaaaauucacgugcagucuaguagcgauucaagcgacgaaccagcugaaaaacgggagcggaaagacaaagugucaaaagagaccaaaaaacgcagggauuucuacgaaaaauaccgcaacccacaacgcgagaaagagaugaugcaguuauacaucagagagaauggaucaccggaggaacacgccauauaugucugggaccacuuuauagcucaagccgccgcagagaacguguuuuucguggcucauaguuacgguggacucgcauuuguggaacucaugauucagagagaagccgacgucaaaaauaaaguaaccgcuguggcccucaccgauucuguacauaauguguggcaucaggaagccggcaagacgaucagagaauggaugcgugagaacugcuguaacugggugucaucuucagaaccgcuggacacuaguguggaaucuaugcucccugauugcccccgggucucagcaggaaccgaccgacaugagcugacaucauggaaaaguuucccuucuauauucaaauucuuuacggaagccucagaagccaagacaucuagccuuaaaccagcgguaacaagaaggucucacagaaucaagcaugaagaacucuag

SEQ ID NO: 222760 - protein, 1249 aa, Artificial Sequence
  derived and/or modified sequence
MSSMWSEYTIGGVKIYFPYKAYPSQLAMMNSILRGLNSKQHCLLESPTGSGKSLALLCSALAWQQSLSGKPADEGVSEKAEVQLSCCCACHSKDFTNNDMNQGTSRHFNYPSTPPSERNGTSSTCQDSPEKTTLAAKLSAKKQASIYRDENDDFQVEKKRIRPLETTQQIRKRHCFGTEVHNLDAKVDSGKTVKLNSPLEKINSFSPQKPPGHCSRCCCSTKQGNSQESSNTIKKDHTGKSKIPKIYFGTRTHKQIAQITRELRRTAYSGVPMTILSSRDHTCVHPEVVGNFNRNEKCMELLDGKNGKSCYFYHGVHKISDQHTLQTFQGMCKAWDIEELVSLGKKLKACPYYTARELIQDADIIFCPYNYLLDAQIRESMDLNLKEQVVILDEAHNIEDCARESASYSVTEVQLRFARDELDSMVNNNIRKKDHEPLRAVCCSLINWLEANAEYLVERDYESACKIWSGNEMLLTLHKMGITTATFPILQGHFSAVLQKEEKISPIYGKEEAREVPVISASTQIMLKGLFMVLDYLFRQNSRFADDYKIAIQQTYSWTNQIDISDKNGLLVLPKNKKRSRQKTAVHVLNFWCLNPAVAFSDINGKVQTIVLTSGTLSPMKSFSSELGVTFTIQLEANHIIKNSQVWVGTIGSGPKGRNLCATFQNTETFEFQDEVGALLLSVCQTVSQGILCFLPSYKLLEKLKERWLSTGLWHNLELVKTVIVEPQGGEKTNFDELLQVYYDAIKYKGEKDGALLVAVCRGKVSEGLDFSDDNARAVITIGIPFPNVKDLQVELKRQYNDHHSKLRGLLPGRQWYEIQAYRALNQALGRCIRHRNDWGALILVDDRFRNNPSRYISGLSKWVRQQIQHHSTFESALESLAEFSKKHQKVLNVSIKDRTNIQDNESTLEVTSLKYSTSPYLLEAASHLSPENFVEDEAKICVQELQCPKIITKNSPLPSSIISRKEKNDPVFLEEAGKAEKIVISRSTSPTFNKQTKRVSWSSFNSLGQYFTGKIPKATPELGSSENSASSPPRFKTEKMESKTVLPFTDKCESSNLTVNTSFGSCPQSETIISSLKIDATLTRKNHSEHPLCSEEALDPDIELSLVSEEDKQSTSNRDFETEAEDESIYFTPELYDPEDTDEEKNDLAETDRGNRLANNSDCILAKDLFEIRTIKEVDSAREVKAEDCIDTKLNGILHIEESKIDDIDGNVKTTWINELELGKTHEIEIKNFKPSPSKNKGMFPGFK

SEQ ID NO: 222761 - DNA, 3750 bp, Artificial Sequence
  derived and/or modified sequence
atgagttccatgtggtctgaatatacaatcgggggcgtgaaaatctactttccatataaggcctacccttcccaacttgccatgatgaactcgattttgagaggcctgaactccaagcagcattgcctgttggaatctcccacagggtctgggaagagcctagcgttactgtgttccgcactcgcctggcaacagtctctgtctggaaagcctgcagacgaaggcgtatcagaaaaggctgaggttcagctctcttgctgctgtgcctgccacagtaaggatttcacaaataacgacatgaaccagggcacctcacggcattttaattatccctcgacaccgccatccgaacgcaatggcacaagctcaacttgtcaagatagtccggagaagaccacgctagccgctaaattatccgcaaagaagcaagcatctatctatagagacgaaaatgacgattttcaggtagagaaaaaaagaattaggcccctggaaaccactcagcagattaggaagcgacactgctttggtactgaagttcacaatctcgatgcaaaagtagactctggcaagacggttaagttaaattctccccttgagaagataaactctttctccccccagaaaccccctggccattgtagccggtgctgttgctccaccaaacagggcaactcccaggaaagttccaataccatcaagaaggaccacactgggaagtccaagatacccaaaatttactttggcacgcgaacccacaagcagatcgcgcagatcacacgggagctgagaagaacagcctatagcggtgtccctatgacaattctgagctccagggaccatacttgtgtgcatccagaggtggtcggtaacttcaaccgcaacgagaaatgcatggagctgctggacggaaagaatggaaagagttgttatttttaccacggagtccataagatttcagatcagcacactctgcaaacatttcagggaatgtgcaaggcgtgggacattgaggagctcgtgtcgctcgggaagaaactgaaggcctgtccatactacactgccagggagctgatacaggacgcggatatcatattttgcccctacaattacctgctcgatgctcagatacgggagtccatggacctgaacttgaaggaacaggtggtcatcctagatgaggcccacaacattgaggactgcgctagagagtccgcctcgtatagcgtgacggaggtccaactcaggttcgctcgggacgaactggattccatggtgaataacaatatccgtaagaaagaccatgagccactccgcgctgtatgttgttcactgataaactggctggaggccaacgcggagtatctggtggagcgggactacgagtcagcgtgtaaaatttggagtggaaatgagatgctcctgaccttacacaagatgggtattacaactgccacatttcccattttacaaggacacttcagcgccgtgttgcaaaaggaggaaaaaataagcccaatctacgggaaagaggaggctcgcgaggtgcccgtcattagcgcaagcactcaaattatgttgaagggtctcttcatggttctggactatctgttccggcagaattccagatttgccgatgactacaagattgccatccaacagacctattcgtggacaaatcagatcgatattagtgataaaaatggtctgctggtgctgccaaaaaataagaagaggtcgcgccagaaaaccgcggtccacgtgctaaacttttggtgtctgaacccggccgtggccttttccgatattaatggtaaggtgcagacaatcgtcctgacgagtggcactctgtcccccatgaagtccttcagcagcgagttgggggtcacattcacaatccagcttgaagcaaaccacatcatcaagaacagccaagtgtgggtggggactatcggcagcggacccaagggccggaatctgtgtgcaaccttccagaataccgagacattcgagtttcaggacgaagtgggggctctgttgttgtccgtttgccaaaccgtgtctcagggtattctgtgcttcctgcccagctataagctgctggaaaaactgaaagagcgctggctctccaccggcctttggcacaacttagagctcgtcaagactgtgattgtggagcctcaggggggagagaaaactaatttcgacgagctcctccaggtctattacgacgcgatcaagtacaaaggcgagaaggacggcgccttgcttgtcgccgtgtgccgcggcaaggtgtccgaaggcctggattttagtgatgacaatgctagagcagttattacaatcgggatcccattccctaacgtgaaggatctacaagtcgagctgaaacgtcagtataacgaccaccatagtaagctacgaggattgctccccgggcgccaatggtatgagattcaagcttacagagcactgaatcaggctcttggcagatgcattcgacacagaaacgactggggcgctctgattctagtcgatgaccggttcagaaataatccttctaggtatattagcgggctgtctaagtgggtcaggcagcaaatacagcaccacagcacctttgagtccgccctagagtctttggcagaattttcaaaaaaacaccaaaaagtcctgaatgtgtccataaaggataggactaatatccaggataatgaatcaacgctagaggtgacctctctgaagtattcgacctccccatatctcctggaggcagccagccacttgtctcccgagaattttgtggaagacgaggcaaagatttgtgtgcaggagctgcaatgcccgaaaattatcactaaaaatagtcctcttccttcgagcatcatttcaaggaaagaaaaaaatgacccagtctttctggaggaagccggtaaagctgagaagatcgtcatttctcggagcacttctccgacattcaacaagcaaacaaagcgtgtcagctggtcttcctttaactccttgggccagtatttcaccggcaagatccccaaggcaacccccgaacttggctcgtccgaaaattcggcaagttcaccaccacgcttcaagactgagaaaatggaatccaaaaccgtgctcccttttactgataagtgcgaaagcagcaacctgaccgttaatacaagcttcgggtcatgtccccagagcgaaaccatcattagctcccttaaaatcgacgcaactctgacccgaaagaatcatagcgaacacccactgtgctccgaggaggccctcgatccagatatagagctcagcttagtaagtgaggaggacaagcagtctacctcaaatagagatttcgagacagaggctgaggacgagtccatctacttcacacccgaattatacgatcccgaggacactgacgaggagaagaatgacctcgctgaaacagacaggggtaacaggctggctaataattcagattgcatcctggccaaggatctatttgaaatcagaaccatcaaggaagtggattcagcgcgagaagtgaaggccgaggattgcatcgacacgaagctaaacggcatccttcacattgaagagtcgaagatcgatgatatcgatgggaacgtgaaaaccacgtggatcaacgaactggaactgggtaaaacgcacgaaatagagattaagaactttaaaccttctccgagcaaaaataaaggcatgttccccggatttaaatag

SEQ ID NO: 222762 - DNA, 3750 bp, Artificial Sequence
  derived and/or modified sequence
atgagctccatgtggagcgagtacaccatcggcggcgtgaagatctacttcccctacaaggcctaccccagccagctggccatgatgaacagcatcctgcggggcctgaacagcaagcagcactgcctgctggagagccccaccggcagcggcaagagcctggccctgctgtgcagcgccctggcctggcagcagagcctgagcggcaagccagcagatgaaggagtgtctgagaaggccgaggtgcagctgagctgctgctgtgcctgccacagcaaggacttcaccaacaatgacatgaaccagggcaccagccgccacttcaactaccccagcaccccacccagcgagagaaatggcaccagcagcacctgccaggacagccctgagaagaccaccctggccgccaagctgagcgccaagaagcaggccagcatctacagagatgaaaatgatgacttccaggtggagaagaagaggatccggcccctggagaccacccagcagatcaggaagaggcactgcttcggcacagaggtgcacaacctggatgccaaggtggacagcggcaagacagtgaagctgaacagccccctggagaagatcaacagcttcagcccccagaagcccccaggccactgcagccgctgctgctgcagcaccaagcagggcaacagccaggagagcagcaacaccatcaagaaggaccacacaggcaagagcaagatccccaagatctacttcggcaccaggacccacaagcagatcgcccagatcacccgggagctgcggaggacagcctacagcggcgtgcccatgaccatcctgagcagccgggaccacacctgtgtgcaccctgaggtggtgggcaacttcaacagaaatgagaagtgcatggagctgctggatggcaagaatggcaagagctgctacttctaccacggcgtgcacaagatcagtgaccagcacaccctgcagaccttccagggcatgtgcaaggcctgggacatcgaggagctggtgtccctgggcaagaagctgaaggcctgcccctactacacagcccgggagctgatccaggatgctgacatcatcttctgcccctacaactacctgctggatgcccagatccgggagagcatggacctgaacctgaaggagcaggtggtgatcctggatgaggcccacaacatcgaggactgtgcccgggagagcgccagctacagcgtgacagaggtgcagctgcgctttgccagagatgagctggacagcatggtgaacaacaacatcaggaagaaggaccacgagcccctgcgggctgtgtgctgcagcctcatcaactggctggaggccaatgctgagtacctggtggagcgggactatgaaagtgcctgcaagatctggagcggaaatgagatgctgctgaccctgcacaagatgggcatcaccacagccaccttccccatcctgcagggccacttctctgctgtgctgcagaaggaggagaagatcagccccatctacggcaaggaggaggcccgggaggtgcctgtgatcagcgccagcacccagatcatgctgaagggcctcttcatggtgctggactacctgttccggcagaacagcagatttgctgatgactacaagatcgccatccagcagacctacagctggaccaaccagattgacatcagtgacaagaatggcctgctggtgctgcccaagaacaagaagaggagccggcagaagacagctgtgcacgtgctgaacttctggtgcctgaacccagctgtggccttcagtgacatcaacgggaaggtgcagaccatcgtgctgaccagcggcaccctgagccccatgaagagcttcagcagcgagctgggcgtgaccttcaccatccagctggaggccaaccacatcatcaagaacagccaggtgtgggtgggcaccatcggcagcggccccaagggcaggaacctgtgtgccaccttccagaacacagagacctttgagttccaggatgaggtgggcgccctgctgctgtctgtgtgccagacagtgtcccagggcatcctgtgcttcctgcccagctacaagctgctggagaagctgaaggagcgctggctgagcacaggcctgtggcacaacctggagctggtgaagacagtcatcgtggagccccagggcggggagaagaccaactttgatgagctgctgcaggtgtactatgatgccatcaagtacaagggggagaaggatggagccctgctggtggccgtgtgccggggcaaggtgtctgagggcctggacttcagtgatgacaatgcccgggccgtcatcaccatcggcatccccttccccaacgtgaaggacctgcaggtggagctgaagaggcagtacaatgaccaccacagcaagctgcggggcctgctgcccggccggcagtggtatgagatccaggcctaccgggccctgaaccaggccctgggccgctgcatccgccacagaaatgactggggcgccctgatcctggtggatgaccgcttcaggaacaaccccagccgctacatcagcggcctgagcaagtgggtgcggcagcagatccagcaccacagcacctttgagagcgccctggagagcctggccgagttcagcaagaagcaccagaaggtgctgaatgtgtccatcaaggacaggaccaacatccaggacaatgaaagcaccctggaggtgaccagcctgaagtacagcaccagcccctacctgctggaggccgccagccacctgagccctgagaactttgtggaggatgaggccaagatctgtgtgcaggagctgcagtgccccaagatcatcaccaagaacagccccctgcccagcagcatcatcagcaggaaggagaagaatgaccctgtgttcctggaggaggccggcaaggccgagaagatcgtcatcagccgcagcaccagccccaccttcaacaagcagaccaagagggtgtcctggagcagcttcaacagcctgggccagtacttcaccgggaagatccccaaggccaccccagagctgggcagcagtgaaaattctgccagcagccccccacgcttcaagacagagaagatggagagcaagacagtgctgcccttcacagacaagtgtgagagcagcaacctgactgtgaacaccagctttggcagctgcccccagagcgagaccatcatcagcagcctgaagattgatgccaccctgaccaggaagaaccacagcgagcaccccctgtgcagcgaggaggccctggaccctgacatcgagctgagcctggtgtctgaggaggacaagcagagcaccagcaacagagactttgaaacagaagcagaagatgagagcatctacttcaccccagagctgtatgaccctgaggacacagatgaggagaagaatgacctggccgagacagaccggggcaaccggctggccaacaacagcgactgcatcctggccaaggacctgtttgagatccgcaccatcaaggaggtggacagcgcccgggaggtgaaggccgaggactgcatcgacaccaagctgaatggcatcctgcacatcgaggagagcaagattgatgacattgatggaaatgtgaagaccacctggatcaatgagctggagctgggcaagacccatgaaattgagatcaagaacttcaagcccagccccagcaagaacaagggcatgtttcctggcttcaagtag

SEQ ID NO: 222763 - DNA, 3750 bp, Artificial Sequence
  derived and/or modified sequence
atgagcagcatgtggagcgagtacaccatcggcggcgtgaagatctatttcccttataaagcctatcccagtcagcttgccatgatgaattcgattctgcgaggcttgaattcgaagcagcattgccttcttgagagcccaaccggctcaggcaagagtttagccctgctgtgctctgctcttgcctggcagcaatccctgagcggtaagcctgccgatgaaggtgtatcagaaaaggccgaagtgcagctctcctgttgctgcgcctgccactctaaggacttcaccaacaatgatatgaatcaaggcacatccaggcatttcaactacccctctaccccaccgagtgagaggaatggcacaagcagtacgtgccaggattcccccgagaaaaccacattagcagccaaactgtccgcaaagaaacaggctagtatttatcgggacgagaacgatgactttcaggttgaaaagaaacgtatccggccattggagacaacccagcagatacgcaagaggcactgcttcggaaccgaggtgcataatctagacgccaaagtggactctgggaaaaccgtgaagctgaactccccactggaaaagattaattcgttctcacctcagaaaccgcctggccattgcagccgctgttgctgctccacgaaacaggggaattcccaagagagctcaaatacaattaaaaaggaccacactggaaagtcaaagataccaaagatttattttggaactcgaacacacaagcagattgcacagatcactcgggagctccgcagaactgcgtactccggagtgcctatgacaattttgagctcacgtgatcacacctgcgtgcatcctgaagttgtgggaaattttaaccggaatgagaagtgcatggagctgttggacgggaagaatggcaagtcctgttatttttaccacggagtgcacaaaatctctgaccagcatacactgcagacatttcaaggaatgtgcaaagcttgggacatcgaagagttggtgagtcttggcaagaagttgaaagcctgcccttattataccgcgcgagaactcattcaagatgccgacattatcttttgcccgtataattacctgttggatgctcaaatccgggaatccatggacctgaacctgaaagagcaggtggtcatcctggatgaggcccataacattgaggattgtgccagagaaagcgccagctacagcgtgacagaggtgcagctccgcttcgccagagacgaattggactccatggtcaataataatattcgcaaaaaagaccatgaacctctgcgagccgtgtgctgttcactcataaactggcttgaagccaatgcagagtacttggtagagcgtgactacgagagcgcctgcaagatttggtcaggaaacgaaatgctactgaccttgcacaagatggggatcacaacagcaactttccccattctccaaggccatttcagcgctgtgttgcagaaggaggagaaaatttctcccatatacggaaaggaggaggcgagagaggttcccgttatctcagcctctacacaaattatgcttaaggggctgtttatggttctcgattatttgtttagacaaaactctcggttcgcagatgactacaagatcgcaattcagcagacatactcttggactaaccaaatcgatatcagcgacaaaaacgggctcctggtgcttccgaagaacaagaaaagaagccgacaaaagacagccgtacatgtcctcaatttttggtgtctcaatcctgcggtggctttctctgacatcaacggaaaggtgcagactatcgtgcttaccagtggcactctgagccccatgaagtcctttagttctgagctgggcgtcacgttcactatccagctggaggccaaccatattattaagaattcccaggtgtgggtaggcacaattggatccggtcctaaaggccgtaatctgtgcgctacgtttcaaaacaccgaaacctttgaatttcaggacgaggttggcgcactactgttgtccgtgtgtcaaacagtgagccaggggattctgtgttttcttccaagctacaagctgttggaaaaattgaaggagagatggctttccaccggtctgtggcataatctggagcttgtgaaaaccgtcatcgtagaaccccagggcggggagaagacaaactttgacgagctcctgcaggtgtactacgatgcaattaagtacaagggtgagaaggatggggcgctgttagtggcggtgtgtagaggaaaggtgtccgaggggctggacttttcagatgataacgcccgagcagtcatcacgataggtattcctttccccaacgtgaaagatctgcaggtggagctgaagcgccagtataatgaccatcacagcaaacttcgaggtttactccccgggcggcagtggtacgaaatccaggcctacagagcgctcaatcaggccttaggaaggtgtatcagacaccgaaatgactggggggctctgatcttagttgacgatcgatttagaaacaaccctagtcggtatatctcagggcttagcaagtgggtccgacaacagattcagcaccacagtaccttcgagagcgctttagaatctctagccgagttcagtaaaaagcatcaaaaagtgcttaatgtatctatcaaggatcggaccaacattcaagataacgagagcacccttgaggtgaccagtctcaaatattcgaccagcccgtatctgctggaggccgcatcccatttgagccctgagaacttcgtagaggatgaggctaaaatatgtgtgcaagagctccagtgccctaagattattacaaaaaactcacccctaccaagctctatcatcagcaggaaggaaaaaaacgatcccgtgtttctagaagaggccgggaaagccgagaagatagtcatttctaggagtacttcacctacctttaataagcagactaagcgggtgagctggagttccttcaactcactgggacagtacttcacaggaaagatcccgaaagccacacccgagcttggcagctcagaaaactcagcttccagcccgccaaggtttaagacagagaagatggaaagcaagacggtgctgccatttacggataaatgtgagtcatcgaatctaacagtgaacacttcctttggctcctgccctcaatccgagacaatcatctccagcctgaagattgatgcaacccttaccagaaaaaaccacagtgaacaccccctgtgctcggaagaggcacttgatccagatattgagttaagcctggtaagtgaagaggataaacagagcactagcaatcgcgacttcgagacggaggccgaggacgagtccatttactttacaccagaattgtatgatccggaagacaccgacgaagaaaagaatgatctcgcagagaccgataggggcaacaggctagctaacaacagtgactgcattctcgctaaagacctgtttgagattagaactattaaggaggttgacagcgcacgagaagtgaaagcagaggattgtatcgacacaaaactaaacggcatcctgcacatagaagagagcaaaatcgacgatattgacgggaatgtgaaaaccacctggattaatgaactcgagctgggcaagacccatgaaatcgaaattaagaatttcaaaccgtcgccttctaaaaacaagggcatgttcccaggcttcaagtag

SEQ ID NO: 222764 - DNA, 3750 bp, Artificial Sequence
  derived and/or modified sequence
atgtcatctatgtggtcagaatacactatcggcggtgtgaagatctacttcccttataaggcttatccctcccagctggcaatgatgaactctatccttagaggcctcaacagtaagcagcattgcttgctagaatccccgacaggcagcggcaagtctctcgcactcttatgctccgctttagcatggcagcagagccttagtggcaagccagctgacgagggagtcagcgaaaaagcagaagtccagctgagttgctgttgcgcgtgccacagtaaggacttcactaacaacgatatgaaccaagggacatcacgacatttcaattatccctcaactcctccttccgaacgaaatggtaccagtagcacttgtcaggactcacctgaaaagactaccctggccgcaaagctctccgccaaaaaacaagcgtcaatataccgcgatgaaaacgacgacttccaggtcgagaaaaaacggatccgacctctcgagactacccagcaaatcagaaagagacattgttttggaactgaggttcataatctggacgccaaggtcgattctggcaagactgtgaaacttaactcgccgttagaaaaaataaattctttttctcctcagaagcctcctggacattgcagcaggtgctgctgctcaactaagcagggcaacagtcaggagagttcgaacactataaagaaggatcataccggtaaaagcaagatccccaagatctatttcggcacgcggacccataagcagatcgcacagatcactcgggagctgcgtagaactgcctactcgggagtcccaatgactatactcagctctagggatcacacctgcgtccatccagaggtagttggaaacttcaataggaacgaaaaatgcatggaactcctggacggtaagaacggcaagtcctgctacttttaccacggcgtccacaagatcagcgatcagcacactctccagacattccagggtatgtgtaaggcatgggacattgaagaactggtcagcctcggcaagaagttgaaggcttgtccttattatacagctcgcgaattaatccaggatgccgatatcatcttttgtccctataactacctgctggacgcgcagattagggaatcaatggacttgaacctgaaagaacaagtggtcattctcgacgaggcacataatatcgaagactgcgcccgagagtcggcctcctacagtgtgaccgaggtgcaacttcgatttgctcgcgatgagctggacagcatggtaaataacaacataaggaagaaagaccacgagcccctgagagccgtttgctgctcgctgattaactggttggaggcgaatgcagagtacctcgtggaacgggattacgaatctgcctgcaagatctggagtggaaacgagatgctgctcactttgcacaagatgggtattactaccgccacgttcccaatacttcagggtcacttcagtgcagttctccagaaagaggagaagatctcaccaatctacggtaaggaggaggcaagggaggtccccgtaatatccgcgtcaacacagattatgttgaagggcctgtttatggtccttgactacttgttcaggcagaattctagatttgccgacgactacaaaattgccatccagcagacgtactcatggactaaccagatcgacatttcggacaagaatggtttactggtgctccccaagaacaagaaacgctcacgacaaaagaccgcggtgcacgtgctgaacttctggtgtctcaaccctgccgttgctttttctgacatcaacggtaaggtgcaaacgatcgtgctgacctccgggacactttctccaatgaaatcgttcagtagtgagctaggggtgactttcactattcaactagaggccaaccatattatcaaaaactctcaagtgtgggtgggcacaatcggaagcgggccaaaaggtagaaacttgtgcgccacattccagaatactgaaacattcgaatttcaggatgaggttggcgcactattgcttagtgtgtgccagacagtgtcccaggggattttgtgttttctgccctcttataaactccttgaaaagttaaaggagaggtggctgagtaccgggctctggcacaacctggagctggttaagacagttatcgttgagccccaaggtggggagaaaacaaatttcgacgaactgcttcaggtctactacgacgccatcaaatataaaggagaaaaggatggagcgctcctggtggctgtatgtcgagggaaggtgagcgaaggactcgatttcagcgatgacaatgccagagccgttattactatcggtatccccttcccaaacgtgaaggacttgcaggtggaattgaagaggcaatacaatgatcatcatagcaaactgcggggtctgctgcctgggcgacagtggtatgagattcaagcataccgtgctctgaaccaggccctgggtcggtgtattcggcatcgcaatgactggggtgccttgatcctggtcgatgaccggtttcgcaataatccatcaaggtacatatctggacttagcaaatgggttcgtcaacaaatccagcaccattccaccttcgagtcggccttggagagtttggccgagttcagcaaaaagcatcaaaaagttctgaatgtgtcaattaaggacagaaccaatattcaggacaacgagtcaacccttgaggtgacgtcacttaaatacagcacttcaccctacttgctggaagcagctagtcatctgtctcctgaaaatttcgtcgaagatgaagccaagatctgcgtccaggagttgcagtgccctaaaataattaccaagaatagccctttaccaagcagcattattagtcgtaaagagaaaaacgaccccgtgttcctcgaagaggcaggcaaggcagagaagattgtcatctctcgctccacctcacccacgtttaacaagcaaactaaaagggtctcttggtcgagttttaacagtttgggacagtatttcacaggaaagatacccaaagccacccctgaactgggaagttccgagaatagtgcatcttcacccccaagattcaaaactgaaaagatggagtcaaaaacggtgctcccgtttactgataagtgcgagagtagtaatctcactgtcaacacctccttcggaagctgtcctcagtccgagactatcatctctagtctcaaaatcgacgctactcttaccagaaagaatcactcagagcatcccctgtgctctgaggaagccctggacccagacattgaacttagcctcgtgagcgaagaggacaagcagtccactagtaatcgtgatttcgagaccgaggcagaggacgagtcaatctatttcactcctgaattatatgatccagaagatacggatgaggagaagaacgacctggcagagactgacaggggcaaccggctggccaacaactcggactgcattctggctaaggatttattcgagatccgtactatcaaggaggtggacagcgccagagaggtcaaagctgaggattgcatcgataccaagctcaacggaatcctgcacattgaggagagtaaaattgatgatatcgatgggaacgtcaagacaacatggatcaatgaactcgaactgggcaaaacccatgagatagagatcaaaaacttcaagccctcccccagcaagaacaaggggatgtttccaggcttcaaatag

SEQ ID NO: 222765 - DNA, 4563 bp, Artificial Sequence
  derived and/or modified sequence
ccctttcttctcttccagggctccgctttatttgctctcagaagtcggtttcctttccttttcttcagtgaatcggagctcagagcgttgcttcggtttccctccagacagttaggaatctgaaataaacaggaaagcactatgtcttcaatgtggtctgaatatacaattggtggggtgaagatttactttccttataaagcttacccgtcacagcttgctatgatgaattctattctcagaggattaaacagcaagcaacattgtttgttggagagtcccacaggaagtggaaaaagcttagccttactttgttctgctttagcatggcaacaatctcttagtgggaaaccagcagatgagggcgtaagtgaaaaagctgaagtacaattgtcatgttgttgtgcatgccattcaaaggattttacaaacaatgacatgaaccaaggaacttcacgtcatttcaactatccaagcacaccaccttctgaaagaaatggcacttcatcaacttgtcaagactcccctgaaaaaaccactctggctgcaaagttatctgctaagaaacaggcatccatatacagagatgaaaatgatgattttcaagtagagaagaaaagaattcgacccttagaaactacacagcagattagaaaacgtcattgctttggaacagaagtacacaatttggatgcaaaagttgattcaggaaagactgtaaaactcaactctccactggaaaagataaactccttttcgccacagaaaccccctggccactgttctaggtgctgttgttctactaaacaaggaaacagtcaagagtcatcgaataccattaagaaggatcatacagggaaatccaagatacccaaaatatattttgggacacgcacacacaagcagattgctcagattactagagagctccggaggacggcatattcaggggttccaatgactattctttccagcagggatcatacttgtgtccatcctgaggtagtcggtaacttcaacagaaatgagaagtgcatggaattgctagatgggaaaaacggaaaatcctgctatttttatcatggagttcataaaattagtgatcagcacacattacagactttccaagggatgtgcaaagcctgggatatagaagaacttgtcagcctggggaagaaactaaaggcctgtccatattacacagcccgagaactaatacaagatgctgacatcatattttgtccctacaactatcttctagatgcacaaataagggaaagtatggatttaaatctgaaagaacaggttgtcattttagatgaagctcataacatcgaggactgtgctcgggaatcagcaagttacagtgtaacagaagttcagcttcggtttgctcgggatgaactagatagtatggtcaacaataatataaggaagaaagatcatgaacccctacgagctgtgtgctgtagcctcattaattggttagaagcaaacgctgaatatcttgtagaaagagattatgaatcagcttgtaaaatatggagtggaaatgaaatgctcttaactttacacaaaatgggtatcaccactgctacttttcccattttgcagggacatttttctgctgttcttcaaaaagaggaaaaaatctcaccaatttatggtaaagaggaggcaagagaagtacctgttattagtgcatcaactcaaataatgcttaaaggactttttatggtacttgactatctttttaggcaaaatagcagatttgcagatgattataaaattgcgattcaacagacttactcctggacaaatcagattgatatttcagacaaaaatgggttgttggttctaccaaaaaataagaaacgttcacgacagaaaactgcagttcatgtgctaaacttttggtgcttaaatccagctgtggccttttcagatattaatggcaaagttcagaccattgttttgacatctggtacattatcaccaatgaaatccttttcgtcagaacttggtgttacatttactatccagctggaggctaatcatatcattaaaaattcacaggtttgggttggtaccattgggtcaggccccaagggtcggaatctctgtgctaccttccagaatactgaaacatttgagttccaagatgaagtgggagcacttttgttatctgtgtgccagactgtgagccaaggaattttgtgtttcttgccatcttacaagttattagaaaaattaaaagaacgttggctctctactggtttatggcataatctggagttggtgaagacagtcattgtagaaccacagggaggagaaaaaacaaattttgatgaattactgcaggtgtactatgacgcaatcaaatacaaaggagagaaagatggagctctcctggtagcagtttgtcgtggtaaagtgagtgagggtctggatttctcagatgacaatgcccgtgctgtcataacaataggaattccttttccaaatgtgaaagatctacaggttgaactaaaacgacaatacaatgaccaccattcaaaattgagaggtcttctacctggccgtcagtggtatgaaattcaagcatacagggccttaaaccaggcccttggtagatgtattagacacagaaatgattggggagctcttattctagtggatgatcgctttaggaataacccaagtcgctatatatctggactttctaaatgggtacggcagcagattcagcaccattcaacctttgaaagtgcactggaatccttggctgaattttccaaaaagcatcaaaaagttcttaatgtatccataaaggacagaaccaatatacaggacaatgagtctacacttgaagtgacctctttaaagtacagtacctcaccttatttactggaagcagcaagtcatctatcaccagaaaattttgtggaagatgaagcaaagatatgtgtccaggaactacagtgtcctaaaattattaccaaaaattcacctctaccaagtagcattatctccagaaaggagaaaaatgatccagtattcctggaagaagcagggaaagcagaaaaaattgtgatttccagatccacaagcccaactttcaacaaacaaacaaagagagttagctggtcaagctttaattctttgggacagtattttactggtaaaataccgaaggcaacacctgagctcgggtcatcagagaatagtgcctctagtcctccccgtttcaaaacagagaagatggaaagtaaaactgttttgcccttcactgataaatgtgaatcctcaaatctgacagtaaacacatcgtttggatcatgccctcaatcagaaaccattatttcatcattaaagattgatgccacccttactagaaaaaatcattctgaacatccgctctgttctgaagaagccctggatccagacattgaattgtctctagtaagtgaagaagataaacagtccacttcaaatagagattttgaaacagaagcagaagatgaatctatctattttacacctgaactttatgatcctgaagatacagatgaagaaaaaaatgacctagctgaaactgatagaggaaatagattggctaacaattcagattgcattttagctaaagacctttttgaaattagaactataaaagaagtagattcagccagagaagtgaaagctgaggattgcatagatacaaagttgaatggaattctgcatattgaagaaagtaaaattgatgacattgatggtaatgtaaaaacaacttggataaatgaactggaactgggaaaaactcatgaaatagaaataaagaactttaaaccatctccttccaaaaataaaggcatgtttcctggttttaagtaataatacttaactctcaagctaagtaaaaatatgtcatcatgcttatgttaaactctgttgtaagtaataatttgtaaattgaataagtggcatactttttaaaaaactattttatgttcagaaatgtaaatgttattattcttgagtttttgggtttttttttttgagacagagtcttggtctgttgcccaggctggaatgcagtggtgtgctctgggctcactgcaaccttcacctccaggttcaagtgattctcctgcctcagccttctgagtagctgggactacaggtgtgcaccaccatgcccagctagtttttgtatttttagtagagatggggtttcaccatgttggccaggctggtctcgaactcctggcctcgtgatctgcccttctctgcctccctaagttgctgggattacaggtgtgagccacagtgcctggcccattcttgagttttgataaagtaattcatacaaagtactgtcctcaaataagtcttccttagctaaatgcaatttaaaattattcaaagatcctagggcacttctagtttcacgtaaatattcatattaggtggttctcttcatccatttgttttcacactgatacataaaaattaacagcagtctaatctagtgacacctcagtcatatttcgctatagattttac

SEQ ID NO: 222766 - DNA, 3750 bp, Artificial Sequence
  derived and/or modified sequence
atgagcagcatgtggagcgagtacaccatcggcggcgtgaagatctacttcccctacaaggcctaccccagccagctggccatgatgaacagcatcctgagaggcctgaacagcaagcagcactgcctgctggagagccccaccggcagcggcaagagcctggccctgctgtgcagcgccctggcctggcagcagagcctgagcggcaagcccgccgacgagggcgtgagcgagaaggccgaggtgcagctgagctgctgctgcgcctgccacagcaaggacttcaccaacaacgacatgaaccagggcaccagcagacacttcaactaccccagcaccccccccagcgagagaaacggcaccagcagcacctgccaggacagccccgagaagaccaccctggccgccaagctgagcgccaagaagcaggccagcatctacagagacgagaacgacgacttccaggtggagaagaagagaatcagacccctggagaccacccagcagatcagaaagagacactgcttcggcaccgaggtgcacaacctggacgccaaggtggacagcggcaagaccgtgaagctgaacagccccctggagaagatcaacagcttcagcccccagaagccccccggccactgcagcagatgctgctgcagcaccaagcagggcaacagccaggagagcagcaacaccatcaagaaggaccacaccggcaagagcaagatccccaagatctacttcggcaccagaacccacaagcagatcgcccagatcaccagagagctgagaagaaccgcctacagcggcgtgcccatgaccatcctgagcagcagagaccacacctgcgtgcaccccgaggtggtgggcaacttcaacagaaacgagaagtgcatggagctgctggacggcaagaacggcaagagctgctacttctaccacggcgtgcacaagatcagcgaccagcacaccctgcagaccttccagggcatgtgcaaggcctgggacatcgaggagctggtgagcctgggcaagaagctgaaggcctgcccctactacaccgccagagagctgatccaggacgccgacatcatcttctgcccctacaactacctgctggacgcccagatcagagagagcatggacctgaacctgaaggagcaggtggtgatcctggacgaggcccacaacatcgaggactgcgccagagagagcgccagctacagcgtgaccgaggtgcagctgagattcgccagagacgagctggacagcatggtgaacaacaacatcagaaagaaggaccacgagcccctgagagccgtgtgctgcagcctgatcaactggctggaggccaacgccgagtacctggtggagagagactacgagagcgcctgcaagatctggagcggcaacgagatgctgctgaccctgcacaagatgggcatcaccaccgccaccttccccatcctgcagggccacttcagcgccgtgctgcagaaggaggagaagatcagccccatctacggcaaggaggaggccagagaggtgcccgtgatcagcgccagcacccagatcatgctgaagggcctgttcatggtgctggactacctgttcagacagaacagcagattcgccgacgactacaagatcgccatccagcagacctacagctggaccaaccagatcgacatcagcgacaagaacggcctgctggtgctgcccaagaacaagaagagaagcagacagaagaccgccgtgcacgtgctgaacttctggtgcctgaaccccgccgtggccttcagcgacatcaacggcaaggtgcagaccatcgtgctgaccagcggcaccctgagccccatgaagagcttcagcagcgagctgggcgtgaccttcaccatccagctggaggccaaccacatcatcaagaacagccaggtgtgggtgggcaccatcggcagcggccccaagggcagaaacctgtgcgccaccttccagaacaccgagaccttcgagttccaggacgaggtgggcgccctgctgctgagcgtgtgccagaccgtgagccagggcatcctgtgcttcctgcccagctacaagctgctggagaagctgaaggagagatggctgagcaccggcctgtggcacaacctggagctggtgaagaccgtgatcgtggagccccagggcggcgagaagaccaacttcgacgagctgctgcaggtgtactacgacgccatcaagtacaagggcgagaaggacggcgccctgctggtggccgtgtgcagaggcaaggtgagcgagggcctggacttcagcgacgacaacgccagagccgtgatcaccatcggcatccccttccccaacgtgaaggacctgcaggtggagctgaagagacagtacaacgaccaccacagcaagctgagaggcctgctgcccggcagacagtggtacgagatccaggcctacagagccctgaaccaggccctgggcagatgcatcagacacagaaacgactggggcgccctgatcctggtggacgacagattcagaaacaaccccagcagatacatcagcggcctgagcaagtgggtgagacagcagatccagcaccacagcaccttcgagagcgccctggagagcctggccgagttcagcaagaagcaccagaaggtgctgaacgtgagcatcaaggacagaaccaacatccaggacaacgagagcaccctggaggtgaccagcctgaagtacagcaccagcccctacctgctggaggccgccagccacctgagccccgagaacttcgtggaggacgaggccaagatctgcgtgcaggagctgcagtgccccaagatcatcaccaagaacagccccctgcccagcagcatcatcagcagaaaggagaagaacgaccccgtgttcctggaggaggccggcaaggccgagaagatcgtgatcagcagaagcaccagccccaccttcaacaagcagaccaagagagtgagctggagcagcttcaacagcctgggccagtacttcaccggcaagatccccaaggccacccccgagctgggcagcagcgagaacagcgccagcagcccccccagattcaagaccgagaagatggagagcaagaccgtgctgcccttcaccgacaagtgcgagagcagcaacctgaccgtgaacaccagcttcggcagctgcccccagagcgagaccatcatcagcagcctgaagatcgacgccaccctgaccagaaagaaccacagcgagcaccccctgtgcagcgaggaggccctggaccccgacatcgagctgagcctggtgagcgaggaggacaagcagagcaccagcaacagagacttcgagaccgaggccgaggacgagagcatctacttcacccccgagctgtacgaccccgaggacaccgacgaggagaagaacgacctggccgagaccgacagaggcaacagactggccaacaacagcgactgcatcctggccaaggacctgttcgagatcagaaccatcaaggaggtggacagcgccagagaggtgaaggccgaggactgcatcgacaccaagctgaacggcatcctgcacatcgaggagagcaagatcgacgacatcgacggcaacgtgaagaccacctggatcaacgagctggagctgggcaagacccacgagatcgagatcaagaacttcaagcccagccccagcaagaacaagggcatgttccccggcttcaagtag

SEQ ID NO: 222767 - protein, 492 aa, Artificial Sequence
  derived and/or modified sequence
MAPPAARLALLSAAALTLAARPAPSPGLGPGPECFTANGADYRGTQNWTALQGGKPCLFWNETFQHPYNTLKYPNGEGGLGEHNYCRNPDGDVSPWCYVAEHEDGVYWKYCEIPACQMPGNLGCYKDHGNPPPLTGTSKTSNKLTIQTCISFCRSQRFKFAGMESGYACFCGNNPDYWKYGEAASTECNSVCFGDHTQPCGGDGRIILFDTLVGACGGNYSAMSSVVYSPDFPDTYATGRVCYWTIRVPGASHIHFSFPLFDIRDSADMVELLDGYTHRVLARFHGRSRPPLSFNVSLDFVILYFFSDRINQAQGFAVLYQAVKEELPQERPAVNQTVAEVITEQANLSVSAARSSKVLYVITTSPSHPPQTVPGSNSWAPPMGAGSHRVEGWTVYGLATLLILTVTAIVAKILLHVTFKSHRVPASGDLRDCHQPGTSGEIWSIFYKPSTSISIFKKKLKGQSQQDDRNPLAIQDSEVTSLIWSQGQPRSI

SEQ ID NO: 222768 - DNA, 1479 bp, Artificial Sequence
  derived and/or modified sequence
atggccccccccgccgccagactggccctgctgagcgccgccgccctgaccctggccgccagacccgcccccagccccggcctgggccccggccccgagtgcttcaccgccaacggcgccgactacagaggcacccagaactggaccgccctgcagggcggcaagccctgcctgttctggaacgagaccttccagcacccctacaacaccctgaagtaccccaacggcgagggcggcctgggcgagcacaactactgcagaaaccccgacggcgacgtgagcccctggtgctacgtggccgagcacgaggacggcgtgtactggaagtactgcgagatccccgcctgccagatgcccggcaacctgggctgctacaaggaccacggcaaccccccccccctgaccggcaccagcaagaccagcaacaagctgaccatccagacctgcatcagcttctgcagaagccagagattcaagttcgccggcatggagagcggctacgcctgcttctgcggcaacaaccccgactactggaagtacggcgaggccgccagcaccgagtgcaacagcgtgtgcttcggcgaccacacccagccctgcggcggcgacggcagaatcatcctgttcgacaccctggtgggcgcctgcggcggcaactacagcgccatgagcagcgtggtgtacagccccgacttccccgacacctacgccaccggcagagtgtgctactggaccatcagagtgcccggcgccagccacatccacttcagcttccccctgttcgacatcagagacagcgccgacatggtggagctgctggacggctacacccacagagtgctggccagattccacggcagaagcagaccccccctgagcttcaacgtgagcctggacttcgtgatcctgtacttcttcagcgacagaatcaaccaggcccagggcttcgccgtgctgtaccaggccgtgaaggaggagctgccccaggagagacccgccgtgaaccagaccgtggccgaggtgatcaccgagcaggccaacctgagcgtgagcgccgccagaagcagcaaggtgctgtacgtgatcaccaccagccccagccaccccccccagaccgtgcccggcagcaacagctgggccccccccatgggcgccggcagccacagagtggagggctggaccgtgtacggcctggccaccctgctgatcctgaccgtgaccgccatcgtggccaagatcctgctgcacgtgaccttcaagagccacagagtgcccgccagcggcgacctgagagactgccaccagcccggcaccagcggcgagatctggagcatcttctacaagcccagcaccagcatcagcatcttcaagaagaagctgaagggccagagccagcaggacgacagaaaccccctggccatccaggacagcgaggtgaccagcctgatctggagccagggccagcccagaagcatctag

SEQ ID NO: 222769 - DNA, 1479 bp, Artificial Sequence
  derived and/or modified sequence
atggctccccccgccgccagactcgcgctgctgtctgctgccgccctgactcttgccgcaaggcccgcaccgtcccctgggttgggccccggccccgaatgtttcacagccaatggcgctgactaccgagggacacagaattggaccgcactgcagggcggaaagccctgcctgttttggaatgagacctttcaacacccctataatactctcaaatacccaaacggagagggaggcctgggagagcacaactattgtcgtaaccccgatggcgatgtcagtccgtggtgttatgttgcagagcacgaagacggggtttattggaaatattgtgaaatccctgcctgccagatgcctgggaaccttgggtgctacaaggaccacggaaacccaccccccctcaccgggacctcaaagacttctaataaactgacaattcagacctgcattagcttttgccggtctcagcggtttaaattcgccggaatggagtctggctatgcctgcttttgcggcaacaacccagactattggaaatatggtgaagcggcttcaactgaatgcaatagcgtgtgttttggggaccatacacagccctgtggcggggatggacggatcattctattcgatacactggtaggcgcatgtggaggaaactattcggctatgtcgtcagttgtgtactcccccgattttcctgacacctatgccactggaagagtgtgctactggaccattcgagtcccaggagccagccatattcacttctctttccctctgttcgacatacgcgatagcgccgacatggtggagctcctggatgggtatacacacagagtgctggcccggttccatggacggagcagaccacccctttccttcaacgtgtctctagacttcgtaatcctctacttcttttccgataggataaatcaggcccagggtttcgctgttttataccaggcagtgaaagaagagcttccccaggaacgtcctgcagtgaaccaaactgtggcagaggtgatcacagagcaggccaatcttagcgtctctgccgcaagaagttctaaagttctgtacgtgataactacgtccccctctcaccctcctcagacagttcccggaagtaactcgtgggccccgcccatgggagctggctctcatcgggtcgagggctggacggtctacgggttggcaaccctgctcatcttaacggtgacggccatagtggccaagattctgcttcacgttacattcaagagccatagagttccagcttctggcgatctgagagactgccaccagcccggaacttctggtgagatctggagcatattctacaaaccatccaccagtatttccatcttcaagaagaaacttaagggccagtcacaacaagatgacaggaacccacttgccatccaggatagcgaagtgacgtccctgatttggagccagggacagccccgatccatctag

SEQ ID NO: 222770 - DNA, 2719 bp, Artificial Sequence
  derived and/or modified sequence
gcactgacggcccatggcgccgccagccgcccgcctcgccctgctctccgccgcggcgctcacgctggcggcccggcccgcgcctagccccggcctcggccccggacccgagtgtttcacagccaatggtgcggattataggggaacacagaactggacagcactacaaggcgggaagccatgtctgttttggaacgagactttccagcatccatacaacactctgaaataccccaacggggaggggggcctgggtgagcacaactattgcagaaatccagatggagacgtgagcccctggtgctatgtggcagagcacgaggatggtgtctactggaagtactgtgagatacctgcttgccagatgcctggaaaccttggctgctacaaggatcatggaaacccacctcctctaactggcaccagtaaaacgtccaacaaactcaccatacaaacttgcatcagtttttgtcggagtcagaggttcaagtttgctgggatggagtcaggctatgcttgcttctgtggaaacaatcctgattactggaagtacggggaggcagccagtaccgaatgcaacagcgtctgcttcggggatcacacccaaccctgtggtggcgatggcaggatcatcctctttgatactctcgtgggcgcctgcggtgggaactactcagccatgtcttctgtggtctattcccctgacttccccgacacctatgccacggggagggtctgctactggaccatccgggttccgggggcctcccacatccacttcagcttccccctatttgacatcagggactcggcggacatggtggagcttctggatggctacacccaccgtgtcctagcccgcttccacgggaggagccgcccacctctgtccttcaacgtctctctggacttcgtcatcttgtatttcttctctgatcgcatcaatcaggcccagggatttgctgttttataccaagccgtcaaggaagaactgccacaggagaggcccgctgtcaaccagacggtggccgaggtgatcacggagcaggccaacctcagtgtcagcgctgcccggtcctccaaagtcctctatgtcatcaccaccagccccagccacccacctcagactgtcccaggtagcaattcctgggcgccacccatgggggctggaagccacagagttgaaggatggacagtctatggtctggcaactctcctcatcctcacagtcacagccattgtagcaaagatacttctgcacgtcacattcaaatcccatcgtgttcctgcttcaggggaccttagggattgtcatcaaccagggacttcgggggaaatctggagcattttttacaagccttccacttcaatttccatctttaagaagaaactcaagggtcagagtcaacaagatgaccgcaatccccttgcaattcaggactcggaagtgacatcactcatctggtctcaggggcagcccagaagtatctgactgtagacacaactaggctccgtgggcatatctgggtggcaatttcagagggcagaggggacaccttcattgcctctcctcgcacagaaatggtgggctctctctggcccagcgtggtggttcatgcctgtaataccagcgttttgggaggctgagatgggaggattgcttgagcccaggaggtcgaggctgcagtgagctatgatcacaccaccacactccagcctgagcagcagagcgggacctcgtctctaagaatagaaagaaagaaagagaaacggtgtcctccgcacagccggtcagaactgtgtgactcacttgaggcaggaccgagagtgacatccagttgcacctttctcacctactttgggacctttgggggtgagttcccctttgtcctctcgtggaaacagcacacagcaagcaaccacaaaaccagagcggaaggagggacttcccaccggcatccggccccagtgccatgttttatcatctggaacggttgtgaagctttgtgtgacttgctcaggatcagcagtcaccatggtctaatcccaagagggactcgtcacccagagacctcaaaaggccccaggcctactgtggttttttctgagaggctcccagaaccaagtggcacgttggtttcctgtgcgtctgtgtctttgtgcctgtatctcgctgggggacttcacaggaagcaggatttgggcattcctgaagctcccagctggacaccactcctgagcgccacatcccatgatcacttcaaccacaggcctttgactttgccacatggcaaggcacccagcagaagatgaggatgacgggtgatgctagatggatgtgtacctggtggatggcccacgcacgaagactcaagaccctcaggactggccatataatctgcaaggtccagtatgaaataagaataagcagcccacacaactgggcatagtggttcatgcctgtaatcccagcactttgggaggctgaggagggtggatcacttgaggccaggaattcgagaccagcctggccaacatggcgaaaacccatctctactaaaaatacaaaaattagttgggcatggtggcacacacctgtaatcccagctactcggaggctgaggcacaagaattgcttgaacctgggaggcggaggttgcagtgagctgagataacgccactgcactccagtgtaggcaacagagtgagaccctgtctc

SEQ ID NO: 222771 - DNA, 1479 bp, Artificial Sequence
  derived and/or modified sequence
atggcccctcctgctgcccggctggccctgctgtctgctgctgccctgaccctggccgcccggcctgcccccagccctggcctgggccctggccctgagtgcttcaccgccaacggggctgactaccggggcacccagaactggacagccctgcagggcggcaagccctgcctcttctggaatgagaccttccagcacccctacaacaccctgaagtacccaaatggagagggcggcctgggggagcacaactactgcagaaatccagatggagatgtgagcccctggtgctacgtggccgagcatgaagatggagtgtactggaagtactgtgagatcccagcctgccagatgcctggcaacctgggctgctacaaggaccacggcaaccccccacccctgaccggcaccagcaagaccagcaacaagctgaccatccagacctgcatctccttctgccgcagccagcgcttcaagtttgctggcatggagagcggctacgcctgcttctgtggcaacaacccagactactggaagtacggggaggccgccagcacagagtgcaacagcgtgtgctttggagaccacacccagccctgtggaggagatggccgcatcatcctgtttgacaccctggtgggcgcctgtggcggcaactacagcgccatgagctctgtggtgtacagcccagacttcccagacacctacgccaccggccgggtgtgctactggaccatccgggtgcctggggccagccacatccacttctccttccccctgtttgacatccgggacagcgctgacatggtggagctgctggatggctacacccaccgggtgctggcccgcttccacggccgcagccggccccccctgtccttcaacgtgtccctggactttgtgatcctgtacttcttcagtgaccgcatcaaccaggcccagggctttgctgtgctgtaccaggccgtgaaggaggagctgccccaggagaggcctgctgtgaaccagacagtggccgaggtgatcacagagcaggccaacctgtctgtgtctgctgcccggagcagcaaggtgctgtatgtgatcaccaccagccccagccaccccccccagacagtgcccggcagcaacagctgggccccacccatgggcgccggcagccaccgggtggagggctggacagtgtatggcctggccaccctgctgatcctgactgtgacagccatcgtggccaagatcctgctgcacgtgaccttcaagagccaccgggtgcctgccagcggggacctgcgggactgccaccagcccggcaccagcggggagatctggagcatcttctacaagcccagcaccagcatcagcatcttcaagaagaagctgaagggccagagccagcaggatgacaggaaccccctggccatccaggacagcgaggtgaccagcctcatctggagccagggccagcccaggagcatctag

SEQ ID NO: 222772 - DNA, 1479 bp, Artificial Sequence
  derived and/or modified sequence
atggccccccccgccgcccggctggccctgctgagcgccgccgccttgacattagctgctcggcctgctcctagccccggtctgggccctggaccagaatgctttaccgcaaacggcgcggattaccggggtacccaaaattggactgctctgcagggcgggaagccctgcctgttttggaacgaaacatttcagcacccctataatacactaaagtacccgaacggtgaggggggactgggcgagcacaattactgtagaaatcccgatggcgacgttagcccatggtgctacgtcgccgaacatgaggatggagtctattggaaatattgcgaaattccagcttgccagatgcctggtaatctgggttgttataaagaccatggcaatccaccccccctgacaggaaccagcaaaaccagcaacaagctcacaattcaaacttgtatttccttttgtcgatcccagcggtttaagttcgccggtatggagagtggttacgcctgtttctgtgggaataaccccgactactggaaatacggtgaagcggcttccaccgagtgtaacagcgtgtgtttcggcgatcatacacagccttgcggcggggacgggcggattattctcttcgatacccttgttggcgcttgtggcggcaattacagcgcaatgtcaagcgtggtttatagccccgatttccctgatacctacgcgactgggcgtgtgtgctactggacgatccgggtaccaggggcatcccatatccactttagttttcctttgtttgacattcgagactctgcagacatggtggaattattggatggatacacccatagggtgctggcacgctttcacggtcggagccgccccccattgtcttttaatgtatccctggacttcgtgatcttatatttttttagcgatagaatcaaccaagcacagggcttcgccgtgctgtaccaggctgtcaaggaagagctgcctcaggagcgacctgccgtgaaccagacagtggccgaggtcataacagagcaggcaaatctaagcgtcagcgcagcaaggagtagcaaagtgttgtacgtgatcaccaccagtcccagtcacccacctcagacagtgccggggagtaattcttgggctccaccaatgggtgccgggtctcacagggtcgaaggctggaccgtctatggccttgcaactctactgatcctgactgtcaccgccattgtcgctaagatcctgctccatgtcactttcaagtcccatcgggtgcctgcaagcggcgacttgcgagactgtcaccagcccgggacgtctggcgaaatttggagtatattttacaagccaagtaccagtatctctattttcaaaaaaaaacttaagggccagtctcagcaggatgataggaaccccttggccatacaggattctgaggtgacttctctgatatggtcgcagggacaacctagatcgatctag

SEQ ID NO: 222773 - DNA, 1479 bp, Artificial Sequence
  derived and/or modified sequence
atggccccacctgctgcaaggctagctctgcttagcgccgctgcccttacccttgcagcgagacccgcacccagccctggcctcggcccagggcctgagtgtttcactgccaatggcgctgattatcgcggaacacagaactggacagcacttcagggcggaaagccatgtctcttctggaacgaaacttttcagcatccttataacacgctgaagtatccgaatggagaaggcggactgggcgagcacaattattgtcgcaaccccgatggcgatgtttccccctggtgttatgtggcagaacacgaggatggagtgtattggaaatactgcgagatcccagcatgccagatgcccggaaacctcggttgttacaaagaccatggcaaccccccacctctcacaggaacatcaaaaacctcaaataagctaacaatccaaacatgcatcagcttttgccggtcacaaaggttcaagttcgccggtatggaaagcggctacgcttgcttctgcggtaataaccccgattactggaaatacggagaggccgctagtaccgagtgcaacagtgtctgtttcggcgaccacacgcagccatgcggcggagatggtcgcatcatcctgttcgacacgcttgttggcgcatgcggcggaaattattccgcaatgtcctctgttgtctattctccagattttccagacacctatgccaccgggagggtctgctattggaccatccgcgtccccggagcctcacatattcatttctcttttcccctcttcgatattcgcgattctgccgatatggtggagctcttggatggatacacacaccgggtgcttgcgcgattccacgggcgaagtcgaccaccactttctttcaatgttagcctggacttcgtcattctatatttttttagcgaccgtatcaaccaagcccaggggttcgcagtactataccaagcagtgaaggaggagctgccacaagagcgcccagccgtcaaccagacagttgccgaggtcataactgagcaggctaacctaagcgtttccgccgctaggagcagtaaagtgctgtacgtgattaccacatcaccttcacacccaccgcaaaccgtgcccggtagtaattcttgggcccctccaatgggagcagggagccatagggtagagggctggaccgtctacggactggcgacactactgatcctgaccgtcaccgccattgtcgccaagatactgctgcatgtaacatttaagtcccaccgtgtgcctgcttcaggtgacctgcgggactgccaccaacctggaacctccggcgaaatctggagtatcttttacaagccctcaacgagtatttcaatctttaagaagaaacttaaagggcaatcgcagcaggacgatagaaatccgctcgccattcaggactctgaagtgacctcattaatatggtcccagggtcaacctagaagcatttag

SEQ ID NO: 222774 - protein, 1053 aa, Artificial Sequence
  derived and/or modified sequence
MWQPRRPWPRVPWRWALALLALVGAGLCHAGPQPGYPARPSARNKNWCAYIVNKNVSCSVLEGSESFIQAQYNCAWNQMPCPSALVYRVNFRPRYVTRYKTVTQLEWRCCPGFRGGDCQEGPKDPVKTLRPTPARPRNSLKKATDNEPSQFSEPRKTLSPTGTAQPSWGVDPKEGPQELQEKKIQVLEEKVLRLTRTVLDLQSSLAGVSENLKHATQDDASRTRAPGLSSQHPKPDTTVSGDTETGQSPGVFNTKESGMKDIKSELAEVKDTLKNKSDKLEELDGKVKGYEGQLRQLQEAAQGPTVTMTTNELYQAYVDSKIDALREELMEGMDRKLADLKNSCEYKLTGLQQQCDDYGSSYLGVIELIGEKETSLRKEINNLRARLQEPSAQANCCDSEKNGDIGQQIKTLDQKIERVAEATRMLNGRLDNEFDRLIVPEPDVDFDAKWNELDARINVTEKNAEEHCFYIEETLRGAINGEVGDLKQLVDQKIQSLEDRLGSVLLQMTNNTGAELSPPGAAALPGVSGSGDERVMMELNHLKDKVQVVEDICLLNIQGKPHGMEGALPNREDRAVRDSLHLLKSLNDTMHRKFQETEQTIQKLQQDFSFLYSQLNHTENDVTHLQKEMSNCRAGENAGMGRFTKVGEQERTVDTLPSPQHPVAHCCSQLEERWQRLQSQVISELDACKECTQGVQREVSMVEGRVSHMEKTCSKLDSISGNLQRIKEGLNKHVSSLWNCVRQMNGTLRSHSRDISGLKNSVQQFYSHVFQISTDLQDLVKFQPSAKAPSPPPPAEAPKEPLQPEPAPPRPSGPATAEDPGRRPVLPQRPPEERPPQPPGSTGVIAETGQAGPPAGAGVSGRGLPRGVDGQTGSGTVPGAEGFAGAPGYPKSPPVASPGAPVPSLVSFSAGLTQKPFPSDGGVVLFNKVLVNDGDVYNPSTGVFTAPYDGRYLITATLTPERDAYVEAVLSVSNASVAQLHTAGYRREFLEYHRPPGALHTCGGPGAFHLIVHLKAGDAVNVVVTGGKLAHTDFDEMYSTFSGVFLYPFLSHL

SEQ ID NO: 222775 - DNA, 3162 bp, Artificial Sequence
  derived and/or modified sequence
atgtggcagcccagacgaccatggccaagggtaccttggaggtgggccctcgccttgctggccttggtgggagccggactgtgccacgccggtccccagccgggatatcctgctcggccttccgctcgaaacaagaattggtgtgcgtatattgtgaacaagaatgtatcatgcagcgtactggagggctccgagtctttcattcaagcccaatataactgtgcatggaaccagatgccctgcccgagtgctctcgtgtatcgggttaatttccgccctcggtatgtcacacggtataagacagtgactcagctggagtggcgatgttgcccaggcttccggggtggcgactgccaagagggccctaaggatccggtcaagactctccggccaacacccgctaggccccgtaacagtttgaagaaagctactgataatgagccctctcagttctcagaaccacgcaagaccctgagccccaccgggacggctcagccctcctggggcgtggatccaaaggaagggcctcaggaacttcaggagaagaaaatacaagtcctggaggaaaaagtcttacggctgactaggacagtgctagacctgcagtccagcctggccggtgtgtcagaaaatttgaagcacgcaacccaggacgatgcgagcaggacacgggcaccgggactatcatcccagcatcctaagccggatacaactgttagtggagacaccgagaccggccaatcacctggcgtctttaacacaaaagaaagcggaatgaaggacattaaatcagagctggcagaagtgaaggataccctgaagaacaagtctgataagctggaggagctggatggtaaagttaagggatacgagggacagttaaggcagcttcaggaagccgctcaagggccaacagtgaccatgacaacgaacgagttatatcaagcgtacgtcgacagcaaaattgatgccctgcgggaagagctgatggaaggaatggatagaaagctcgctgacctgaaaaatagttgcgagtataagctgaccgggctgcaacaacagtgcgacgattatggatctagctacctgggagtgattgaactcattggcgagaaagagacctccctccgcaaggaaatcaacaatttgagggctcgtctgcaggagccctccgcacaggctaattgttgcgacagcgaaaaaaacggagatatcggacagcagatcaagaccctcgaccagaagattgaaagagtggcagaggctacgcgcatgctgaatgggaggctggacaatgaattcgatcgactgatcgtgcccgagccggacgtggacttcgacgctaagtggaatgagttggatgctaggataaacgttacggagaagaacgcagaggagcactgtttctatatcgaagaaaccttgcggggagcgatcaacggggaggtaggcgacctgaagcagctggtcgatcaaaagatccagagtctggaggacaggctcggatctgtcctgctccaaatgaccaacaacactggggctgagctgagtccgcctggagcggctgcactccctggagtgagtggttcaggagatgagcgcgtaatgatggagctgaatcacctgaaagacaaagtgcaagtagtggaggacatctgtctgttaaacattcagggtaagccacacgggatggaaggcgcacttcccaatcgggaggaccgagcagtcagagactccctacacctcctgaagtccttgaacgataccatgcacaggaaatttcaggaaaccgaacaaacaatacagaagctgcaacaagatttctccttcctttacagccaacttaaccacaccgaaaacgatgttacgcacctgcagaaggagatgagcaactgccgggctggagagaacgctggcatggggcgtttcaccaaagtcggagaacaagagcgcacagttgataccctgccctctccacagcatccggtggctcactgctgcagccagttggaagaacgttggcagaggctgcagagtcaggtgatttccgaactggatgcgtgtaaagagtgcacacagggggtgcagagggaggtcagtatggtagaggggcgagtcagccatatggagaagacttgtagcaagctggacagcatttctggcaacctgcaacgaatcaaggaggggctgaacaagcacgtcagctccctgtggaactgcgtgaggcagatgaacggaactttgagaagccactcacgcgacatatccggcctaaaaaattccgttcagcagttttattcccacgtgttccagatctctaccgacctgcaggatctggtaaaatttcagccatctgctaaagccccaagtcctcctccaccagccgaggccccaaaggaacccctccagcccgaaccggcaccacccaggcccagcggcccagccaccgccgaagaccctggtagacggccagtgctgcctcagcgaccgcctgaagagagacctccgcagccccctggctctactggcgtcatcgcagagacgggccaggcaggcccaccagccggtgccggagtcagcggcagaggacttccaaggggcgttgacggtcagactggctcgggcacagtcccaggtgctgagggatttgccggagctcctggatatcctaagtcccctcctgtggctagtccgggagcccctgtgcccagtctcgtgtcattcagtgccggtctgacccagaaaccttttccaagcgacggcggagtcgtgttgttcaataaggtcctcgttaatgatggagacgtgtataacccgtccacgggcgtcttcacggccccttatgacggcagatacctgattactgctactctcacacctgagcgggatgcttacgtcgaagccgtgttgtccgtaagtaacgcatcagtagctcagctccatactgccggatatcggagagagtttcttgaatatcacagaccacctggcgctctccatacttgtggaggaccaggtgcttttcacttgatcgttcacttaaaagcgggagacgctgtaaacgtggttgtgaccggaggtaagctggcgcacaccgatttcgatgagatgtatagcacttttagtggcgtgttcctctatccattcctgtcccatctctag

SEQ ID NO: 222776 - DNA, 993 bp, Artificial Sequence
  derived and/or modified sequence
cgaggagctctcgtgggagcacctagaagtgcacgggcaagctgcctgcgtggcaggaggcccggaagacggcagccctgcggcagatgccccgatccgcctagatctggccctggccaagccggtagggcaagatgcgccagagatgttgcagctcagacagctctggcaccacgtgccctggctctgggtgctggcgcagccggaccaggatggagaggggctgtgccccgacgacccgcagcgcgagtgtctagagccgcacaaagacaggagcaagaactggtgcgcctgcacagagagcaggaatgcgagcttcagcccgagcccgctccacccaggccctccgggccagcgaccgcagaggacccgggtaggcgccctgtgctgccacagagaccccctgaggaaagacctccgcagccacctgggagcacaggcgtgatcgccgaaacaggccaggccggaccacctgccggtgccggagtcagcggctaccctaagtcaccccctgttgcttcacccggagcacccgtcccatcccttgtgagcttttcagctggcctcacacaaaagccttttcctagtgacggcggagtggttttgttcaacaaagtgctagtgaacgacggggatgtgtacaatccctcgactggcgttttcactgcaccgtatgatgggagataccttatcacagccacactaacccccgagcgtgatgcatacgtggaggccgtgctttccgtcagcaacgctagtgtcgctcagctgcacaccgctggatacagacgggagtttctcgagtaccatcgcccaccaggagccctccatacgtgtggcggtcctggcgcattccatcttattgtccatctgaaggctggcgatgctgtgaatgtcgttgttactggagggaagctagcccataccgattttgatgagatgtactccactttctcaggcgtgtttctgtatccttttctgtctcatttgtag

SEQ ID NO: 222777 - DNA, 3162 bp, Artificial Sequence
  derived and/or modified sequence
atgtggcagccaagacggccctggccgagagtcccctggcgctgggcgctcgctcttcttgctcttgtaggcgcagggttgtgccatgcaggtcctcagccaggctaccccgcccggcctagcgcccgaaacaagaactggtgtgcctacatagtaaataagaatgtttcctgctctgtgcttgaaggcagcgaaagctttattcaagcacagtacaattgtgcttggaatcagatgccatgtccatcggccctggtctacagggtgaattttagacccaggtacgttaccagatacaagacagttacacagttggagtggcgttgctgccctggattccgaggtggagactgtcaagaaggcccaaaggacccagttaagactcttaggcctacaccagctagaccacgtaacagtctcaagaaagccactgataacgaacctagccagttttccgaaccgcggaaaaccctcagcccgaccggcactgcccagccttcctggggggtcgatcctaaggaaggacctcaagaactgcaggaaaaaaagattcaggtgttagaagagaaggttttacgtcttacacgaaccgtcctggacctgcagtcctcactggccggcgtctcggaaaatctgaagcacgcgacgcaagatgacgcaagtaggacgcgagcacccgggttgagctcccaacaccccaaaccagacacaactgttagcggggatacagagactggccaatcacccggcgtgtttaatacgaaggaaagcggtatgaaagacattaagtctgaactggccgaagtgaaagacactctgaaaaataagagtgacaaattagaggagttggacggaaaagtaaaggggtatgaaggccagctccgccagctgcaagaggccgctcagggcccaacagtaactatgacaaccaatgagctctaccaggcctacgtggactctaagattgatgcccttagagaggagctgatggagggcatggacagaaagctggccgacttaaaaaacagttgcgaatacaaactgaccggccttcagcagcaatgtgatgactatgggtcatcctacctgggcgtgattgaattgattggagaaaaggagactagcttaaggaaagagataaacaacttaagagcaagactgcaggagccatcagcacaggctaattgttgcgattccgagaaaaacggtgacattgggcagcaaattaagactctggatcagaagattgaacgggtagctgaagcaacccggatgttgaacggcagactggataacgagtttgacagactcatcgtcccagaacccgacgtagacttcgacgcgaaatggaatgaactagacgcacggatcaacgtgacagaaaagaacgccgaggaacactgcttttacatagaagagacattaagaggagctattaacggggaggttggggacctcaagcagctagtggaccagaaaatccagtctctcgaggaccgcctgggatccgttctcttacagatgaccaataacaccggggccgagctgtctccccccggggccgcagcgctcccgggcgtcagcggcagcggggacgaacgggtgatgatggagctgaatcatctgaaagacaaggtacaggtagtggaagatatatgtttactgaacattcaaggaaaaccacatggtatggagggagcccttccaaatcgagaggacagagcggtccgcgacagcctgcatctgctgaagtcattaaacgacactatgcaccggaagtttcaggaaacagagcagaccatccaaaaactccaacaggacttcagtttcctatactcgcagctcaatcatactgagaacgacgtcacccacttacagaaggagatgtccaattgtcgcgccggagagaatgccggcatgggaagatttactaaagttggcgagcaagaaagaaccgtggacactttaccgtcaccgcagcaccctgtggcccattgctgctcccagttagaggaaaggtggcaacgacttcaatctcaagtgattagcgagctggatgcgtgcaaggagtgtacccagggcgttcagcgggaggtcagcatggtggaagggcgggtctcacatatggaaaaaacctgttccaaacttgactctattagcggaaaccttcaacgaatcaaggaaggattgaataaacacgtctcgtctctgtggaattgcgtccggcagatgaatggaacactaaggagtcactctcgggacatctccggactaaaaaattccgtacagcagttttacagtcatgtatttcagatcagcacagacttacaagacttggtgaagttccaaccttctgctaaggccccatctccacctcctccggccgaagcccctaaggagccacttcagccagagccggcgcccccaagaccctcaggacctgctactgcagaggaccctggtaggcgccccgtgctccctcagcgcccgccagaagaaagaccccctcaacccccgggctctactggtgtaatcgctgagactggacaggcaggccctcccgccggtgcaggcgtatctggtcgcggcctgccacgaggcgttgacgggcagacaggcagcggcaccgtccccggagctgaggggttcgctggcgctcctggctacccaaagagtccacctgtggccagccctggagccccagtaccgtcattggtgtctttctccgcaggcctaactcagaagcccttccccagcgacgggggagtcgtcttatttaataaagtgttggttaacgatggcgatgtctataacccttccacgggggtgtttaccgccccttacgacggcagataccttataactgccaccctgacccccgaaagagacgcctatgtcgaggccgtgttgtctgtctcaaatgcctccgtggcccagttacataccgccggttaccgcagggaatttctcgagtatcaccgccctccgggagctctgcatacatgcggcggtccaggcgccttccatcttatcgtccatctgaaggcaggtgatgctgttaacgtggtggtgacaggagggaagctcgcccacactgattttgacgagatgtactccacattttccggggtattcctctacccctttctttcacatctatag

SEQ ID NO: 222778 - DNA, 993 bp, Artificial Sequence
  derived and/or modified sequence
cgcggggccttggtgggagctccccgttctgcacgggcaagctgtctcaggggaaggagacctggtcggaggcagccttgcgggaggtgcccggacccacctcgctctggtccaggccaggcagggcgagctcgctgtgcaagagacgtcgctgcccaaaccgccctcgctccacgggccctcgcccttggagccggagctgcagggccaggatggaggggtgccgtgccacgaaggccagcagcaagagtgagcagagcggctcagaggcaggagcaagaattggtgagattgcatcgcgagcaggaatgtgagctccagcccgaacctgcacctccgcgccccagtggccctgcaaccgctgaggacccagggcggagacctgttctgccacaaagaccccccgaggagagacctccacagcctccaggttcaactggggtgatcgcagaaaccggacaagcaggtcctcccgcgggggcaggtgtttccggataccctaaatcacccccagtagcgtctcctggtgctcccgttccctccctagtatcattcagcgccggcttgactcaaaaacccttccctagcgacggcggggttgtgctgtttaacaaggtgctggtaaatgatggcgacgtgtacaacccttctaccggcgtctttacggccccttatgacggtcgttacttgattactgcgactttaacccctgagagagatgcatatgttgaagccgttctgagtgtgtccaatgcaagcgtggctcagctccacacagctgggtacaggcgtgaatttctggagtatcaccggccccccggcgccctgcatacctgtgggggccccggcgctttccatctaatcgtacatcttaaagctggcgatgccgttaacgtggtcgtcactggcggaaagctcgcccatactgattttgacgaaatgtactctaccttcagcggcgttttcctgtatccattcctgtctcacctgtag

SEQ ID NO: 222779 - DNA, 3162 bp, Artificial Sequence
  derived and/or modified sequence
atgtggcagccccgcagaccttggccgcgcgttccatggcggtgggctctggccctcctcgcactggtcggcgccggactgtgtcatgccgggcctcagccaggctatcctgcgaggccttcagcacgaaacaaaaactggtgcgcctatatcgtgaacaaaaacgtgagctgtagcgtccttgaaggttcggagtcatttatccaagctcaatacaactgcgcctggaaccaaatgccctgtccctcagctcttgtatacagagtgaattttcgccccagatatgtgactaggtataagactgtgacccagctcgaatggagatgttgtcccggcttccgtggaggtgattgtcaggaaggaccaaaagatcctgtcaaaacgctccggccaacccccgcacgccctcgcaatagtctgaagaaagcaacagataatgaaccgagccagttctcagaaccaaggaagaccttgtctcccactggaacagctcagccgtcatggggagttgacccaaaggagggccctcaagaactgcaggaaaagaaaattcaagtgctcgaagaaaaggttttaaggctcacccgcacagttctggacctacagtcctcccttgccggggtcagtgaaaacctcaaacacgccacccaggatgatgccagtcgcactcgtgcgcctggtctcagctctcaacatcccaaaccagacacaactgtgagtggcgacacagagacaggacaaagccccggagtgtttaatactaaggaatcgggaatgaaggacattaaaagcgaactggccgaagtgaaggataccctgaagaataagagcgacaagcttgaagaattagacggaaaggtcaagggctacgagggacagttaagacagctacaagaagccgctcagggaccgactgtgaccatgaccactaacgaactatatcaggcatatgtggactctaaaattgacgcactccgggaagaacttatggaaggaatggatagaaagctggccgatcttaagaactcttgcgagtataagttaacaggtctgcaacaacaatgcgatgactacggatccagctatctgggcgttattgaactaatcggggagaaagaaaccagcctgcgaaaagaaattaataacctgcgcgcccgactgcaagagccaagcgcccaggccaattgttgcgacagtgaaaagaacggcgatattggccagcagataaagactctagaccaaaagatagagagggttgcagaagccaccagaatgctcaatggaaggttagacaacgaatttgaccgcctaatagtacccgagcctgacgtggacttcgatgcaaagtggaatgagcttgatgctcgcattaacgtgaccgaaaaaaacgcagaggagcactgcttttatatagaggagacactcagaggtgcaatcaatggagaggtgggggacctgaaacagcttgttgatcagaaaatccagtccctggaggatagactcggctcagttcttctgcagatgacaaacaatacaggcgcagagttgtcccctcccggtgccgcagcgctgccgggggtaagtggctccggagatgaacgcgtaatgatggagcttaatcacttaaaagataaggtgcaggtggttgaagatatctgcctacttaatatccagggcaaaccgcacggaatggaaggagcactgccaaacagagaggaccgtgcggtgcgggactccttacacctgctgaaaagccttaatgatacgatgcacagaaagttccaggaaacagaacagactatccagaaattgcagcaagatttctcattcctctatagtcagttgaaccacaccgaaaatgacgttacccacctccagaaggaaatgtcaaactgtagggcaggcgaaaacgccggaatgggccggtttaccaaggtcggagagcaggagcgcacagttgatactctcccttcccctcagcatcctgtggcccactgttgctctcaactagaagagcgttggcagaggcttcagtcccaggtaatcagtgagctcgacgcatgcaaggagtgcacacagggagtacagcgggaggtctccatggtggaagggcgagtctcgcacatggaaaaaacctgctctaagttagatagcatctctggtaatcttcagcgcataaaggaaggactaaataagcacgtgtccagcttgtggaattgcgtgcggcagatgaacggcaccttgcgaagccactctcgagatatttcagggcttaagaatagcgttcagcagttttactctcacgtcttccaaatctcaaccgacctccaagacctcgttaaatttcaacccagtgccaaagctccctcccccccaccccctgcagaagctcccaaagaacccctgcagcctgaacccgcacctcccagacctagtggacctgctacagcagaagatcccgggcgaagacccgtacttccccagcgccctccggaagagaggccccctcagccacccgggtccacaggagttatagcagagaccggccaagctggacccccagccggagctggtgtttccgggcggggcttgccgagaggagtggacggtcaaacaggatccggcacagtgcctggagccgaaggatttgctggggcgcctggctatccaaagagtcccccagtcgccagcccaggcgccccagtcccatctttagtgtctttttccgcgggccttacacagaagccctttccaagcgatgggggtgtggtgctgtttaataaggttctagtcaacgacggcgatgtgtataacccttcaaccggtgtctttaccgccccttacgacggtcggtatctgatcaccgcaactctgacccctgaacgcgacgcctacgtagaagctgtcttgagcgtgagcaatgcctccgtggctcaactgcacaccgccggataccggagggagtttcttgaataccaccgaccaccaggagctctgcacacttgcggaggaccgggggcatttcaccttattgttcatctgaaagctggcgatgctgtaaacgttgtggtcactgggggaaaactggcacataccgatttcgatgaaatgtactcaactttcagtggagtcttcttgtatccctttcttagccatttgtag

SEQ ID NO: 222780 - DNA, 993 bp, Artificial Sequence
  derived and/or modified sequence
cgcggcgctctggtgggggccccacgtagcgctcgtgccagttgcctaagaggccggagaccagggcggaggcagccatgcgggaggtgccccgatcctccacggtccggtccagggcaagcagggagagcaagatgcgcccgggacgtggcagcacagaccgccttagcgcctcgggctctggcccttggggccggcgccgcgggcccaggttggcgcggggccgtacccagacgcccagctgcaagggtaagtagagccgctcagcgtcaggaacaagagttagtcagattgcaccgggagcaggagtgtgagctgcaacccgaacctgcccccccaagaccgagcggacctgccacagctgaggatccaggacggagaccagtgctaccccagcgtccccctgaagagcgacccccacagcctcccggctcgaccggggttatcgccgaaaccggacaggcaggacccccagccggggcaggagtgtctggatacccgaagtctccccccgtggcgtccccaggagcgcctgttccctctctggtgagtttctcagccggcctcacgcaaaagcccttcccctcagacggaggtgtcgtgctgtttaacaaggtgctggtaaatgatggcgacgtgtacaacccttctaccggcgtctttacggccccttatgacggtcgttacttgattactgcgactttaacccctgagagagatgcatatgttgaagccgttctgagtgtgtccaatgcaagcgtggctcagctccacacagctgggtacaggcgtgaatttctggagtatcaccggccccccggcgccctgcatacctgtgggggccccggcgctttccatctaatcgtacatcttaaagctggcgatgccgttaacgtggtcgtcaccggcggtaaactagctcatacagatttcgacgaaatgtatagcaccttctcaggcgtcttcctttatcctttcttgtcccacctgtag

SEQ ID NO: 222781 - DNA, 3994 bp, Artificial Sequence
  derived and/or modified sequence
ccggagggggcggccgcggagcactggttggagcgccgcgaagcgcccgagcctcttgccttcgcgggcggcgccctggccgccggcagccttgtggccggtgccccgatccgccgcgctccggacccgggcaggcggggcgcgcccgctgcgcgcgggatgtggcagcccagacggccctggccccgcgtgccctggcgctgggcgctggcgctgctggccctggttggcgcggggctgtgccacgccggcccgcagcccgggtatcccgcgcggcccagcgccaggaacaagaactggtgcgcctacatcgtgaacaagaatgtgagctgctccgtgctggagggaagtgagagttttattcaggctcagtacaactgtgcctggaaccagatgccctgtccgtcggcgctggtgtatcgagtgaacttcagacctagatatgtcactaggtataagacagtgacacagttggaatggaggtgctgtcctggctttagagggggagattgccaagaaggtcccaaagaccccgtgaagaccctccgccccacgccggctcggcctcgaaacagcttgaagaaagccacagataatgaacccagccaattctcagagcccaggaagactttgtccccaactggtacagcacaaccaagctggggggtagatccaaaagaggggcctcaggaacttcaggaaaagaagatacaggtgctagaggagaaggttcttcgactcacaaggacggttcttgacctccagtcttcccttgctggagtgagtgaaaatctcaaacatgccactcaggatgatgccagtagaacacgggcaccagggctcagcagccagcaccccaagcctgacaccactgttagtggagacacagaaacgggccagagtcctggtgtcttcaacactaaggaatctggcatgaaggacatcaagtctgaattggctgaagtcaaagatactctaaagaacaaaagtgacaagctggaagagctggatggaaaagtgaagggctacgaagggcagctcagacagctccaggaagcagctcagggcccgacggtgaccatgacaaccaacgaactctaccaagcctatgtggacagtaagatcgacgccctgagagaggagctcatggagggcatggacagaaagctggctgacctgaaaaactcatgtgagtacaagctcactggcctccagcagcagtgtgatgactatgggagcagctacctgggagtgatagagctcataggggagaaggaaacaagcctgagaaaagaaataaataacctccgagcccggctacaggagccttcagcccaggcaaattgctgcgacagtgaaaagaatggtgacattggtcaacagatcaagacattggaccagaaaatcgagagagttgctgaagccaccagaatgctgaatggaagactggacaatgagtttgaccgccttatagttccagagccagatgtggattttgatgcaaaatggaatgaactcgatgcaaggatcaatgtgacggagaagaacgctgaagaacattgcttttacattgaggaaacccttcggggcgccattaatggagaggtgggtgacttgaagcagcttgttgatcagaaaatacagtctctggaagaccgtctggggagcgttctcctacagatgaccaataacactggtgcagagctcagtcccccaggggcagcagccctgccaggagtgtcagggtcaggagatgaacgggtcatgatggaattaaaccacctgaaggacaaagttcaagttgttgaagacatttgcctgctgaacatccagggaaagcctcatgggatggaaggtgccttgccaaacagggaagaccgcgcagtacgcgacagcctgcaccttttgaaatctctcaacgacacgatgcacaggaagtttcaagaaaccgaacaaaccatccagaaacttcaacaggattttagttttctttattctcaattaaaccacacagaaaatgatgtgactcatcttcaaaaggaaatgagcaattgtagagcaggtgaaaacgctggcatgggtaggttcactaaggtgggtgagcaagaaaggacagtggacaccctgccgtccccccagcaccccgtggctcattgctgcagtcagctggaggagaggtggcagaggttgcagagccaggtcatctcggagctggatgcttgtaaggaatgcacgcagggggtccagagggaggtctccatggtggagggcagggtgtctcatatggagaaaacttgcagcaagctggactctatctcaggaaatcttcagaggatcaaggaggggctcaacaagcatgtcagcagcctgtggaactgtgtcaggcagatgaacggaacgctcaggtcgcattccagagacatttctggcctgaagaattcagtccagcagttctacagccacgtcttccagatttctactgatttgcaagatctggtcaaatttcagccatcagcaaaggcgccctcgcccccgccgcccgcagaggccccgaaggagccgctgcagcccgagcccgccccgccgaggcccagcggccccgcaaccgcagaggaccctgggcgacggcccgtcctgccccagcggccccccgaggagaggccgccccagccgccaggctccaccggggtcatcgcggagacgggccaggccgggccccccgcaggcgcaggcgtgtctgggcggggtctgccgcggggcgtggacggccagaccgggagcggcaccgtccccggcgcagaaggcttcgcgggcgcaccaggatacccgaagtcacctcctgtagcttccccaggagctccggtgccttctctggtgtctttttctgcggggctcacccagaagcctttccccagtgatgggggcgttgtcctctttaacaaagtgctggtgaacgacggggatgtttacaaccccagcaccggggtcttcacggctccttatgatgggcgctacctgatcacggccaccctcacccccgagagagacgcctacgtggaagcagtgctgtcggtctccaacgccagcgtggcccagctgcataccgctgggtacaggagagagttcctggaataccaccgccctccaggagctttgcatacctgcgggggcccgggggcattccacctcatcgtgcacctgaaggcgggagatgcagtcaacgtcgtggtgactgggggcaagctggctcacacagactttgatgaaatgtactccacatttagtggggttttcttatatcctttcctttcccacctctaaggtggctggggagatgtcaggggaaagatagatagttgtaaaaactctaaagctttaatatattcggtttgtatgtaatggaagcacggggctagagtttccacataggccccaacataaaggccttccctcgctgttgaggccaccatgccttactgcatccagccaggctgcagggagtgaggcacacggtgaacatggccactgacttttctgccactctaactggacaactggaagacttggaaaggcctccacctgtatctacactctgagggccctggactgggcctgagcttgccacagaggctccgtctgactgtgggctgggaggagggaggcaggggagagccggtcacggtggctggtctttactgcagggcagcactgtggccagctgtctgtctttacactgcatgcagaagtttaaacactgaagtgccgaagtggcccgtgccgccgcacagagaccccgactttagtttgggctgttccacgcttggctcaccattgccgcctgggacttaacctgctcaggcgggccttcgcccagctgcaaatagggatgcgttagagactgttcccaaagcttgttgggctccttaaatggcatgtacaatttaagtgcaaagacagggagtgtcaataaagatggaaagccatttccagttaa

SEQ ID NO: 222782 - DNA, 3162 bp, Artificial Sequence
  derived and/or modified sequence
atgtggcagcccagaagaccctggcccagagtgccctggagatgggccctggccctgctggccctggtgggcgccggcctgtgccacgccggcccccagcccggctaccccgccagacccagcgccagaaacaagaactggtgcgcctacatcgtgaacaagaacgtgagctgcagcgtgctggagggcagcgagagcttcatccaggcccagtacaactgcgcctggaaccagatgccctgccccagcgccctggtgtacagagtgaacttcagacccagatacgtgaccagatacaagaccgtgacccagctggagtggagatgctgccccggcttcagaggcggcgactgccaggagggccccaaggaccccgtgaagaccctgagacccacccccgccagacccagaaacagcctgaagaaggccaccgacaacgagcccagccagttcagcgagcccagaaagaccctgagccccaccggcaccgcccagcccagctggggcgtggaccccaaggagggcccccaggagctgcaggagaagaagatccaggtgctggaggagaaggtgctgagactgaccagaaccgtgctggacctgcagagcagcctggccggcgtgagcgagaacctgaagcacgccacccaggacgacgccagcagaaccagagcccccggcctgagcagccagcaccccaagcccgacaccaccgtgagcggcgacaccgagaccggccagagccccggcgtgttcaacaccaaggagagcggcatgaaggacatcaagagcgagctggccgaggtgaaggacaccctgaagaacaagagcgacaagctggaggagctggacggcaaggtgaagggctacgagggccagctgagacagctgcaggaggccgcccagggccccaccgtgaccatgaccaccaacgagctgtaccaggcctacgtggacagcaagatcgacgccctgagagaggagctgatggagggcatggacagaaagctggccgacctgaagaacagctgcgagtacaagctgaccggcctgcagcagcagtgcgacgactacggcagcagctacctgggcgtgatcgagctgatcggcgagaaggagaccagcctgagaaaggagatcaacaacctgagagccagactgcaggagcccagcgcccaggccaactgctgcgacagcgagaagaacggcgacatcggccagcagatcaagaccctggaccagaagatcgagagagtggccgaggccaccagaatgctgaacggcagactggacaacgagttcgacagactgatcgtgcccgagcccgacgtggacttcgacgccaagtggaacgagctggacgccagaatcaacgtgaccgagaagaacgccgaggagcactgcttctacatcgaggagaccctgagaggcgccatcaacggcgaggtgggcgacctgaagcagctggtggaccagaagatccagagcctggaggacagactgggcagcgtgctgctgcagatgaccaacaacaccggcgccgagctgagcccccccggcgccgccgccctgcccggcgtgagcggcagcggcgacgagagagtgatgatggagctgaaccacctgaaggacaaggtgcaggtggtggaggacatctgcctgctgaacatccagggcaagccccacggcatggagggcgccctgcccaacagagaggacagagccgtgagagacagcctgcacctgctgaagagcctgaacgacaccatgcacagaaagttccaggagaccgagcagaccatccagaagctgcagcaggacttcagcttcctgtacagccagctgaaccacaccgagaacgacgtgacccacctgcagaaggagatgagcaactgcagagccggcgagaacgccggcatgggcagattcaccaaggtgggcgagcaggagagaaccgtggacaccctgcccagcccccagcaccccgtggcccactgctgcagccagctggaggagagatggcagagactgcagagccaggtgatcagcgagctggacgcctgcaaggagtgcacccagggcgtgcagagagaggtgagcatggtggagggcagagtgagccacatggagaagacctgcagcaagctggacagcatcagcggcaacctgcagagaatcaaggagggcctgaacaagcacgtgagcagcctgtggaactgcgtgagacagatgaacggcaccctgagaagccacagcagagacatcagcggcctgaagaacagcgtgcagcagttctacagccacgtgttccagatcagcaccgacctgcaggacctggtgaagttccagcccagcgccaaggcccccagcccccccccccccgccgaggcccccaaggagcccctgcagcccgagcccgccccccccagacccagcggccccgccaccgccgaggaccccggcagaagacccgtgctgccccagagaccccccgaggagagacccccccagccccccggcagcaccggcgtgatcgccgagaccggccaggccggcccccccgccggcgccggcgtgagcggcagaggcctgcccagaggcgtggacggccagaccggcagcggcaccgtgcccggcgccgagggcttcgccggcgcccccggctaccccaagagcccccccgtggccagccccggcgcccccgtgcccagcctggtgagcttcagcgccggcctgacccagaagcccttccccagcgacggcggcgtggtgctgttcaacaaggtgctggtgaacgacggcgacgtgtacaaccccagcaccggcgtgttcaccgccccctacgacggcagatacctgatcaccgccaccctgacccccgagagagacgcctacgtggaggccgtgctgagcgtgagcaacgccagcgtggcccagctgcacaccgccggctacagaagagagttcctggagtaccacagaccccccggcgccctgcacacctgcggcggccccggcgccttccacctgatcgtgcacctgaaggccggcgacgccgtgaacgtggtggtgaccggcggcaagctggcccacaccgacttcgacgagatgtacagcaccttcagcggcgtgttcctgtaccccttcctgagccacctgtag

SEQ ID NO: 222783 - DNA, 993 bp, Artificial Sequence
  derived and/or modified sequence
agaggcgccctggtgggcgcccccagaagcgccagagccagctgcctgagaggcagaagacccggcagaagacagccctgcggcagatgccccgacccccccagaagcggccccggccaggccggcagagccagatgcgccagagacgtggccgcccagaccgccctggcccccagagccctggccctgggcgccggcgccgccggccccggctggagaggcgccgtgcccagaagacccgccgccagagtgagcagagccgcccagagacaggagcaggagctggtgagactgcacagagagcaggagtgcgagctgcagcccgagcccgccccccccagacccagcggccccgccaccgccgaggaccccggcagaagacccgtgctgccccagagaccccccgaggagagacccccccagccccccggcagcaccggcgtgatcgccgagaccggccaggccggcccccccgccggcgccggcgtgagcggctaccccaagagcccccccgtggccagccccggcgcccccgtgcccagcctggtgagcttcagcgccggcctgacccagaagcccttccccagcgacggcggcgtggtgctgttcaacaaggtgctggtgaacgacggcgacgtgtacaaccccagcaccggcgtgttcaccgccccctacgacggcagatacctgatcaccgccaccctgacccccgagagagacgcctacgtggaggccgtgctgagcgtgagcaacgccagcgtggcccagctgcacaccgccggctacagaagagagttcctggagtaccacagaccccccggcgccctgcacacctgcggcggccccggcgccttccacctgatcgtgcacctgaaggccggcgacgccgtgaacgtggtggtgaccggcggcaagctggcccacaccgacttcgacgagatgtacagcaccttcagcggcgtgttcctgtaccccttcctgagccacctgtag

SEQ ID NO: 222784 - DNA, 1695 bp, Artificial Sequence
  derived and/or modified sequence
ccggagggggcggccgcggagcactggttggagcgccgcgaagcgcccgagcctcttgccttcgcgggcggcgccctggccgccggcagccttgtggccggtgccccgatccgccgcgctccggacccgggcaggcggggcgcgcccgctgcgcgcgggatgtggcagcccagacggccctggccccgcgtgccctggcgctgggcgctggcgctgctggccctggttggcgcggggctgtgccacgccggcccgcagcccgggtatcccgcgcggcccagcgccaggaacaagaactggtgcgcctacatcgtgaacaagaatgtgagctgcagcccgagcccgccccgccgaggcccagcggccccgcaaccgcagaggaccctgggcgacggcccgtcctgccccagcggccccccgaggagaggccgccccagccgccaggctccaccggggtcatcgcggagacgggccaggccgggccccccgcaggcgcaggcgtgtctggatacccgaagtcacctcctgtagcttccccaggagctccggtgccttctctggtgtctttttctgcggggctcacccagaagcctttccccagtgatgggggcgttgtcctctttaacaaagtgctggtgaacgacggggatgtttacaaccccagcaccggggtcttcacggctccttatgatgggcgctacctgatcacggccaccctcacccccgagagagacgcctacgtggaagcagtgctgtcggtctccaacgccagcgtggcccagctgcataccgctgggtacaggagagagttcctggaataccaccgccctccaggagctttgcatacctgcgggggcccgggggcattccacctcatcgtgcacctgaaggcgggagatgcagtcaacgtcgtggtgactgggggcaagctggctcacacagactttgatgaaatgtactccacatttagtggggttttcttatatcctttcctttcccacctctaaggtggctggggagatgtcaggggaaagatagatagttgtaaaaactctaaagctttaatatattcggtttgtatgtaatggaagcacggggctagagtttccacataggccccaacataaaggccttccctcgctgttgaggccaccatgccttactgcatccagccaggctgcagggagtgaggcacacggtgaacatggccactgacttttctgccactctaactggacaactggaagacttggaaaggcctccacctgtatctacactctgagggccctggactgggcctgagcttgccacagaggctccgtctgactgtgggctgggaggagggaggcaggggagagccggtcacggtggctggtctttactgcagggcagcactgtggccagctgtctgtctttacactgcatgcagaagtttaaacactgaagtgccgaagtggcccgtgccgccgcacagagaccccgactttagtttgggctgttccacgcttggctcaccattgccgcctgggacttaacctgctcaggcgggccttcgcccagctgcaaatagggatgcgttagagactgttcccaaagcttgttgggctccttaaatggcatgtacaatttaagtgcaaagacagggagtgtcaataaagatggaaagccatttccagttaacttttgttaatttaa

SEQ ID NO: 222785 - DNA, 3162 bp, Artificial Sequence
  derived and/or modified sequence
atgtggcaacctcggcgcccctggccaagagttccctggcgttgggccctcgccctgctcgccctcgtgggagccgggctttgtcacgcaggcccacagcctggctaccccgcgcggccctccgctcgcaacaagaattggtgcgcctacatagttaacaaaaacgtctcttgctctgtgctcgaaggatccgaaagttttattcaggcccagtataattgcgcctggaaccagatgccatgtccatcagctttggtttaccgggttaacttcaggccacgctacgtgacaaggtataagaccgttacacagctggagtggagatgctgccccggcttcagaggtggcgattgtcaggagggcccaaaggaccctgtcaagacactgcggcccacaccagctcggccacgcaattcactgaagaaggccactgacaacgagccatcacagttttccgagccacggaaaactttgtcccctactggaactgcccagcccagctggggggtggatccaaaggagggtcctcaagagctgcaggagaaaaaaatccaggtcttggaggaaaaggtgctacgtcttactagaactgtactcgatctgcagagctcacttgcaggtgtatctgaaaacctaaaacacgcaacacaagatgatgcttccagaaccagggccccagggctgagctcacagcacccaaaacctgacacaacagtcagtggagacacggaaacaggccaatcccccggagtgttcaatacaaaggaaagcggaatgaaagatataaaatcggaactcgccgaggtcaaagacaccctgaaaaataagagcgacaagctggaagagcttgacggcaaggttaaaggctacgaaggccagctccggcagctgcaagaagcggcgcagggccctactgtgacaatgacaaccaacgagctgtaccaggcttacgttgattctaaaattgatgcccttcgtgaggaactgatggagggcatggatagaaagctggccgacctgaaaaacagctgcgagtataaactcactggactccaacagcagtgcgacgattatggctcatcgtaccttggcgttatcgagcttattggggagaaggagacttccctacgcaaggaaatcaacaatctgagggctcgcctgcaggagccgtccgcacaggcaaactgttgtgacagcgaaaagaatggcgatattggccagcaaattaaaaccctggaccagaagattgagagggtagcagaggcaacacggatgttaaatggccgtctggacaacgaattcgatcgtttgattgtgccagagccagacgtggacttcgacgccaagtggaatgaattagatgcccggatcaatgtaacagagaagaacgccgaagaacattgcttctacatagaggagaccttgcgcggcgccattaacggcgaagtgggcgatctcaagcagctggtcgaccagaaaatccagtccctcgaggacagattgggatcggtcttgctccaaatgaccaacaacactggggctgagttatcacccccaggggctgccgccctccctggagtgagtggctccggggacgagagagttatgatggagctgaaccacttgaaagataaagttcaggttgtcgaagatatctgtctattgaacatccagggcaaacctcacgggatggagggtgcactgcccaaccgggaagacagagctgttcgggattctttacacctgcttaagagtctgaacgacaccatgcaccgcaagttccaagagacagagcagacgattcagaaactgcagcaggacttttcctttctgtactcccaattgaatcacactgagaatgacgttactcacctgcagaaggagatgtccaattgtcgcgccggagagaacgctgggatgggtcgctttactaaagtaggggagcaggagaggacggtagacaccctcccatcgccacaacatcccgtggcccactgctgttcacagctggaagagcgctggcaacgactgcaatcacaggtcatctccgagcttgatgcctgcaaggagtgtacccagggcgtgcaaagggaggtgtctatggtggaaggccgagtctcacacatggaaaagacatgctctaagctagactctatcagtgggaacctacagcgtatcaaagaagggctcaataagcatgtctcttcactctggaactgcgtacggcaaatgaatgggactttgcggagccactctcgggatatttccgggctgaagaatagcgtgcagcagttttattctcatgtgttccaaattagcacagacctgcaggacctagtgaaattccagccaagcgcaaaggctccctctcctccgcctcccgccgaggctccaaaggagcctctccaacccgagcctgctccccctaggcccagtggaccggccacagcagaggatcccggcaggaggcccgtcctgccacagcggccacccgaagaacgacccccccaaccccctggaagcactggcgtaattgctgagaccgggcaggctggcccacctgccggcgccggtgtaagcggaagaggtctcccgcggggggtagatggtcagaccggatcaggaacagtgcccggcgccgaagggttcgctggggccccaggataccccaaaagtccccccgtggcgagccctggtgctccagtcccatcactcgtatctttctcagccggcctgacccagaaaccctttccaagcgatggcggcgttgtcctgtttaacaaggtcttagttaatgacggggacgtctataacccatccaccggagtatttaccgctccatacgatgggcgatatttgatcactgccactctgacccctgaaagagatgcatatgtggaagccgttctgtctgtatcaaacgcaagtgtggcgcagctacacactgcgggatatcggagggaattcctggagtatcacagaccaccgggcgccctccatacatgtggaggacccggagccttccaccttattgtccacctgaaagcgggtgatgctgtcaacgtggtcgttaccggcggaaaacttgcccacaccgacttcgacgaaatgtattccactttctccggggtattcctttaccctttccttagtcatctgtag

SEQ ID NO: 222786 - DNA, 993 bp, Artificial Sequence
  derived and/or modified sequence
agaggcgcactagtgggagcacctaggtccgctagggcctcttgcctgcgcggcagacgtccaggccgtcgccagccgtgcggccgttgtcccgaccccccaaggtccggccccggccaggctgggcgagccagatgtgcgagagacgttgccgcgcagaccgccctcgccccaagggctcttgccctcggagccggtgccgctggaccaggctggcggggggccgtccccaggcgaccggcagcccgcgtgtccagagcagcccagcggcaggaacaggaacttgtgaggttacaccgtgaacaagagtgcgagctccaaccagagcctgccccaccccgacccagcggtccagccacagccgaggaccctggtcggcgccccgtactgcctcaacgacccccagaggagcgacctcctcagcccccgggctccacaggagtgatcgccgaaacgggacaggcggggcctccggccggagctggcgtgtcggggtaccccaagtccccgcctgtagccagccccggggcacccgtgccctccttagtttctttttccgctggtctcactcagaagccatttccttcagacggcggcgtggtactatttaataaggtgttggtcaatgacggcgatgtgtacaatcccagtacaggcgtgtttacggccccatatgacggaaggtatctaatcaccgctacgctaactccagagagagacgcttatgtcgaagcagtgctgtcagtcagcaatgccagcgtggcccagctgcacaccgcgggttatcgccgcgagtttctggaataccatcgacctccaggagccctccatacctgtggaggccccggcgctttccacctgatcgtccatctgaaagctggcgacgcagtgaacgtggtggtgacgggcggcaagctggcccataccgacttcgacgaaatgtattctactttttctggggtatttctctatccgtttttgagccatctctag

SEQ ID NO: 222787 - DNA, 3162 bp, Artificial Sequence
  derived and/or modified sequence
atgtggcagccccggcggccctggccccgggtgccctggcgctgggccctggccctgctggccctggtgggcgccggcctgtgccacgccggcccccagcccggctacccagcccggcccagcgccaggaacaagaactggtgtgcctacatcgtgaacaagaatgtgtcctgcagcgtgctggagggcagcgagagcttcatccaggcccagtacaactgtgcctggaaccagatgccctgccccagcgccctggtgtacagagtgaacttccggcccaggtatgtgacccgctacaagacagtgacccagctggagtggcgctgctgccccggcttccggggcggggactgccaggagggccccaaggaccctgtgaagaccctgcggcccaccccagcccggcccaggaacagcctgaagaaggccacagacaatgagcccagccagttcagcgagcccaggaagaccctgagccccactggaacagcccagcccagctggggcgtggaccccaaggagggcccccaggagctgcaggagaagaagatccaggtgctggaggagaaggtgctgcggctgaccaggacagtgctggacctgcagagcagcctggccggcgtgtctgagaacctgaagcacgccacccaggatgatgccagcaggacccgggcccctggcctgagcagccagcaccccaagccagacaccaccgtgtctggggacacagaaacaggccagagccctggggtcttcaacaccaaggagagcggcatgaaggacatcaagtctgagctggccgaggtgaaggacaccctgaagaacaagagtgacaagctggaggagctggatggcaaggtgaagggctatgagggccagctgcggcagctgcaggaggccgcccagggccccaccgtgaccatgaccaccaatgagctgtaccaggcctacgtggacagcaagattgatgccctgcgggaggagctgatggagggcatggacaggaagctggccgacctgaagaacagctgtgagtacaagctgaccggcctgcagcagcagtgtgatgattatggcagcagctacctgggcgtcatcgagctgattggagagaaggagaccagcctgaggaaggagatcaacaacctgcgggcccggctgcaggagcccagcgcccaggccaactgctgtgacagcgagaagaatggagacatcggccagcagatcaagaccctggaccagaagattgaaagagtggccgaggccaccaggatgctgaatggccgcctggacaatgaatttgacaggctcatcgtgcctgagccagatgtggactttgatgccaagtggaatgagctggatgcccgcatcaacgtgacagagaagaatgctgaggagcactgcttctacatcgaggagaccctgcggggggccatcaacggggaggtgggggacctgaagcagctggtggaccagaagatccagagcctggaggaccggctgggctctgtgctgctgcagatgaccaacaacacaggagctgagctgagccccccaggagctgctgccctgcccggggtgtctggcagcggagatgagcgggtgatgatggagctgaaccacctgaaggacaaggtgcaggtggtggaggacatctgcctgctgaacatccagggcaagccccacggcatggagggcgccctgcccaaccgggaggacagagctgtgcgggacagcctgcacctgctgaagagcctgaatgacaccatgcacaggaagttccaggagacagagcagaccatccagaagctgcagcaggacttctccttcctgtacagccagctgaaccacacagaaaatgatgtgacccacctgcagaaggagatgagcaactgccgggccggggagaatgccggcatgggccgcttcaccaaggtgggggagcaggagaggacagtggacaccctgcccagcccccagcaccctgtggcccactgctgcagccagctggaggagcgctggcagaggctgcagagccaggtgatcagcgagctggatgcctgcaaggagtgcacccagggcgtgcagcgggaggtgtccatggtggagggccgggtgagccacatggagaagacctgcagcaagctggacagcatcagcggcaacctgcagaggatcaaggagggcctgaacaagcacgtgagcagcctgtggaactgtgtgcggcagatgaatggcaccctgcggagccacagccgggacatcagcggcctgaagaacagcgtgcagcagttctacagccacgtgttccagatcagcacagacctgcaggacctggtgaagttccagcccagcgccaaggcccccagccccccacctcctgctgaggcccccaaggagcccctgcagcctgagcccgccccaccccggcccagcggccctgccacagctgaggaccccggccggcggcctgtgctgccccagaggcctcctgaggagaggcctccccagcccccaggcagcactggagtgattgctgagaccggccaggccggccccccagctggagctggggtgtctggccggggcctgccccggggcgtggatggccagacaggcagcggcaccgtgcctggagctgagggctttgctggggcccctggctaccccaagagcccccctgtggccagccctggggcccctgtgcccagcctggtgtccttctctgctggcctgacccagaagcccttccccagtgatggcggcgtggtgctcttcaacaaggtgctggtgaatgatggagatgtgtacaaccccagcactggagtcttcaccgccccctatgatggccgctacctgatcacagccaccctgaccccagagagagatgcctacgtggaggccgtgctgtctgtgtccaatgcctctgtggcccagctgcacacagctggctaccgccgggagttcctggagtaccacaggcctcctggggccctgcacacctgtggcggccctggggccttccacctgattgtgcacctgaaggctggagatgctgtgaatgtggtggtgactggaggcaagctggcccacacagactttgatgagatgtacagcaccttcagcggggtcttcctgtaccccttcctgagccacctgtag

SEQ ID NO: 222788 - DNA, 993 bp, Artificial Sequence
  derived and/or modified sequence
cggggggccctggtgggcgcccccaggtctgcccgggccagctgcctgcggggcagaagacctggaagacggcagccctgtggccgctgcccagaccccccaagaagtggccctggccaggccggccgggcccgctgtgccagagatgtggccgcccagacagccctggccccccgggccctggccctgggcgctggggccgccggccctggctggagaggagctgtgccccggcggcctgctgcccgggtgtccagagctgcccagaggcaggagcaggagctggtgcggctgcaccgggagcaggagtgtgagctgcagcctgagcccgccccaccccggcccagcggccctgccacagctgaggaccccggccggcggcctgtgctgccccagaggcctcctgaggagaggcctccccagcccccaggcagcactggagtgattgctgagaccggccaggccggccccccagctggagctggggtgtctggctaccccaagagcccccctgtggccagccctggggcccctgtgcccagcctggtgtccttctctgctggcctgacccagaagcccttccccagtgatggaggagtggtgctcttcaacaaggtgctggtgaatgatggagatgtgtacaaccccagcactggagtcttcaccgccccctatgatggccgctacctgatcacagccaccctgaccccagagagagatgcctacgtggaggccgtgctgtctgtgtccaatgcctctgtggcccagctgcacacagctggctacagaagagagttcctggagtaccaccggcccccaggggccctgcacacctgtggcggccctggggccttccacctgattgtgcacctgaaggctggagatgctgtgaatgtggtggtgactggaggcaagctggcccacacagactttgatgagatgtacagcaccttctctggagtcttcctgtaccccttcctgagccacctgtag

SEQ ID NO: 222789 - DNA, 3162 bp, Artificial Sequence
  derived and/or modified sequence
atgtggcagccccggcggccctggccccgggtgccctggcggtgggctcttgcacttctcgcactagttggcgctgggctctgccacgccggccctcagccaggttatccggctcgcccctccgctcgtaataagaattggtgtgcctacatagttaacaaaaatgtgtcctgctctgtgctggaagggtcagagtctttcattcaggctcagtacaattgcgcatggaaccagatgccctgcccttcggctttggtgtatagagtaaacttccggcccagatacgtgactagatataaaacggtgacgcaattagaatggagatgctgccctgggtttcgcggcggggattgccaggaaggtcccaaagaccctgtaaagactctgcgccccactcctgcccggccccgtaatagcttaaaaaaggccaccgataacgagccatcgcaatttagcgagcctaggaagaccctgagcccaaccggaactgcacaaccctcctggggtgtggacccaaaagagggtccccaagagttacaggagaagaagattcaggtgcttgaagaaaaggtccttcggttgactcgcaccgtgttagacctgcagagctctctggctggtgtcagtgaaaacctcaagcatgccacccaagacgacgcgagccggacgcgcgctccaggtctctccagccaacaccccaaaccagatactactgtgtcaggagatacagagactgggcagagtcctggagtctttaatactaaagaatctggtatgaaggacattaaatccgagctggccgaagttaaagacacccttaagaataagtcagacaagctggaggagttggacgggaaggtgaagggctacgagggtcaactgagacagctacaggaggctgctcagggacccacagtgaccatgaccaccaacgaactctatcaggcgtacgtggactcaaagatcgacgctttacgcgaggagttaatggagggcatggataggaagctcgccgatctgaagaacagttgtgaatacaaattgacaggccttcaacagcagtgtgatgattacggatcttcttatctgggcgtcatagaactcatcggggaaaaagaaacctcattgaggaaagagattaacaacctgagggctcgcctgcaggaaccgtccgctcaggcaaattgctgtgactccgagaagaacggggacattgggcagcagataaaaacacttgaccagaagatcgagagagtggcggaagccactcgcatgctgaatggacgtttagataatgaatttgaccggctgattgtgcctgaacccgacgtggacttcgacgcaaaatggaacgagctggacgcaagaataaacgttaccgagaaaaatgccgaggagcactgcttctatatcgaggagaccctgagaggcgcgataaacggtgaagtcggagacctgaaacagctggttgaccaaaaaatccagtccttagaagatcgcctgggcagcgtgctgctccaaatgacaaacaatacaggtgccgagctcagcccgcccggcgccgccgcactccccggcgtgagcgggtcaggcgatgaacgcgtcatgatggagctcaaccacctcaaagataaagtccaggtcgtggaagacatctgcttgcttaacattcagggtaaaccacatggaatggagggcgcactgcctaacagagaagatcgagcggtacgggactctctgcatcttctgaagagtctgaatgacactatgcaccggaaatttcaggagaccgagcagacgattcagaaactgcagcaggacttctcgttcttgtactctcagctgaatcacaccgaaaacgacgtgactcacctgcaaaaagaaatgagcaattgtcgggcaggcgagaatgccgggatgggacggtttacgaaggtgggcgaacaagagcgtactgtggacacgttgccctccccacagcatccagtggcacactgctgctcccaattggaggaacgctggcagagattacaaagccaggtgatctcagaactcgatgcatgtaaagagtgcacccagggagtacaacgagaggtcagtatggtggagggaagagtgtcccacatggagaagacatgctcaaaactggactctatcagtgggaacctgcagaggattaaggaaggtcttaacaaacatgtgtcaagcttgtggaactgtgttagacagatgaacggaaccctccggtcccacagtcgagatatatcgggtctcaagaacagcgtgcagcagttctacagccacgtctttcagataagcactgacttacaggacctggtcaagtttcagccaagtgccaaggctccatcccccccacctccggccgaggcaccgaaggagcccctgcagccagagcccgcgccgccccgaccctctggccctgcaactgccgaagatccgggcagacgccctgtccttccccagcgcccacccgaggaaaggcccccccaacctccgggaagcaccggtgttattgcggaaaccggccaggccggaccgccggctggtgccggcgtgtccggcagaggtctgccacgtggggtggatggacaaacagggtcggggactgtacccggagctgaaggctttgccggggctccagggtatcccaagtcccccccggtagcttctcctggcgcccctgttccatcgctggtgtcattctccgccggcttgacgcagaaacccttcccaagcgatggtggagtggtcctgtttaataaggtacttgttaatgatggagacgtgtacaatccgagcacgggggtgttcacagctccctacgacgggagatacctgatcaccgccacattaacgccagaaagagatgcttatgtggaggctgtccttagtgtgtccaatgcaagcgtggcccaactccacaccgccggctaccgcagagagttcctcgagtatcaccggccccctggcgccctgcacacatgtggaggcccaggcgcctttcacctgatcgtacacctgaaagctggcgacgcagttaacgtggttgttacaggagggaaacttgcacacacagacttcgacgagatgtacagtacctttagtggagtattcctctatcctttcctgagccacctgtag

SEQ ID NO: 222790 - DNA, 993 bp, Artificial Sequence
  derived and/or modified sequence
cggggcgccctggtgggcgccccccggagcgcccgggccagctgcttgagagggcgccggcctgggcggcggcagccatgtggaagatgcccagaccctcctagaagtggccccgggcaggctgggagagcaaggtgcgccagggacgtggctgcgcagaccgcgctggctcctcgcgccctggctctaggggcaggggccgctggccccggctggaggggtgcagtgcctcgcaggcccgctgcgagagtgtcacgggcggctcagaggcaggaacaggaattggtcagactccaccgcgaacaggagtgcgaattgcaacccgagccggcgcctccccggccatcaggccccgctactgcagaggatcccggtcggcgtccagtcctcccccagcgaccccctgaggaacgaccccctcagccacccggtagcacgggcgtgatcgctgagaccgggcaggccgggccccctgcaggcgcaggtgtctcagggtatccgaagtctccgcccgttgcatcacctggcgcccctgtcccttctctcgtgtccttcagcgccggactgactcagaagccttttcccagcgatggaggtgttgtcctttttaacaaagtactcgtgaacgatggggacgtgtacaatccatcaacaggggtgtttaccgcaccttacgacggtcggtacctgatcactgctaccctcacccccgagagggacgcgtatgtggaggccgtcctctcagtgtccaatgcctcagttgcccagctgcatacagcgggctatcggcgcgagttcctggaataccacagacctcctggggcactgcacacatgtggcgggcctggagcctttcatctgatcgtccacctgaaagccggagatgccgttaacgttgtcgtgaccgggggcaaattagcccacactgatttcgacgagatgtactcaacctttagtggcgtgtttctgtatccgttcttatcacatctgtag

SEQ ID NO: 222791 - RNA, 3162 nt, Artificial Sequence
  derived and/or modified sequence
auguggcagccaagacggcccuggccgagaguccccuggcgcugggcgcucgcucuucuugcucuuguaggcgcaggguugugccaugcagguccucagccaggcuaccccgcccggccuagcgcccgaaacaagaacuggugugccuacauaguaaauaagaauguuuccugcucugugcuugaaggcagcgaaagcuuuauucaagcacaguacaauugugcuuggaaucagaugccauguccaucggcccuggucuacagggugaauuuuagacccagguacguuaccagauacaagacaguuacacaguuggaguggcguugcugcccuggauuccgagguggagacugucaagaaggcccaaaggacccaguuaagacucuuaggccuacaccagcuagaccacguaacagucucaagaaagccacugauaacgaaccuagccaguuuuccgaaccgcggaaaacccucagcccgaccggcacugcccagccuuccuggggggucgauccuaaggaaggaccucaagaacugcaggaaaaaaagauucagguguuagaagagaagguuuuacgucuuacacgaaccguccuggaccugcaguccucacuggccggcgucucggaaaaucugaagcacgcgacgcaagaugacgcaaguaggacgcgagcacccggguugagcucccaacaccccaaaccagacacaacuguuagcggggauacagagacuggccaaucacccggcguguuuaauacgaaggaaagcgguaugaaagacauuaagucugaacuggccgaagugaaagacacucugaaaaauaagagugacaaauuagaggaguuggacggaaaaguaaagggguaugaaggccagcuccgccagcugcaagaggccgcucagggcccaacaguaacuaugacaaccaaugagcucuaccaggccuacguggacucuaagauugaugcccuuagagaggagcugauggagggcauggacagaaagcuggccgacuuaaaaaacaguugcgaauacaaacugaccggccuucagcagcaaugugaugacuaugggucauccuaccugggcgugauugaauugauuggagaaaaggagacuagcuuaaggaaagagauaaacaacuuaagagcaagacugcaggagccaucagcacaggcuaauuguugcgauuccgagaaaaacggugacauugggcagcaaauuaagacucuggaucagaagauugaacggguagcugaagcaacccggauguugaacggcagacuggauaacgaguuugacagacucaucgucccagaacccgacguagacuucgacgcgaaauggaaugaacuagacgcacggaucaacgugacagaaaagaacgccgaggaacacugcuuuuacauagaagagacauuaagaggagcuauuaacggggagguuggggaccucaagcagcuaguggaccagaaaauccagucucucgaggaccgccugggauccguucucuuacagaugaccaauaacaccggggccgagcugucuccccccggggccgcagcgcucccgggcgucagcggcagcggggacgaacgggugaugauggagcugaaucaucugaaagacaagguacagguaguggaagauauauguuuacugaacauucaaggaaaaccacaugguauggagggagcccuuccaaaucgagaggacagagcgguccgcgacagccugcaucugcugaagucauuaaacgacacuaugcaccggaaguuucaggaaacagagcagaccauccaaaaacuccaacaggacuucaguuuccuauacucgcagcucaaucauacugagaacgacgucacccacuuacagaaggagauguccaauugucgcgccggagagaaugccggcaugggaagauuuacuaaaguuggcgagcaagaaagaaccguggacacuuuaccgucaccgcagcacccuguggcccauugcugcucccaguuagaggaaagguggcaacgacuucaaucucaagugauuagcgagcuggaugcgugcaaggaguguacccagggcguucagcgggaggucagcaugguggaagggcgggucucacauauggaaaaaaccuguuccaaacuugacucuauuagcggaaaccuucaacgaaucaaggaaggauugaauaaacacgucucgucucuguggaauugcguccggcagaugaauggaacacuaaggagucacucucgggacaucuccggacuaaaaaauuccguacagcaguuuuacagucauguauuucagaucagcacagacuuacaagacuuggugaaguuccaaccuucugcuaaggccccaucuccaccuccuccggccgaagccccuaaggagccacuucagccagagccggcgcccccaagacccucaggaccugcuacugcagaggacccugguaggcgccccgugcucccucagcgcccgccagaagaaagacccccucaacccccgggcucuacugguguaaucgcugagacuggacaggcaggcccucccgccggugcaggcguaucuggucgcggccugccacgaggcguugacgggcagacaggcagcggcaccguccccggagcugagggguucgcuggcgcuccuggcuacccaaagaguccaccuguggccagcccuggagccccaguaccgucauuggugucuuucuccgcaggccuaacucagaagcccuuccccagcgacgggggagucgucuuauuuaauaaaguguugguuaacgauggcgaugucuauaacccuuccacggggguguuuaccgccccuuacgacggcagauaccuuauaacugccacccugacccccgaaagagacgccuaugucgaggccguguugucugucucaaaugccuccguggcccaguuacauaccgccgguuaccgcagggaauuucucgaguaucaccgcccuccgggagcucugcauacaugcggcgguccaggcgccuuccaucuuaucguccaucugaaggcaggugaugcuguuaacgugguggugacaggagggaagcucgcccacacugauuuugacgagauguacuccacauuuuccgggguauuccucuaccccuuucuuucacaucuauag

SEQ ID NO: 222792 - RNA, 993 nt, Artificial Sequence
  derived and/or modified sequence
cgcggggccuuggugggagcuccccguucugcacgggcaagcugucucaggggaaggagaccuggucggaggcagccuugcgggaggugcccggacccaccucgcucugguccaggccaggcagggcgagcucgcugugcaagagacgucgcugcccaaaccgcccucgcuccacgggcccucgcccuuggagccggagcugcagggccaggauggaggggugccgugccacgaaggccagcagcaagagugagcagagcggcucagaggcaggagcaagaauuggugagauugcaucgcgagcaggaaugugagcuccagcccgaaccugcaccuccgcgccccaguggcccugcaaccgcugaggacccagggcggagaccuguucugccacaaagaccccccgaggagagaccuccacagccuccagguucaacuggggugaucgcagaaaccggacaagcagguccucccgcgggggcagguguuuccggauacccuaaaucacccccaguagcgucuccuggugcucccguucccucccuaguaucauucagcgccggcuugacucaaaaacccuucccuagcgacggcgggguugugcuguuuaacaaggugcugguaaaugauggcgacguguacaacccuucuaccggcgucuuuacggccccuuaugacggucguuacuugauuacugcgacuuuaaccccugagagagaugcauauguugaagccguucugaguguguccaaugcaagcguggcucagcuccacacagcuggguacaggcgugaauuucuggaguaucaccggccccccggcgcccugcauaccugugggggccccggcgcuuuccaucuaaucguacaucuuaaagcuggcgaugccguuaacguggucgucacuggcggaaagcucgcccauacugauuuugacgaaauguacucuaccuucagcggcguuuuccuguauccauuccugucucaccuguag

SEQ ID NO: 222793 - RNA, 3162 nt, Artificial Sequence
  derived and/or modified sequence
auguggcagccccgcagaccuuggccgcgcguuccauggcggugggcucuggcccuccucgcacuggucggcgccggacugugucaugccgggccucagccaggcuauccugcgaggccuucagcacgaaacaaaaacuggugcgccuauaucgugaacaaaaacgugagcuguagcguccuugaagguucggagucauuuauccaagcucaauacaacugcgccuggaaccaaaugcccugucccucagcucuuguauacagagugaauuuucgccccagauaugugacuagguauaagacugugacccagcucgaauggagauguugucccggcuuccguggaggugauugucaggaaggaccaaaagauccugucaaaacgcuccggccaacccccgcacgcccucgcaauagucugaagaaagcaacagauaaugaaccgagccaguucucagaaccaaggaagaccuugucucccacuggaacagcucagccgucauggggaguugacccaaaggagggcccucaagaacugcaggaaaagaaaauucaagugcucgaagaaaagguuuuaaggcucacccgcacaguucuggaccuacaguccucccuugccggggucagugaaaaccucaaacacgccacccaggaugaugccagucgcacucgugcgccuggucucagcucucaacaucccaaaccagacacaacugugaguggcgacacagagacaggacaaagccccggaguguuuaauacuaaggaaucgggaaugaaggacauuaaaagcgaacuggccgaagugaaggauacccugaagaauaagagcgacaagcuugaagaauuagacggaaaggucaagggcuacgagggacaguuaagacagcuacaagaagccgcucagggaccgacugugaccaugaccacuaacgaacuauaucaggcauauguggacucuaaaauugacgcacuccgggaagaacuuauggaaggaauggauagaaagcuggccgaucuuaagaacucuugcgaguauaaguuaacaggucugcaacaacaaugcgaugacuacggauccagcuaucugggcguuauugaacuaaucggggagaaagaaaccagccugcgaaaagaaauuaauaaccugcgcgcccgacugcaagagccaagcgcccaggccaauuguugcgacagugaaaagaacggcgauauuggccagcagauaaagacucuagaccaaaagauagagaggguugcagaagccaccagaaugcucaauggaagguuagacaacgaauuugaccgccuaauaguacccgagccugacguggacuucgaugcaaaguggaaugagcuugaugcucgcauuaacgugaccgaaaaaaacgcagaggagcacugcuuuuauauagaggagacacucagaggugcaaucaauggagaggugggggaccugaaacagcuuguugaucagaaaauccagucccuggaggauagacucggcucaguucuucugcagaugacaaacaauacaggcgcagaguuguccccucccggugccgcagcgcugccggggguaaguggcuccggagaugaacgcguaaugauggagcuuaaucacuuaaaagauaaggugcaggugguugaagauaucugccuacuuaauauccagggcaaaccgcacggaauggaaggagcacugccaaacagagaggaccgugcggugcgggacuccuuacaccugcugaaaagccuuaaugauacgaugcacagaaaguuccaggaaacagaacagacuauccagaaauugcagcaagauuucucauuccucuauagucaguugaaccacaccgaaaaugacguuacccaccuccagaaggaaaugucaaacuguagggcaggcgaaaacgccggaaugggccgguuuaccaaggucggagagcaggagcgcacaguugauacucucccuuccccucagcauccuguggcccacuguugcucucaacuagaagagcguuggcagaggcuucagucccagguaaucagugagcucgacgcaugcaaggagugcacacagggaguacagcgggaggucuccaugguggaagggcgagucucgcacauggaaaaaaccugcucuaaguuagauagcaucucugguaaucuucagcgcauaaaggaaggacuaaauaagcacguguccagcuuguggaauugcgugcggcagaugaacggcaccuugcgaagccacucucgagauauuucagggcuuaagaauagcguucagcaguuuuacucucacgucuuccaaaucucaaccgaccuccaagaccucguuaaauuucaacccagugccaaagcucccucccccccacccccugcagaagcucccaaagaaccccugcagccugaacccgcaccucccagaccuaguggaccugcuacagcagaagaucccgggcgaagacccguacuuccccagcgcccuccggaagagaggcccccucagccacccggguccacaggaguuauagcagagaccggccaagcuggacccccagccggagcugguguuuccgggcggggcuugccgagaggaguggacggucaaacaggauccggcacagugccuggagccgaaggauuugcuggggcgccuggcuauccaaagagucccccagucgccagcccaggcgccccagucccaucuuuagugucuuuuuccgcgggccuuacacagaagcccuuuccaagcgauggggguguggugcuguuuaauaagguucuagucaacgacggcgauguguauaacccuucaaccggugucuuuaccgccccuuacgacggucgguaucugaucaccgcaacucugaccccugaacgcgacgccuacguagaagcugucuugagcgugagcaaugccuccguggcucaacugcacaccgccggauaccggagggaguuucuugaauaccaccgaccaccaggagcucugcacacuugcggaggaccgggggcauuucaccuuauuguucaucugaaagcuggcgaugcuguaaacguuguggucacugggggaaaacuggcacauaccgauuucgaugaaauguacucaacuuucaguggagucuucuuguaucccuuucuuagccauuuguag

SEQ ID NO: 222794 - RNA, 993 nt, Artificial Sequence
  derived and/or modified sequence
cgcggcgcucuggugggggccccacguagcgcucgugccaguugccuaagaggccggagaccagggcggaggcagccaugcgggaggugccccgauccuccacgguccgguccagggcaagcagggagagcaagaugcgcccgggacguggcagcacagaccgccuuagcgccucgggcucuggcccuuggggccggcgccgcgggcccagguuggcgcggggccguacccagacgcccagcugcaaggguaaguagagccgcucagcgucaggaacaagaguuagucagauugcaccgggagcaggagugugagcugcaacccgaaccugcccccccaagaccgagcggaccugccacagcugaggauccaggacggagaccagugcuaccccagcgucccccugaagagcgacccccacagccucccggcucgaccgggguuaucgccgaaaccggacaggcaggacccccagccggggcaggagugucuggauacccgaagucuccccccguggcguccccaggagcgccuguucccucucuggugaguuucucagccggccucacgcaaaagcccuuccccucagacggaggugucgugcuguuuaacaaggugcugguaaaugauggcgacguguacaacccuucuaccggcgucuuuacggccccuuaugacggucguuacuugauuacugcgacuuuaaccccugagagagaugcauauguugaagccguucugaguguguccaaugcaagcguggcucagcuccacacagcuggguacaggcgugaauuucuggaguaucaccggccccccggcgcccugcauaccugugggggccccggcgcuuuccaucuaaucguacaucuuaaagcuggcgaugccguuaacguggucgucaccggcgguaaacuagcucauacagauuucgacgaaauguauagcaccuucucaggcgucuuccuuuauccuuucuugucccaccuguag

SEQ ID NO: 222795 - protein, 359 aa, Artificial Sequence [sequence omitted]

SEQ ID NO: 222796 - DNA, 2356 bp, Artificial Sequence
  derived and/or modified sequence
actataaattcggagctgcctcctcgccaatgattccagcgcctgacagccaggaccccaggcagcagcgagtgacaggacgtctggaccggcgcgccgctagcagctctgccgggccgcggcggtgatcgatggggagcggctggagcggacccagcgagtgagggcgcacagccgggacgccgaggcggcgggcgggagacccgcaccagcgcagccggccctcggcgggacgtgacgcagcgcccggggcgcgggtttgatatttgacaaattgatctaaaatggctgggtttttatctgaataactcactgatgccatcccagaaagtcggcaccaggtgtatttgatatagtgtttgcaacaaattcgacccaggtgatcaaaatgattctcaactcttctactgaagatggtattaaaagaatccaagatgattgtcccaaagctggaaggcataattacatatttgtcatgattcctactttatacagtatcatctttgtggtgggaatatttggaaacagcttggtggtgatagtcatttacttttatatgaagctgaagactgtggccagtgtttttcttttgaatttagcactggctgacttatgctttttactgactttgccactatgggctgtctacacagctatggaataccgctggccctttggcaattacctatgtaagattgcttcagccagcgtcagtttcaacctgtacgctagtgtgtttctactcacgtgtctcagcattgatcgatacctggctattgttcacccaatgaagtcccgccttcgacgcacaatgcttgtagccaaagtcacctgcatcatcatttggctgctggcaggcttggccagtttgccagctataatccatcgaaatgtatttttcattgagaacaccaatattacagtttgtgctttccattatgagtcccaaaattcaaccctcccgatagggctgggcctgaccaaaaatatactgggtttcctgtttccttttctgatcattcttacaagttatactcttatttggaaggccctaaagaaggcttatgaaattcagaagaacaaaccaagaaatgatgatatttttaagataattatggcaattgtgcttttctttttcttttcctggattccccaccaaatattcacttttctggatgtattgattcaactaggcatcatacgtgactgtagaattgcagatattgtggacacggccatgcctatcaccatttgtatagcttattttaacaattgcctgaatcctcttttttatggctttctggggaaaaaatttaaaagatattttctccagcttctaaaatatattcccccaaaagccaaatcccactcaaacctttcaacaaaaatgagcacgctttcctaccgcccctcagataatgtaagctcatccaccaagaagcctgcaccatgttttgaggttgagtgacatgttcgaaacctgtccataaagtaattttgtgaaagaaggagcaagagaacattcctctgcagcacttcactaccaaatgagcattagctacttttcagaattgaaggagaaaatgcattatgtggactgaaccgacttttctaaagctctgaacaaaagcttttctttccttttgcaacaagacaaagcaaagccacattttgcattagacagatgacggctgctcgaagaacaatgtcagaaactcgatgaatgtgttgatttgagaaattttactgacagaaatgcaatctccctagcctgcttttgtcctgttattttttatttccacataaaggtatttagaatatattaaatcgttagaggagcaacaggagatgagagttccagattgttctgtccagtttccaaagggcagtaaagttttcgtgccggttttcagctattagcaactgtgctacacttgcacctggtactgcacattttgtacaaagatatgctaagcagtagtcgtcaagttgcagatctttttgtgaaattcaacctgtgtcttataggtttccactgccaaaacaatgcccgtaagatggcttatttgtataatggtgttactaaagtcacatataaaagttaaactacttgtaaaggtgctgcactggtcccaagtagtagtgtcttcctagtatattagtttgatttaatatctgagaagtgtatatagtttgtggtaaaaagattatatatcataaagtatgccttcctgtttaaaaaaagtatatattctacacatatatgtatatgtatatctatatctctaaactgctgttaattgattaaaatctggcaaagttatatttactttaaaataaaataattttattgcaa

SEQ ID NO: 222797 - DNA, 2172 bp, Artificial Sequence
  derived and/or modified sequence
agggcatgccattgcaagagaatgctcagccatgttcatctggggacctgctcctggtagagcaataggatctgtgtgcccagcaccactgcccacctagctgtcctggcctgtgcccaatgctgaccttcacctcagagtgtggctgtaccacattcggtgtatttgatatagtgtttgcaacaaattcgacccaggtgatcaaaatgattctcaactcttctactgaagatggtattaaaagaatccaagatgattgtcccaaagctggaaggcataattacatatttgtcatgattcctactttatacagtatcatctttgtggtgggaatatttggaaacagcttggtggtgatagtcatttacttttatatgaagctgaagactgtggccagtgtttttcttttgaatttagcactggctgacttatgctttttactgactttgccactatgggctgtctacacagctatggaataccgctggccctttggcaattacctatgtaagattgcttcagccagcgtcagtttcaacctgtacgctagtgtgtttctactcacgtgtctcagcattgatcgatacctggctattgttcacccaatgaagtcccgccttcgacgcacaatgcttgtagccaaagtcacctgcatcatcatttggctgctggcaggcttggccagtttgccagctataatccatcgaaatgtatttttcattgagaacaccaatattacagtttgtgctttccattatgagtcccaaaattcaaccctcccgatagggctgggcctgaccaaaaatatactgggtttcctgtttccttttctgatcattcttacaagttatactcttatttggaaggccctaaagaaggcttatgaaattcagaagaacaaaccaagaaatgatgatatttttaagataattatggcaattgtgcttttctttttcttttcctggattccccaccaaatattcacttttctggatgtattgattcaactaggcatcatacgtgactgtagaattgcagatattgtggacacggccatgcctatcaccatttgtatagcttattttaacaattgcctgaatcctcttttttatggctttctggggaaaaaatttaaaagatattttctccagcttctaaaatatattcccccaaaagccaaatcccactcaaacctttcaacaaaaatgagcacgctttcctaccgcccctcagataatgtaagctcatccaccaagaagcctgcaccatgttttgaggttgagtgacatgttcgaaacctgtccataaagtaattttgtgaaagaaggagcaagagaacattcctctgcagcacttcactaccaaatgagcattagctacttttcagaattgaaggagaaaatgcattatgtggactgaaccgacttttctaaagctctgaacaaaagcttttctttccttttgcaacaagacaaagcaaagccacattttgcattagacagatgacggctgctcgaagaacaatgtcagaaactcgatgaatgtgttgatttgagaaattttactgacagaaatgcaatctccctagcctgcttttgtcctgttattttttatttccacataaaggtatttagaatatattaaatcgttagaggagcaacaggagatgagagttccagattgttctgtccagtttccaaagggcagtaaagttttcgtgccggttttcagctattagcaactgtgctacacttgcacctggtactgcacattttgtacaaagatatgctaagcagtagtcgtcaagttgcagatctttttgtgaaattcaacctgtgtcttataggtttccactgccaaaacaatgcccgtaagatggcttatttgtataatggtgttactaaagtcacatataaaagttaaactacttgtaaaggtgctgcactggtcccaagtagtagtgtcttcctagtatattagtttgatttaatatctgagaagtgtatatagtttgtggtaaaaagattatatatcataaagtatgccttcctgtttaaaaaaagtatatattctacacatatatgtatatgtatatctatatctctaaactgctgttaattgattaaaatctggcaaagttatatttactttaaaataaaataattttattgc

SEQ ID NO: 222798 - DNA, 1545 bp, Artificial Sequence
  derived and/or modified sequence
cttgctacttcatcatcctcatcgtgaacattattattattatcatcattttccagatgaagaaaatgaatcacaagtcaactgacagtccaaaggctccacagctcagaggaggtagatcttagttcttcctgagaaggtatgaaggtgggtattccaccctacctgaattataggaatttcagatatctgtgagcagctgcaaaggggattttactagatgacatcctgctgggcacactttacgccagtcctgaatgtgtaatagaaatctgcagtttaatgagtgtatttgatatagtgtttgcaacaaattcgacccaggtgatcaaaatgattctcaactcttctactgaagatggtattaaaagaatccaagatgattgtcccaaagctggaaggcataattacatatttgtcatgattcctactttatacagtatcatctttgtggtgggaatatttggaaacagcttggtggtgatagtcatttacttttatatgaagctgaagactgtggccagtgtttttcttttgaatttagcactggctgacttatgctttttactgactttgccactatgggctgtctacacagctatggaataccgctggccctttggcaattacctatgtaagattgcttcagccagcgtcagtttcaacctgtacgctagtgtgtttctactcacgtgtctcagcattgatcgatacctggctattgttcacccaatgaagtcccgccttcgacgcacaatgcttgtagccaaagtcacctgcatcatcatttggctgctggcaggcttggccagtttgccagctataatccatcgaaatgtatttttcattgagaacaccaatattacagtttgtgctttccattatgagtcccaaaattcaaccctcccgatagggctgggcctgaccaaaaatatactgggtttcctgtttccttttctgatcattcttacaagttatactcttatttggaaggccctaaagaaggcttatgaaattcagaagaacaaaccaagaaatgatgatatttttaagataattatggcaattgtgcttttctttttcttttcctggattccccaccaaatattcacttttctggatgtattgattcaactaggcatcatacgtgactgtagaattgcagatattgtggacacggccatgcctatcaccatttgtatagcttattttaacaattgcctgaatcctcttttttatggctttctggggaaaaaatttaaaagatattttctccagcttctaaaatatattcccccaaaagccaaatcccactcaaacctttcaacaaaaatgagcacgctttcctaccgcccctcagataatgtaagctcatccaccaagaagcctgcaccatgttttgaggttgagtgacatgttcgaaacctgtccataaagtaattttgtgaaagaaggagcaagagaacattcctctgcagcacttcactaccaaatgagcattagctacttttcagaattgaaggagaaaatgcattatgtggactg

SEQ ID NO: 222799 - DNA, 1795 bp, Artificial Sequence
  derived and/or modified sequence
gttttgcaccaaactggacacatgcttgctacttcatcatcctcatcgtgaacattattattattatcatcattttccagatgaagaaaatgaatcacaagtcaactgacagtccaaaggctccacagctcagaggaggtaaatcatgtgcttaattcagaacttttggctcccatcactatgctcttcccactgtcttaactctggttgtcacctgagccattgtgtttcttctcaggtagatcttagttcttcctgagaaggtatgaaggtgggtattccaccctacctgaattataggaatttcagatatctgtgagcagctgcaaaggggattttactagatgacatcctgctgggcacactttacgccagtcctgaatgtgtaatagaaatctgcagtttaatgacactgaactaaagaaccagaaaatagaggggtgtattagtgaactacagaaaattcaagtcccaaaagctgtaaatactctgaggaccaaagaaaatatatacgttgttcagatttgccctgaggggtgtatttgatatagtgtttgcaacaaattcgacccaggtgatcaaaatgattctcaactcttctactgaagatggtattaaaagaatccaagatgattgtcccaaagctggaaggcataattacatatttgtcatgattcctactttatacagtatcatctttgtggtgggaatatttggaaacagcttggtggtgatagtcatttacttttatatgaagctgaagactgtggccagtgtttttcttttgaatttagcactggctgacttatgctttttactgactttgccactatgggctgtctacacagctatggaataccgctggccctttggcaattacctatgtaagattgcttcagccagcgtcagtttcaacctgtacgctagtgtgtttctactcacgtgtctcagcattgatcgatacctggctattgttcacccaatgaagtcccgccttcgacgcacaatgcttgtagccaaagtcacctgcatcatcatttggctgctggcaggcttggccagtttgccagctataatccatcgaaatgtatttttcattgagaacaccaatattacagtttgtgctttccattatgagtcccaaaattcaaccctcccgatagggctgggcctgaccaaaaatatactgggtttcctgtttccttttctgatcattcttacaagttatactcttatttggaaggccctaaagaaggcttatgaaattcagaagaacaaaccaagaaatgatgatatttttaagataattatggcaattgtgcttttctttttcttttcctggattccccaccaaatattcacttttctggatgtattgattcaactaggcatcatacgtgactgtagaattgcagatattgtggacacggccatgcctatcaccatttgtatagcttattttaacaattgcctgaatcctcttttttatggctttctggggaaaaaatttaaaagatattttctccagcttctaaaatatattcccccaaaagccaaatcccactcaaacctttcaacaaaaatgagcacgctttcctaccgcccctcagataatgtaagctcatccaccaagaagcctgcaccatgttttgaggttgagtgacatgttcgaaacctgtccataaagtaattttgtgaaagaaggagcaagagaacattcctctgcagcacttcactaccaaatgagcattagctacttttcagaattgaaggagaaaatgcattatgtggactg

SEQ ID NO: 222800 - DNA, 1669 bp, Artificial Sequence
  derived and/or modified sequence
gttttgcaccaaactggacacatgcttgctacttcatcatcctcatcgtgaacattattattattatcatcattttccagatgaagaaaatgaatcacaagtcaactgacagtccaaaggctccacagctcagaggaggtaaatcatgtgcttaattcagaacttttggctcccatcactatgctcttcccactgtcttaactctggttgtcacctgagccattgtgtttcttctcaggtagatcttagttcttcctgagaaggtatgaaggtgggtattccaccctacctgaattataggaatttcagatatctgtgagcagctgcaaaggggattttactagatgacatcctgctgggcacactttacgccagtcctgaatgtgtaatagaaatctgcagtttaatgagtgtatttgatatagtgtttgcaacaaattcgacccaggtgatcaaaatgattctcaactcttctactgaagatggtattaaaagaatccaagatgattgtcccaaagctggaaggcataattacatatttgtcatgattcctactttatacagtatcatctttgtggtgggaatatttggaaacagcttggtggtgatagtcatttacttttatatgaagctgaagactgtggccagtgtttttcttttgaatttagcactggctgacttatgctttttactgactttgccactatgggctgtctacacagctatggaataccgctggccctttggcaattacctatgtaagattgcttcagccagcgtcagtttcaacctgtacgctagtgtgtttctactcacgtgtctcagcattgatcgatacctggctattgttcacccaatgaagtcccgccttcgacgcacaatgcttgtagccaaagtcacctgcatcatcatttggctgctggcaggcttggccagtttgccagctataatccatcgaaatgtatttttcattgagaacaccaatattacagtttgtgctttccattatgagtcccaaaattcaaccctcccgatagggctgggcctgaccaaaaatatactgggtttcctgtttccttttctgatcattcttacaagttatactcttatttggaaggccctaaagaaggcttatgaaattcagaagaacaaaccaagaaatgatgatatttttaagataattatggcaattgtgcttttctttttcttttcctggattccccaccaaatattcacttttctggatgtattgattcaactaggcatcatacgtgactgtagaattgcagatattgtggacacggccatgcctatcaccatttgtatagcttattttaacaattgcctgaatcctcttttttatggctttctggggaaaaaatttaaaagatattttctccagcttctaaaatatattcccccaaaagccaaatcccactcaaacctttcaacaaaaatgagcacgctttcctaccgcccctcagataatgtaagctcatccaccaagaagcctgcaccatgttttgaggttgagtgacatgttcgaaacctgtccataaagtaattttgtgaaagaaggagcaagagaacattcctctgcagcacttcactaccaaatgagcattagctacttttcagaattgaaggagaaaatgcattatgtggactg

SEQ ID NO: 222801 - DNA, 2359 bp, Artificial Sequence
  derived and/or modified sequence
cgggagggtctcccggggcggggcggaggaggagggaatgcaaaacagagcctcgtccccggaacccaagaagcagcaacgcccctcactataaattcggagctgcctcctcgccaatgattccagcgcctgacagccaggaccccaggcagcagcgagtgacaggacgtctggaccggcgcgccgctagcagctctgccgggccgcggcggtgatcgatggggagcggctggagcggacccagcgagtgagggcgcacagccgggacgccgaggcggcgggcgggagacccgcaccagcgcagccggccctcggcgggacgtgacgcagcgcccggggcgcgggtgtatttgatatagtgtttgcaacaaattcgacccaggtgatcaaaatgattctcaactcttctactgaagatggtattaaaagaatccaagatgattgtcccaaagctggaaggcataattacatatttgtcatgattcctactttatacagtatcatctttgtggtgggaatatttggaaacagcttggtggtgatagtcatttacttttatatgaagctgaagactgtggccagtgtttttcttttgaatttagcactggctgacttatgctttttactgactttgccactatgggctgtctacacagctatggaataccgctggccctttggcaattacctatgtaagattgcttcagccagcgtcagtttcaacctgtacgctagtgtgtttctactcacgtgtctcagcattgatcgatacctggctattgttcacccaatgaagtcccgccttcgacgcacaatgcttgtagccaaagtcacctgcatcatcatttggctgctggcaggcttggccagtttgccagctataatccatcgaaatgtatttttcattgagaacaccaatattacagtttgtgctttccattatgagtcccaaaattcaaccctcccgatagggctgggcctgaccaaaaatatactgggtttcctgtttccttttctgatcattcttacaagttatactcttatttggaaggccctaaagaaggcttatgaaattcagaagaacaaaccaagaaatgatgatatttttaagataattatggcaattgtgcttttctttttcttttcctggattccccaccaaatattcacttttctggatgtattgattcaactaggcatcatacgtgactgtagaattgcagatattgtggacacggccatgcctatcaccatttgtatagcttattttaacaattgcctgaatcctcttttttatggctttctggggaaaaaatttaaaagatattttctccagcttctaaaatatattcccccaaaagccaaatcccactcaaacctttcaacaaaaatgagcacgctttcctaccgcccctcagataatgtaagctcatccaccaagaagcctgcaccatgttttgaggttgagtgacatgttcgaaacctgtccataaagtaattttgtgaaagaaggagcaagagaacattcctctgcagcacttcactaccaaatgagcattagctacttttcagaattgaaggagaaaatgcattatgtggactgaaccgacttttctaaagctctgaacaaaagcttttctttccttttgcaacaagacaaagcaaagccacattttgcattagacagatgacggctgctcgaagaacaatgtcagaaactcgatgaatgtgttgatttgagaaattttactgacagaaatgcaatctccctagcctgcttttgtcctgttattttttatttccacataaaggtatttagaatatattaaatcgttagaggagcaacaggagatgagagttccagattgttctgtccagtttccaaagggcagtaaagttttcgtgccggttttcagctattagcaactgtgctacacttgcacctggtactgcacattttgtacaaagatatgctaagcagtagtcgtcaagttgcagatctttttgtgaaattcaacctgtgtcttataggtttccactgccaaaacaatgcccgtaagatggcttatttgtataatggtgttactaaagtcacatataaaagttaaactacttgtaaaggtgctgcactggtcccaagtagtagtgtcttcctagtatattagtttgatttaatatctgagaagtgtatatagtttgtggtaaaaagattatatatcataaagtatgccttcctgtttaaaaaaagtatatattctacacatatatgtatatgtatatctatatctctaaactgctgttaattgattaaaatctggcaaagttatatttactttaaaataaaataattttattgcaa

SEQ ID NO: 222802 - protein, 641 aa, Artificial Sequence
  derived and/or modified sequence
MERVNDASCGPSGCYTYQVSRHSTEMLHNLNQQRKNGGRFCDVLLRVGDESFPAHRAVLAACSEYFESVFSAQLGDGGAADGGPADVGGATAAPGGGAGGSRELEMHTISSKVFGDILDFAYTSRIVVRLESFPELMTAAKFLLMRSVIEICQEVIKQSNVQILVPPARADIMLFRPPGTSDLGFPLDMTNGAALAANSNGIAGSMQPEEEAARAAGAAIAGQASLPVLPGVDRLPMVAGPLSPQLLTSPFPSVASSAPPLTGKRGRGRPRKANLLDSMFGSPGGLREAGILPCGLCGKVFTDANRLRQHEAQHGVTSLQLGYIDLPPPRLGENGLPISEDPDGPRKRSRTRKQVACEICGKIFRDVYHLNRHKLSHSGEKPYSCPVCGLRFKRKDRMSYHVRSHDGSVGKPYICQSCGKGFSRPDHLNGHIKQVHTSERPHKCQTCNASFATRDRLRSHLACHEDKVPCQVCGKYLRAAYMADHLKKHSEGPSNFCSICNREGQKCSHQDPIESSDSYGDLSDASDLKTPEKQSANGSFSCDMAVPKNKMESDGEKKYPCPECGSFFRSKSYLNKHIQKVHVRALGGPLGDLGPALGSPFSPQQNMSLLESFGFQIVQSAFASSLVDPEVDQQPMGPEGK

SEQ ID NO: 222803 - DNA, 1926 bp, Artificial Sequence
  derived and/or modified sequence
atggagcgggtgaatgatgcctcatgcggacccagcggatgctacacttaccaagtatccagacatagtactgaaatgctgcacaatctaaatcagcaaagaaaaaacgggggcaggttctgtgacgtgctcctccgcgtgggggacgaaagtttccctgcacacagggctgtcctggctgcgtgctctgagtattttgaaagcgtctttagcgcacagctgggagacggaggcgctgctgatgggggtccggcagatgtcgggggggctacagccgcgcctgggggcggagctggcgggtcccgggagttagaaatgcacaccattagcagcaaagtcttcggtgacatcttagactttgcgtacaccagtagaatcgtcgtgcgcctagagagcttccccgagctgatgaccgcagccaagtttcttctgatgaggtccgtaattgagatctgccaagaggttatcaaacaatctaacgtacagatcctcgtccctccggctagggccgacatcatgctgttcagacctcctggcacatcagatctgggattcccactcgatatgaccaacggggccgctctcgccgccaattccaatgggattgcagggtcaatgcagccagaggaggaagccgcccgcgccgctggcgccgcgattgccgggcaagcttctctgcccgttctgcccggagtggatcgtctgcctatggtggccggaccactgagcccccaactgctgacatcccccttcccttccgtggcttccagcgcacccccactcactggcaaacgaggaaggggcagaccccggaaggcaaacttgctcgattcaatgttcggtagcccaggtggacttcgggaagccggcatcctgccatgtggattgtgtggtaaagtcttcaccgacgccaatcgtctccgacagcacgaagcacagcacggcgtgaccagtctgcagctggggtacattgatctgcctcctcctcggctaggggaaaatggacttccaatctccgaggaccccgacggacctcgcaagcggagccggacccgaaagcaggtggcctgtgagatatgcggcaagattttccgcgacgtttatcacctcaaccgacacaagctctcacattccggtgagaaaccctactcatgtcctgtgtgcgggctcaggttcaagcgaaaagatcgcatgagttaccatgtccggagccatgacgggtcagtcgggaaaccctatatttgtcagagttgcggcaaggggttcagcaggcccgatcatttgaatggccacatcaagcaagttcatacctctgagcggccacataagtgtcagacctgtaatgccagtttcgctacgagagaccggctgcggagtcacctagcctgccatgaagacaaagtcccatgccaggtgtgcggaaaatacttgagagctgcatacatggcggaccacctcaaaaaacatagcgaaggaccgagtaatttctgctcaatctgtaatcgggagggacagaagtgctcgcaccaggatcctatcgaaagtagcgatagttacggagatctctccgatgccagcgacctgaaaacacccgaaaaacaatccgccaatggctcatttagttgtgacatggctgtgcccaaaaacaagatggaatctgacggcgagaagaaatacccttgtcctgagtgtggaagcttcttccgcagcaagtcctatctaaacaaacacatccagaaggtgcatgtaagggctctgggcgggcctctgggggatctcggacccgcccttggctcccccttctcgccacagcagaacatgtccttactcgagtcttttggatttcagatcgtacagtcggccttcgcttcaagcctcgttgaccctgaggtggaccaacagccaatgggccctgagggaaaatag

SEQ ID NO: 222804 - DNA, 1926 bp, Artificial Sequence
  derived and/or modified sequence
atggagcgggtgaatgatgccagctgtggccccagcggctgctacacctaccaggtgagccgccacagcacagagatgctgcacaacctgaaccagcagaggaagaatggaggccgcttctgtgatgtgctgctgcgggtgggagatgagagcttccctgcccacagagctgtgctggccgcctgcagcgagtactttgagagcgtcttcagcgcccagctgggagatggaggagctgctgatggcggccctgcagatgtgggcggggccacagctgcccctgggggcggggccggcggcagccgggagctggagatgcacaccatcagcagcaaggtgtttggagacatcctggactttgcctacaccagccgcatcgtggtgcggctggagagcttccctgagctgatgacagctgccaagttcctgctgatgaggtctgtgattgagatctgccaggaggtgatcaagcagagcaatgtgcagatcctggtgcccccagcccgggctgacatcatgctgttccggcccccaggcaccagtgacctgggcttccccctggacatgaccaatggagctgccctggccgccaacagcaatggaattgctggctccatgcagcctgaggaggaggccgcccgggccgccggggccgccatcgccggccaggccagcctgcctgtgctgcccggggtggaccggctgcccatggtggccggccccctgagcccccagctgctgaccagccccttccccagcgtggccagcagcgccccacccctgaccgggaagaggggccggggccggcccaggaaggccaacctgctggacagcatgtttggcagccctgggggcctgcgggaggccggcatcctgccctgtggcctgtgtgggaaggtgttcacagatgccaaccggctgcggcagcacgaggcccagcacggcgtgaccagcctgcagctgggctacatcgacctgcccccaccccggctgggagaaaatggcctgcccatcagcgaggaccctgatggccccaggaagaggagcaggaccaggaagcaggtggcctgtgagatctgtgggaagatcttcagagatgtgtaccacctgaacagacacaagctgagccacagcggggagaagccctacagctgccctgtgtgtggcctgcgcttcaagaggaaggacaggatgagctaccacgtgcgcagccatgatggctctgtgggcaagccctacatctgccagagctgtgggaagggcttcagcaggccagaccacctgaatggccacatcaagcaggtgcacaccagcgagcggccccacaagtgccagacctgcaatgccagctttgccacccgggaccggctgcggagccacctggcctgccacgaggacaaggtgccctgccaggtgtgtgggaagtacctgcgggccgcctacatggctgaccacctgaagaagcacagcgagggccccagcaacttctgcagcatctgcaaccgggagggccagaagtgcagccaccaggaccccatcgagagcagtgacagctatggagacctgagtgatgccagtgacctgaagaccccagagaagcagagcgccaacggcagcttcagctgtgacatggctgtgcccaagaacaagatggagagtgatggagagaagaagtacccctgcccagaatgtggcagcttcttccgcagcaagagctacctgaacaagcacatccagaaggtgcacgtgcgggccctgggcggccccctgggggacctgggccctgccctgggcagccccttcagcccccagcagaacatgagcctgctggagagctttggcttccagatcgtgcagagcgcctttgccagcagcctggtggaccctgaggtggaccagcagcccatgggccctgagggcaagtag

SEQ ID NO: 222805 - DNA, 3638 bp, Artificial Sequence
  derived and/or modified sequence
gctccagccgccgccgccgccgccaccgccctccaggctccgggacccggcccgcgccaccgcccccgtgcgcgccccgccgccgccgccttcgccttcgccttttgtttcctccgctccggcgcccccgccccggctcgcgctttgcaggggacgcagcgcgcgcccccagcgggcccgggaaaagccgcggcgcgcgcgcgcgcctgcgcggcggacccctccttctcctccccgcgtgcgcgtgcccttcttggctgcgcgccggcgccgcctggcgggcgggaggggaggtggcaggcgcgtttgcaggaggggcgcacctcttcgctcgcgcacccccccggaaggtagaccgggaaggggaggcgggcgggcggagaggagagagtggcgcgcagtccagcgagggcgggggttggctatgtggggggtggtgcaccccgcagtctagacagtctgatccgggctgggggcgtgtacactcggcgcacctgcgagactacagagcctcgggccggcacgtgtggggagtgtggacacgtctgctgcgccccgcttctcgctgctgaggggaagggagggggcgggcaggtgcagcggccgggctagtgggagggggcggcggccatggagcgggtgaacgacgcttcgtgcggcccgtctggctgctacacataccaggtgagcagacacagcacggagatgctgcacaacctgaaccagcagcgcaaaaacggcgggcgcttctgcgacgtgctcttgcgggtaggcgacgagagcttcccagcgcaccgcgccgtgctggccgcctgcagcgagtactttgagtcggtgttcagcgcccagttgggcgacggcggagctgcggacgggggtccggctgatgtagggggcgcgacggcagcaccaggcggcggggccgggggcagccgggagctggagatgcacactatcagctccaaggtatttggggacattctggacttcgcctacacttcccgcatcgtggtgcgcttggagagctttcccgaactcatgacggccgccaagttcctgctgatgaggtcggttatcgagatctgccaggaagtcatcaaacagtccaacgtacagatcctggtaccccctgcccgcgccgatataatgctctttcgcccccctgggacctcggacttgggcttccctttggacatgaccaacggggcagccttggcagccaacagcaatggcatcgccggcagcatgcagccagaggaggaggcagctcgggcggctggtgcagccattgcaggccaagcctctttgcctgtgttacctggggtggaccgcttgcccatggtggctggacccctatccccccaactgctgacttccccattccccagtgtggcatccagtgcccctcccctgactggcaagcgaggccggggccgcccaaggaaggccaacctgctggactcaatgtttgggtccccagggggcctgagggaggcaggcatccttccatgcggtctatgtggtaaggtgttcactgatgccaaccggctccggcagcacgaggcccagcacggtgtcaccagcctccagctgggctacatcgaccttcctcctccgaggctgggtgagaatgggctacccatctctgaagaccccgacggcccccgaaagaggagccggaccaggaagcaggtggcttgtgagatctgcggcaagatcttccgtgatgtgtatcatcttaaccggcacaagctgtcccactctggggagaagccctactcctgccctgtgtgtgggttgcggttcaagagaaaagaccgcatgtcctaccatgtgcggtcccatgatgggtccgtgggcaagccttacatctgccagagctgtgggaaaggcttctccaggcctgatcacttgaacggacatatcaagcaggtgcacacttctgagcggcctcacaagtgtcagacctgcaatgcttcttttgccacccgagaccgtctgcgctcccacctggcctgtcatgaagacaaggtgccctgccaggtgtgtgggaagtacttgcgggcagcatacatggcagaccacctgaagaagcacagcgaggggcccagcaacttctgcagtatctgtaaccgagaaggccagaaatgctcacatcaggatccgattgagagctctgactcctatggtgacctctcagatgccagcgacctgaagacgccagagaagcagagtgccaatggctctttctcctgcgacatggcagtccccaaaaacaaaatggagtctgatggggagaagaagtacccatgccctgaatgtgggagcttcttccgctctaagtcctacttgaacaaacacatccagaaggtgcatgtccgggctctcgggggccccctgggggacctgggccctgcccttggctcacctttctctcctcagcagaacatgtctctcctcgagtcctttgggtttcagattgttcagtcggcatttgcgtcatctttagtagatcctgaggttgaccagcagcccatggggcctgaagggaaatgaggcagctgctgtgtccccacggaaacaaccatctggggactgctgggaaatgctgtgaatgcggagggaagtgatgtttgggttctgtagctgagagatttttattcatttttaactgccccccaaccccactccaactccttctccaccacccattctcccaatggtctttagaaatagattttcatctgatattctgcagaaatatcaatgagacttggtatgggacaggggcagaaaacactacataggcctccaaggcaaaaccagtcccagtttctttaatgggaagaagctggaattcctggtgctcaattcttagtgaccccaatcctatacccaaatctatgatattctgggacctcagtgattttggtcccctcccacttctctagttcgtcatcctcccttcccatatccttcaaaagaaccacactagggtctccacctacttatacaatgcggatgcccaactgtttttaaggaagccagaagcatcccatggaccatggggtgagtgtcctccaagagccccctgagctcagccctctgcctggagggctccagacctttctgagccctgcttggaggcgagcattttcactgctaggacaagctcagctgttgaggacacccccaccccaaatttcagttcttacgtgattttaaccattcaacatgctgttgggttttaattctctaattattattattattgttattattttttaggaccagttgtagtgaattgctactgaaagctatcccaggtgatacagagctctttgtaaaccgcagtcacacattagggttagtattaaactttgtttagatgtaccataattaacttggctagttgattgtttgaagtctatggaagaaatagttttatgcaaaattttaaaaaatgccagtctggtcagggaagtagggggtttcaatgctgttgggaaccaggaaggtgggacagccggcaggtagggacattgtgtacctcagttgtgtcacatgtgagcaagcccaggttgaccttgtgatgtgaattgatctgatcagactgtattaaaaatgttagtacatta

SEQ ID NO: 222806 - DNA, 1926 bp, Artificial Sequence
  derived and/or modified sequence
atggagcgggtgaacgacgccagctgcggccccagcggctgctacacctaccaggtatctcgacattccacggaaatgctgcataatctgaaccagcagaggaagaacggtggaaggttttgcgacgttctgcttagggttggggacgaaagtttccccgcccaccgcgcggttttggctgcctgtagtgagtacttcgaaagtgtcttttccgcacagctgggtgacgggggcgccgcagacggcggccctgctgacgtgggaggggccacagcggcccctggaggtggcgcaggggggtctcgcgagctggagatgcacaccatatccagcaaagtcttcggggacattctggacttcgcctatacctctcgaatcgttgtgagactagagtcttttcctgaactaatgaccgccgccaagttcttacttatgcgaagcgtaatcgagatttgtcaggaggtgatcaagcagtcaaatgtgcagattctggttccacctgcaagagctgacatcatgttatttcgccctcccggcacatcggatttaggttttccgctggatatgaccaacggcgctgctctcgccgccaactctaacgggattgccggcagcatgcagccagaggaggaagctgctagagccgctggagcagccattgccgggcaagcctctctccccgtgctacccggcgtcgaccgcttgccgatggtcgctggtccgctgagcccacagttgcttactagcccgttcccctctgtggcctcttctgcgccgcctctgaccggtaaacgaggtagaggccgccctcgaaaggctaatctcctagatagtatgtttggatcccctggtggactacgagaagctggtattctcccttgcgggttgtgcggaaaggtcttcaccgacgccaatcgactgcgtcaacacgaggcccagcacggtgtgacatctttacaactggggtacatagacctgcctcctccccggctcggagagaatggtctcccaatttccgaggatccggacggacccagaaaacgaagcagaacccgcaaacaggtcgcttgtgagatctgcgggaagatttttcgtgacgtttaccatcttaaccggcataagttgtcccacagcggggagaagccctactcgtgccctgtctgcggcctcaggttcaagagaaaagaccgaatgtcataccacgtccggtcccatgacggatctgtcggtaaaccatatatttgccagtcttgtggaaaagggttttctagacctgatcatctgaatggacacatcaagcaagtccacacctccgagagacctcataagtgtcagacctgtaatgccagctttgccaccagggatagactgagatcacatctcgcttgtcacgaagacaaggtgccctgccaagtctgcggcaagtatttgcgagcagcctatatggcggatcaccttaagaagcattcagaagggccgtcaaatttctgtagtatctgcaatagagaaggtcagaagtgttcccatcaggatcccattgaatcaagtgattcttacggagacctgagcgacgccagcgacctgaaaacacccgagaagcagagcgcaaatggttcattttcctgtgatatggctgtccccaaaaacaaaatggagtcagacggcgagaaaaaatacccttgtccagagtgtggaagctttttcagatcaaaatcatatctgaacaagcacattcagaaggtgcatgttcgcgccttaggggggcctctgggcgatctagggcctgccctgggcagccccttcagcccacaacaaaacatgtccctgctggagtcttttggcttccagatcgtccagagtgcgttcgccagcagtttggtcgatcccgaggtggatcagcaaccaatgggccctgaggggaagtag

SEQ ID NO: 222807 - DNA, 1926 bp, Artificial Sequence
  derived and/or modified sequence
atggagagggtgaacgatgcgagctgtggacccagcgggtgttacacataccaggtgagcagacactctaccgaaatgctgcacaacttgaatcagcaaaggaaaaacgggggacgattttgcgatgtccttttacgcgtaggggatgagagctttccagcacaccgggcagtactcgcggcttgctctgaatactttgagtcagtgttctccgcacagctgggggatggcggagcggcagacgggggtcccgctgatgtgggcggtgcaaccgctgcacccggtgggggagcgggaggttctagagagttggaaatgcataccatttcatcaaaagtattcggggatatcctggattttgcctatacctctaggattgtggttcgactggagagcttccctgaactcatgacagctgcgaagtttctgctgatgagaagcgtaattgagatatgccaggaagtgatcaaacaatctaatgtgcagatcctggtcccccctgcccgagctgatattatgctgttccgacctcccggtacctctgatctcggattcccattggatatgactaacggagccgcactggcggctaactctaacggcattgctgggtcaatgcaaccagaggaggaagcggcaagggctgccggtgctgccattgccggtcaagcgtccctccctgtcctccctggtgtagaccgactaccgatggttgccggtcctctgtcacctcagctattaacgtctcccttcccaagcgtcgctagctccgccccaccactcacaggcaaacgcggacgaggccgtcctaggaaggctaacctgctcgactcaatgtttggctcacccggtggcctgcgcgaagcaggaattctgccatgcgggctgtgcggtaaggtgttcactgatgccaacaggctgcggcagcatgaggcccagcatggggtaaccagcctgcagctgggatacattgacctgcctccgcctcggctaggcgagaacgggttgccaatctccgaggatccagacgggccacggaaaagaagtcggacccgtaagcaggtcgcgtgtgagatctgtgggaaaatctttcgggatgtttatcacctgaaccgccacaagctgagccatagcggggaaaaaccttactcatgccctgtctgcggactacgatttaaaagaaaggacagaatgagttatcacgtccggtcccacgatggttctgtgggaaaaccatacatttgtcagagttgtgggaagggtttttctcggccagatcatcttaacggtcacataaagcaggttcacacatctgagcgtccccataagtgccagacatgtaacgcaagcttcgccacgagggaccgcctgaggtcacaccttgcatgccacgaagataaggtcccctgccaggtgtgtggaaaatacctcagggccgcttatatggcggaccacctgaaaaaacactctgaggggccttcaaatttttgttccatctgtaatcgcgaaggtcagaagtgcagtcaccaggatccaattgagtcaagcgactcctatggcgacctgtccgacgcttcagatttgaaaacacccgagaagcagagcgctaacggctcctttagctgtgatatggcagtgccaaagaacaagatggagagtgatggcgagaagaagtatccctgccctgaatgtggaagctttttccgcagcaagtcttatcttaacaagcacatccagaaagtgcacgtgagggcgctgggaggtcccctcggagacctgggacctgccctgggcagccctttttccccacagcaaaatatgtccctgcttgagagcttcggcttccagatcgtgcagtctgcctttgcctccagcctggttgaccccgaggtggaccagcaacctatgggccctgaaggcaagtag

SEQ ID NO: 222808 - DNA, 1926 bp, Artificial Sequence
  derived and/or modified sequence
atggagagagtgaacgacgccagctgcggccccagcggctgctacacctaccaggtgagcagacacagcaccgagatgctgcacaacctgaaccagcagagaaagaacggcggcagattctgcgacgtgctgctgagagtgggcgacgagagcttccccgcccacagagccgtgctggccgcctgcagcgagtacttcgagagcgtgttcagcgcccagctgggcgacggcggcgccgccgacggcggccccgccgacgtgggcggcgccaccgccgcccccggcggcggcgccggcggcagcagagagctggagatgcacaccatcagcagcaaggtgttcggcgacatcctggacttcgcctacaccagcagaatcgtggtgagactggagagcttccccgagctgatgaccgccgccaagttcctgctgatgagaagcgtgatcgagatctgccaggaggtgatcaagcagagcaacgtgcagatcctggtgccccccgccagagccgacatcatgctgttcagaccccccggcaccagcgacctgggcttccccctggacatgaccaacggcgccgccctggccgccaacagcaacggcatcgccggcagcatgcagcccgaggaggaggccgccagagccgccggcgccgccatcgccggccaggccagcctgcccgtgctgcccggcgtggacagactgcccatggtggccggccccctgagcccccagctgctgaccagccccttccccagcgtggccagcagcgccccccccctgaccggcaagagaggcagaggcagacccagaaaggccaacctgctggacagcatgttcggcagccccggcggcctgagagaggccggcatcctgccctgcggcctgtgcggcaaggtgttcaccgacgccaacagactgagacagcacgaggcccagcacggcgtgaccagcctgcagctgggctacatcgacctgcccccccccagactgggcgagaacggcctgcccatcagcgaggaccccgacggccccagaaagagaagcagaaccagaaagcaggtggcctgcgagatctgcggcaagatcttcagagacgtgtaccacctgaacagacacaagctgagccacagcggcgagaagccctacagctgccccgtgtgcggcctgagattcaagagaaaggacagaatgagctaccacgtgagaagccacgacggcagcgtgggcaagccctacatctgccagagctgcggcaagggcttcagcagacccgaccacctgaacggccacatcaagcaggtgcacaccagcgagagaccccacaagtgccagacctgcaacgccagcttcgccaccagagacagactgagaagccacctggcctgccacgaggacaaggtgccctgccaggtgtgcggcaagtacctgagagccgcctacatggccgaccacctgaagaagcacagcgagggccccagcaacttctgcagcatctgcaacagagagggccagaagtgcagccaccaggaccccatcgagagcagcgacagctacggcgacctgagcgacgccagcgacctgaagacccccgagaagcagagcgccaacggcagcttcagctgcgacatggccgtgcccaagaacaagatggagagcgacggcgagaagaagtacccctgccccgagtgcggcagcttcttcagaagcaagagctacctgaacaagcacatccagaaggtgcacgtgagagccctgggcggccccctgggcgacctgggccccgccctgggcagccccttcagcccccagcagaacatgagcctgctggagagcttcggcttccagatcgtgcagagcgccttcgccagcagcctggtggaccccgaggtggaccagcagcccatgggccccgagggcaagtag

SEQ ID NO: 222809 - protein, 537 aa, Artificial Sequence
  derived and/or modified sequence
MERVNDASCGPSGCYTYQVSRHSTEMLHNLNQQRKNGGRFCDVLLRVGDESFPAHRAVLAACSEYFESVFSAQLGDGGAADGGPADVGGATAAPGGGAGGSRELEMHTISSKVFGDILDFAYTSRIVVRLESFPELMTAAKFLLMRSVIEICQEVIKQSNVQILVPPARADIMLFRPPGTSDLGFPLDMTNGAALAANSNGIAGSMQPEEEAARAAGAAIAGQASLPVLPGVDRLPMVAGPLSPQLLTSPFPSVASSAPPLTGKRGRGRPRKANLLDSMFGSPGGLREAGILPCGLCGKVFTDANRLRQHEAQHGVTSLQLGYIDLPPPRLGENGLPISEDPDGPRKRSRTRKQVACEICGKIFRDVYHLNRHKLSHSGEKPYSCPVCGLRFKRKDRMSYHVRSHDGSVGKPYICQSCGKGFSRPDHLNGHIKQVHTSERPHKCQVWVGSSSGLPPLEPLPSDLPSWDFAQPALWRSSHSVPDTAFSLSLKKSFPALENLGPAHSSNTLFCPAPPGYLRQGWTTPEGSRAFTQWPVG

SEQ ID NO: 222810 - DNA, 2516 bp, Artificial Sequence
  derived and/or modified sequence
agtctgatccgggctgggggcgtgtacactcggcgcacctgcgagactacagagcctcgggccggcacgtgtggggagtgtggacacgtctgctgcgccccgcttctcgctgctgaggggaagggagggggcgggcaggtgcagcggccgggctagtgggagggggcggcggccatggagcgggtgaacgacgcttcgtgcggcccgtctggctgctacacataccaggtgagcagacacagcacggagatgctgcacaacctgaaccagcagcgcaaaaacggcgggcgcttctgcgacgtgctcttgcgggtaggcgacgagagcttcccagcgcaccgcgccgtgctggccgcctgcagcgagtactttgagtcggtgttcagcgcccagttgggcgacggcggagctgcggacgggggtccggctgatgtagggggcgcgacggcagcaccaggcggcggggccgggggcagccgggagctggagatgcacactatcagctccaaggtatttggggacattctggacttcgcctacacttcccgcatcgtggtgcgcttggagagctttcccgaactcatgacggccgccaagttcctgctgatgaggtcggttatcgagatctgccaggaagtcatcaaacagtccaacgtacagatcctggtaccccctgcccgcgccgatataatgctctttcgcccccctgggacctcggacttgggcttccctttggacatgaccaacggggcagccttggcagccaacagcaatggcatcgccggcagcatgcagccagaggaggaggcagctcgggcggctggtgcagccattgcaggccaagcctctttgcctgtgttacctggggtggaccgcttgcccatggtggctggacccctatccccccaactgctgacttccccattccccagtgtggcatccagtgcccctcccctgactggcaagcgaggccggggccgcccaaggaaggccaacctgctggactcaatgtttgggtccccagggggcctgagggaggcaggcatccttccatgcggtctatgtggtaaggtgttcactgatgccaaccggctccggcagcacgaggcccagcacggtgtcaccagcctccagctgggctacatcgaccttcctcctccgaggctgggtgagaatgggctacccatctctgaagaccccgacggcccccgaaagaggagccggaccaggaagcaggtggcttgtgagatctgcggcaagatcttccgtgatgtgtatcatcttaaccggcacaagctgtcccactctggggagaagccctactcctgccctgtgtgtgggttgcggttcaagagaaaagaccgcatgtcctaccatgtgcggtcccatgatgggtccgtgggcaagccttacatctgccagagctgtgggaaaggcttctccaggcctgatcacttgaacggacatatcaagcaggtgcacacttctgagcggcctcacaagtgtcaggtgtgggttgggagcagcagcggcctgccgcccctggaacctcttcctagcgacctgccatcatgggactttgcccagcctgctttgtggaggtcgtcccattcggttcctgacaccgccttttccctttctctaaaaaaatcattcccagcccttgaaaacctgggcccagcacactccagcaacactctcttctgcccagccccgccgggatatctgaggcagggctggaccaccccagagggcagcagggcctttacccagtggcctgttggctagcctgggcctccctggagagggttgacagtggaagggaacaggaggggcatttggcctgagacccctgcttttgggagaggctagcagggtggttcctgcccagcatgcccagctcctccctgggtgactcggagtctttcccatgtcagagcccccaaatgggggtagcaaggagcacctttctggaaccccctatagcatccaagtttctttctgggctctcttgccttttcccccctttcacagatggcacccctgggcatctgtccttgcctaggtgattttggaggttggtgccttcctgggaactagccaccagcttatctgcttcccttcccctggcatcacttcccataggcctggggtttctagactggggcctggccacccctttccccactccacgagtgagtcggcctccagagaagactggcacaattccaactagagtcaacccatgctgccctctgcccttcccactcagatctagatcctgctttcatttctggctagtgaagtagacttttgtgtttttgaggtttattagcaggtctgctcaggaaccaaactaatgagtagctttatattgggccaccccaatatatggctttgggggctgaaaaagcagatgtagaccccctccctcggatccttattggtgtgccctttagcactccgcagactctgcggggtgaacaggagtgatgataaaatttttcattctaaca

SEQ ID NO: 222811 - DNA, 1614 bp, Artificial Sequence
  derived and/or modified sequence
atggagcgagtgaacgacgcctcatgcggcccaagtgggtgctatacctaccaggtgtcccgccattctacagaaatgctccataacttgaaccagcagcggaaaaacgggggaaggttctgtgacgtgttactgagagtcggcgacgaaagcttccccgctcacagggccgtcttggctgcctgctcagagtactttgagtccgtcttttccgcccagctgggcgacgggggggcagccgatggggggcctgctgacgtcggaggcgcgacagctgcccccggtgggggcgccggaggaagtcgcgagctcgagatgcacacaatttcaagcaaagttttcggcgatattttggactttgcctacacaagccgaatcgtcgtacggctagagagcttccccgagctaatgaccgcagcaaagttcctactgatgagaagcgtcatagaaatctgtcaggaagtcattaagcagtccaatgtgcagattctagtacctcccgctagagcagatattatgttatttcgtccgccggggaccagcgacctcggttttcctctggatatgacgaatggagccgccctggccgccaacagcaacggcatcgccggctccatgcaacctgaggaggaagcggccagagccgccggggccgcaatcgccggtcaagcttctttgcccgtccttccaggcgtcgacagactgcctatggtggccgggccactttctccccagctcctgactagccccttcccatcagttgcatcaagcgctccacccctgacgggcaaacgcggacgtggaagacctcgaaaagcaaacctgttagacagcatgtttgggagcccaggaggacttcgtgaggccgggatcctgccatgcggcctgtgcggaaaggtcttcacggatgctaatagactgcgacagcacgaagcacagcacggggtcaccagcctgcaactgggctacatagaccttccaccaccccggctcggagaaaatggtcttcctattagcgaagatcccgatggcccaaggaaacgatcacgtacgcggaagcaggtggcctgtgagatctgcggcaagatctttcgggatgtatatcatctgaatagacataagttatctcactctggcgagaaaccttactcatgccccgtctgtggactgagatttaaacgcaaagatcggatgtcatatcatgtcagaagtcatgacgggagcgtgggcaagccgtatatatgccagtcctgcggaaagggtttctcgcgccctgaccatctgaacgggcatatcaaacaagttcacacttcggagcgaccccataagtgtcaggtatgggtgggctcttcctccggtctccctcctttagaacccctcccttctgatctcccaagctgggacttcgcccaaccagccttgtggcgctcaagccatagcgtgcctgatacagctttttccttatcattgaagaaatctttccccgcgctggaaaatctgggtcccgcgcacagctctaatactctgttttgccccgcaccgccaggatatctgcgacagggttggaccactccggaaggctcccgcgcctttactcagtggcccgtgggctag

SEQ ID NO: 222812 - DNA, 1614 bp, Artificial Sequence
  derived and/or modified sequence
atggagcgggtgaatgatgccagctgtggccccagcggctgctacacctaccaggtgagccgccacagcacagagatgctgcacaacctgaaccagcagaggaagaatggaggccgcttctgtgatgtgctgctgcgggtgggagatgagagcttccctgcccacagagctgtgctggccgcctgcagcgagtactttgagagcgtcttcagcgcccagctgggagatggaggagctgctgatggcggccctgcagatgtgggcggggccacagctgcccctgggggcggggccggcggcagccgggagctggagatgcacaccatcagcagcaaggtgtttggagacatcctggactttgcctacaccagccgcatcgtggtgcggctggagagcttccctgagctgatgacagctgccaagttcctgctgatgaggtctgtgattgagatctgccaggaggtgatcaagcagagcaatgtgcagatcctggtgcccccagcccgggctgacatcatgctgttccggcccccaggcaccagtgacctgggcttccccctggacatgaccaatggagctgccctggccgccaacagcaatggaattgctggctccatgcagcctgaggaggaggccgcccgggccgccggggccgccatcgccggccaggccagcctgcctgtgctgcccggggtggaccggctgcccatggtggccggccccctgagcccccagctgctgaccagccccttccccagcgtggccagcagcgccccacccctgaccgggaagaggggccggggccggcccaggaaggccaacctgctggacagcatgtttggcagccctgggggcctgcgggaggccggcatcctgccctgtggcctgtgtgggaaggtgttcacagatgccaaccggctgcggcagcacgaggcccagcacggcgtgaccagcctgcagctgggctacatcgacctgcccccaccccggctgggagaaaatggcctgcccatcagcgaggaccctgatggccccaggaagaggagcaggaccaggaagcaggtggcctgtgagatctgtgggaagatcttcagagatgtgtaccacctgaacagacacaagctgagccacagcggggagaagccctacagctgccctgtgtgtggcctgcgcttcaagaggaaggacaggatgagctaccacgtgcgcagccatgatggctctgtgggcaagccctacatctgccagagctgtgggaagggcttcagcaggccagaccacctgaatggccacatcaagcaggtgcacaccagcgagcggccccacaagtgccaggtgtgggtgggcagcagcagcggcctgccccccctggagcccctgcccagcgacctgcccagctgggactttgcccagcctgccctgtggaggagcagccacagcgtgcctgacacagccttcagcctgagcctgaagaagagcttccctgccctggagaacctgggccctgcccacagcagcaacaccctcttctgcccagcccctcctggctacctgcggcagggctggaccaccccagagggcagccgggccttcacccagtggcctgtgggctag

SEQ ID NO: 222813 - DNA, 1614 bp, Artificial Sequence
  derived and/or modified sequence
atggagcgggtgaacgacgccagctgcggccccagcggctgctacacttatcaggtgagccgacacagtacagagatgcttcataacctcaatcagcagcggaagaatgggggaagattttgtgacgtgcttcttcgggtgggcgacgaaagcttccctgctcaccgcgctgtgctcgctgcctgcagtgaatacttcgagagtgtgttcagcgcccagctgggggatgggggggccgccgacggtgggcccgccgatgtggggggtgcgacagcagctccgggcggcggtgccggaggcagccgtgaacttgagatgcacacgatcagtagcaaggtgttcggcgacattcttgattttgcctacacttccaggattgtggtgcgcctcgaatcgtttcccgaacttatgacagccgctaagttccttctgatgcgcagcgtcatagagatatgccaagaggtcattaaacagtccaatgtgcagatcctcgtgccccctgctcgggccgacatcatgctgtttcgccctcccggaacttctgacctgggtttccctctcgacatgacgaatggagcagcgctcgccgcgaactccaacggaattgccgggagcatgcagcctgaagaggaagctgcccgtgcagcaggggcagcgatcgcaggccaagccagcctgccagttttgccaggggtggacagactccccatggtggcagggcccctgtcccctcagctgctcacatccccttttcctagcgtcgcgagttctgcaccccccctaaccgggaagagggggcgtggaagacccagaaaggccaacttgcttgacagcatgttcggctcccctggtgggcttagagaggccggaattcttccatgtggtctgtgtggtaaagtttttacagacgctaatcgtctgcgacagcatgaggcccagcacggagtgacttctctgcagcttggctacattgatttgccaccccctcgcctgggcgagaacggcctgccaatatcagaggacccagacggcccaaggaagcggagtagaacacgcaaacaggtcgcctgtgaaatctgtggtaaaatcttccgcgacgtgtaccacctaaaccgacataagctgtcacattccggtgagaagccatatagttgtccagtctgcgggctgaggttcaagcgcaaagaccggatgtcctaccacgtgcggtctcacgatggaagtgtcggaaagccctatatttgccagagctgtggaaagggctttagcaggcccgatcaccttaacggacacatcaaacaggtacacacatcggaaaggccacacaagtgccaggtgtgggtcggcagttctagtgggctgcctcccctggaaccactcccaagcgacctgccatcctgggactttgcacagccagcactctggcggtcttcccactcggtgcccgataccgccttctccctaagcctgaaaaagtccttcccagccttagagaatcttggccccgcacatagctcaaacaccctcttttgtccagccccccctgggtacctgcgacagggttggaccacaccagagggcagcagggcctttacacaatggccagttggttag

SEQ ID NO: 222814 - DNA, 1614 bp, Artificial Sequence
  derived and/or modified sequence
atggaaagggtgaatgatgctagctgtggacccagcggctgctatacctatcaggtgagtcggcactctacagaaatgttgcataatcttaatcaacagcgtaagaatggtgggagattctgcgacgtgctcctgagagtcggagacgagtcattcccagcccacagagccgtgctcgctgcatgctcggaatacttcgagtccgtcttttccgctcagctgggggatgggggagctgcagacggagggccagccgatgttggcggtgcaactgcagctcccggtggaggagctgggggaagcagagagctggagatgcatactatatcctcaaaggtgttcggtgatattcttgactttgcatacacttctagaattgttgtcaggctcgaatcttttcctgaactgatgacggccgctaagtttctcctcatgcggtctgtaatagaaatctgtcaggaagtgataaaacagtcaaatgttcaaatcctggtgcctcctgcccgtgctgatatcatgctgtttcgcccaccaggaacctcggatctgggttttcctctggatatgactaacggcgctgccctggctgcaaattctaatggcatagccggatccatgcagcccgaggaagaggcagccagggctgcaggagctgccatagccggacaggccagcctgcccgtgctcccaggggtggatagactccccatggttgccggtccactgagcccccagctgctgaccagtcccttcccatcggttgcctcgagtgcaccaccgctcacaggaaagagagggcgtgggcgtccccgaaaggcaaatctgttagattctatgttcgggagccctggaggtctgcgcgaggctggtatcttgccatgtggactgtgtggcaaggtgtttaccgacgcaaaccgtttgagacagcacgaggcacaacacggggtcactagcctgcagcttggctatatcgatttgccgcctccacgactaggagagaatggactgcctatctccgaggatcccgatggtccacgcaaacgctctaggaccagaaagcaggtcgcttgtgaaatttgcggcaaaatctttagagacgtttatcacctgaataggcataaactttcccatagtggtgagaagccctattcttgccccgtctgcggcctaagatttaaacggaaagatcggatgtcctaccacgtgagaagccatgatggttcagttggcaagccatacatttgccagtcttgcggtaagggtttcagccggccagaccacctgaatggtcacatcaaacaggtgcacacgagtgaacggccacataaatgccaggtgtgggtgggaagctcctccggcctgccaccactcgagccattgccgtccgatctgcccagctgggattttgcccaaccggcattatggaggtctagccactcagtacccgatactgccttttcacttagcctcaagaaatcctttccagcactagagaatctgggtccggcacacagctctaacacgttgttttgccctgctccgcctgggtatttgaggcaggggtggacgactcctgagggcagccgcgcattcacccagtggccagttggctag

SEQ ID NO: 222815 - DNA, 1614 bp, Artificial Sequence
  derived and/or modified sequence
atggagagagtgaacgacgccagctgcggccccagcggctgctacacctaccaggtgagcagacacagcaccgagatgctgcacaacctgaaccagcagagaaagaacggcggcagattctgcgacgtgctgctgagagtgggcgacgagagcttccccgcccacagagccgtgctggccgcctgcagcgagtacttcgagagcgtgttcagcgcccagctgggcgacggcggcgccgccgacggcggccccgccgacgtgggcggcgccaccgccgcccccggcggcggcgccggcggcagcagagagctggagatgcacaccatcagcagcaaggtgttcggcgacatcctggacttcgcctacaccagcagaatcgtggtgagactggagagcttccccgagctgatgaccgccgccaagttcctgctgatgagaagcgtgatcgagatctgccaggaggtgatcaagcagagcaacgtgcagatcctggtgccccccgccagagccgacatcatgctgttcagaccccccggcaccagcgacctgggcttccccctggacatgaccaacggcgccgccctggccgccaacagcaacggcatcgccggcagcatgcagcccgaggaggaggccgccagagccgccggcgccgccatcgccggccaggccagcctgcccgtgctgcccggcgtggacagactgcccatggtggccggccccctgagcccccagctgctgaccagccccttccccagcgtggccagcagcgccccccccctgaccggcaagagaggcagaggcagacccagaaaggccaacctgctggacagcatgttcggcagccccggcggcctgagagaggccggcatcctgccctgcggcctgtgcggcaaggtgttcaccgacgccaacagactgagacagcacgaggcccagcacggcgtgaccagcctgcagctgggctacatcgacctgcccccccccagactgggcgagaacggcctgcccatcagcgaggaccccgacggccccagaaagagaagcagaaccagaaagcaggtggcctgcgagatctgcggcaagatcttcagagacgtgtaccacctgaacagacacaagctgagccacagcggcgagaagccctacagctgccccgtgtgcggcctgagattcaagagaaaggacagaatgagctaccacgtgagaagccacgacggcagcgtgggcaagccctacatctgccagagctgcggcaagggcttcagcagacccgaccacctgaacggccacatcaagcaggtgcacaccagcgagagaccccacaagtgccaggtgtgggtgggcagcagcagcggcctgccccccctggagcccctgcccagcgacctgcccagctgggacttcgcccagcccgccctgtggagaagcagccacagcgtgcccgacaccgccttcagcctgagcctgaagaagagcttccccgccctggagaacctgggccccgcccacagcagcaacaccctgttctgccccgccccccccggctacctgagacagggctggaccacccccgagggcagcagagccttcacccagtggcccgtgggctag

SEQ ID NO: 222816 - protein, 537 aa, Artificial Sequence
  derived and/or modified sequence
MERVNDASCGPSGCYTYQVSRHSTEMLHNLNQQRKNGGRFCDVLLRVGDESFPAHRAVLAACSEYFESVFSAQLGDGGAADGGPADVGGATAAPGGGAGGSRELEMHTISSKVFGDILDFAYTSRIVVRLESFPELMTAAKFLLMRSVIEICQEVIKQSNVQILVPPARADIMLFRPPGTSDLGFPLDMTNGAALAANSNGIAGSMQPEEEAARAAGAAIAGQASLPVLPGVDRLPMVAGPLSPQLLTSPFPSVASSAPPLTGKRGRGRPRKANLLDSMFGSPGGLREAGILPCGLCGKVFTDANRLRQHEAQHGVTSLQLGYIDLPPPRLGENGLPISEDPDGPRKRSRTRKQVACEICGKIFRDVYHLNRHKLSHSGEKPYSCPVCGLRFKRKDRMSYHVRSHDGSVGKPYICQSCGKGFSRPDHLNGHIKQVHTSERPHKCQTCNASFATRDRLRSHLACHEDKVPCQVCGKYLRAAYMADHLKKHSEGPSNFCSICNRGLQAPGAHPEWGSSVPLRQDLWQQRRPEMLTSGSD

SEQ ID NO: 222817 - DNA, 1614 bp, Artificial Sequence
  derived and/or modified sequence
atggagcgagtgaatgatgcctcatgcggcccgagtggctgctatacgtaccaagtgtctaggcacagtaccgagatgctccacaacctgaaccagcagcgaaaaaatggcgggcgattctgtgacgttctgctgcgggtcggggacgagagcttccctgcccatagagcagtcctggccgcctgttctgagtattttgaatccgtatttagtgcacagcttggggacgggggggctgcagatggtggccctgcggatgtgggaggagccacagcggcgcccggcgggggcgcagggggctcaagagaactggaaatgcatacaataagctccaaggtatttggcgatatccttgatttcgcttacacttcccggatagtggtgcgccttgagtccttccccgagctgatgaccgcggccaagttcctcctgatgaggagtgtgattgagatctgccaggaggtaatcaagcagagtaacgtgcagatactcgttccacctgcccgggcagacatcatgcttttccggcctcccgggacttcagatttgggtttcccattagatatgactaacggtgcggcgctggccgccaactcgaacggaatagccggctctatgcagcctgaggaagaagcggctcgggctgcgggggcagccatcgccggtcaggcgtctctgcccgtgctccccggtgtcgacagacttcccatggtggctggtcccctgtctccccagctgcttacctcgccttttccatccgttgccagtagtgctcctccgctgactggaaagagaggccgtggacgccccagaaaggctaatctgctggactcaatgtttggaagcccaggcggtctgcgtgaagctggtatcttgccatgtggcctctgtgggaaagtgtttaccgatgctaaccgtctgcgtcaacatgaggcacagcacggagtgacatcattgcaactaggctacatcgaccttcccccaccccgactcggagagaacggacttccaatttctgaggatccggatggtccccgaaaaagatcaaggactcgcaaacaggtggcatgtgagatttgcgggaaaattttccgagacgtatatcacctaaacaggcacaagttgagccactctggcgagaaaccatattcctgtcctgtatgtggtctgcgcttcaaacgcaaagacagaatgagctaccacgttaggagtcacgacgggagcgtagggaagccttatatatgccagtcttgcggaaaagggttttcacggcctgaccacctgaacggacacattaagcaggttcatacttccgaacgaccgcacaagtgccaaacctgcaatgccagcttcgctacccgcgataggctgagatcacatctggcctgccacgaagataaggtcccctgccaagtctgtggaaagtacctgcgcgccgcctatatggcagaccaccttaaaaagcacagcgagggaccatcaaacttctgtagcatatgtaacagaggtctccaggctccaggggcacaccccgagtggggcagctccgtcccgcttaggcaagacctgtggcagcaaagacgacctgaaatgttgaccagtgggtcggattag

SEQ ID NO: 222818 - DNA, 1614 bp, Artificial Sequence
  derived and/or modified sequence
atggagcgggtgaatgatgccagctgtggccccagcggctgctacacctaccaggtgagccgccacagcacagagatgctgcacaacctgaaccagcagaggaagaatggaggccgcttctgtgatgtgctgctgcgggtgggagatgagagcttccctgcccacagagctgtgctggccgcctgcagcgagtactttgagagcgtcttcagcgcccagctgggagatggaggagctgctgatggcggccctgcagatgtgggcggggccacagctgcccctgggggcggggccggcggcagccgggagctggagatgcacaccatcagcagcaaggtgtttggagacatcctggactttgcctacaccagccgcatcgtggtgcggctggagagcttccctgagctgatgacagctgccaagttcctgctgatgaggtctgtgattgagatctgccaggaggtgatcaagcagagcaatgtgcagatcctggtgcccccagcccgggctgacatcatgctgttccggcccccaggcaccagtgacctgggcttccccctggacatgaccaatggagctgccctggccgccaacagcaatggaattgctggctccatgcagcctgaggaggaggccgcccgggccgccggggccgccatcgccggccaggccagcctgcctgtgctgcccggggtggaccggctgcccatggtggccggccccctgagcccccagctgctgaccagccccttccccagcgtggccagcagcgccccacccctgaccgggaagaggggccggggccggcccaggaaggccaacctgctggacagcatgtttggcagccctgggggcctgcgggaggccggcatcctgccctgtggcctgtgtgggaaggtgttcacagatgccaaccggctgcggcagcacgaggcccagcacggcgtgaccagcctgcagctgggctacatcgacctgcccccaccccggctgggagaaaatggcctgcccatcagcgaggaccctgatggccccaggaagaggagcaggaccaggaagcaggtggcctgtgagatctgtgggaagatcttcagagatgtgtaccacctgaacagacacaagctgagccacagcggggagaagccctacagctgccctgtgtgtggcctgcgcttcaagaggaaggacaggatgagctaccacgtgcgcagccatgatggctctgtgggcaagccctacatctgccagagctgtgggaagggcttcagcaggccagaccacctgaatggccacatcaagcaggtgcacaccagcgagcggccccacaagtgccagacctgcaatgccagctttgccacccgggaccggctgcggagccacctggcctgccacgaggacaaggtgccctgccaggtgtgtgggaagtacctgcgggccgcctacatggctgaccacctgaagaagcacagcgagggccccagcaacttctgcagcatctgcaacagaggcctgcaggcccctggggcccaccctgagtggggcagctctgtgcccctgcggcaggacctgtggcagcagaggaggcctgagatgctgaccagcggcagtgactag

SEQ ID NO: 222819 - DNA, 3711 bp, Artificial Sequence
  derived and/or modified sequence
gctccagccgccgccgccgccgccaccgccctccaggctccgggacccggcccgcgccaccgcccccgtgcgcgccccgccgccgccgccttcgccttcgccttttgtttcctccgctccggcgcccccgccccggctcgcgctttgcaggggacgcagcgcgcgcccccagcgggcccgggaaaagccgcggcgcgcgcgcgcgcctgcgcggcggacccctccttctcctccccgcgtgcgcgtgcccttcttggctgcgcgccggcgccgcctggcgggcgggaggggaggtggcaggcgcgtttgcaggaggggcgcacctcttcgctcgcgcacccccccggaaggtagaccgggaaggggaggcgggcgggcggagaggagagagtggcgcgcagtccagcgagggcgggggttggctatgtggggggtggtgcaccccgcagtctagacagtctgatccgggctgggggcgtgtacactcggcgcacctgcgagactacagagcctcgggccggcacgtgtggggagtgtggacacgtctgctgcgccccgcttctcgctgctgaggggaagggagggggcgggcaggtgcagcggccgggctagtgggagggggcggcggccatggagcgggtgaacgacgcttcgtgcggcccgtctggctgctacacataccaggtgagcagacacagcacggagatgctgcacaacctgaaccagcagcgcaaaaacggcgggcgcttctgcgacgtgctcttgcgggtaggcgacgagagcttcccagcgcaccgcgccgtgctggccgcctgcagcgagtactttgagtcggtgttcagcgcccagttgggcgacggcggagctgcggacgggggtccggctgatgtagggggcgcgacggcagcaccaggcggcggggccgggggcagccgggagctggagatgcacactatcagctccaaggtatttggggacattctggacttcgcctacacttcccgcatcgtggtgcgcttggagagctttcccgaactcatgacggccgccaagttcctgctgatgaggtcggttatcgagatctgccaggaagtcatcaaacagtccaacgtacagatcctggtaccccctgcccgcgccgatataatgctctttcgcccccctgggacctcggacttgggcttccctttggacatgaccaacggggcagccttggcagccaacagcaatggcatcgccggcagcatgcagccagaggaggaggcagctcgggcggctggtgcagccattgcaggccaagcctctttgcctgtgttacctggggtggaccgcttgcccatggtggctggacccctatccccccaactgctgacttccccattccccagtgtggcatccagtgcccctcccctgactggcaagcgaggccggggccgcccaaggaaggccaacctgctggactcaatgtttgggtccccagggggcctgagggaggcaggcatccttccatgcggtctatgtggtaaggtgttcactgatgccaaccggctccggcagcacgaggcccagcacggtgtcaccagcctccagctgggctacatcgaccttcctcctccgaggctgggtgagaatgggctacccatctctgaagaccccgacggcccccgaaagaggagccggaccaggaagcaggtggcttgtgagatctgcggcaagatcttccgtgatgtgtatcatcttaaccggcacaagctgtcccactctggggagaagccctactcctgccctgtgtgtgggttgcggttcaagagaaaagaccgcatgtcctaccatgtgcggtcccatgatgggtccgtgggcaagccttacatctgccagagctgtgggaaaggcttctccaggcctgatcacttgaacggacatatcaagcaggtgcacacttctgagcggcctcacaagtgtcagacctgcaatgcttcttttgccacccgagaccgtctgcgctcccacctggcctgtcatgaagacaaggtgccctgccaggtgtgtgggaagtacttgcgggcagcatacatggcagaccacctgaagaagcacagcgaggggcccagcaacttctgcagtatctgtaaccgaggtctccaggcaccaggagcccatcctgaatgggggagcagcgttccactgcgccaggacctatggcaacaaagaaggccagaaatgctcacatcaggatccgattgagagctctgactcctatggtgacctctcagatgccagcgacctgaagacgccagagaagcagagtgccaatggctctttctcctgcgacatggcagtccccaaaaacaaaatggagtctgatggggagaagaagtacccatgccctgaatgtgggagcttcttccgctctaagtcctacttgaacaaacacatccagaaggtgcatgtccgggctctcgggggccccctgggggacctgggccctgcccttggctcacctttctctcctcagcagaacatgtctctcctcgagtcctttgggtttcagattgttcagtcggcatttgcgtcatctttagtagatcctgaggttgaccagcagcccatggggcctgaagggaaatgaggcagctgctgtgtccccacggaaacaaccatctggggactgctgggaaatgctgtgaatgcggagggaagtgatgtttgggttctgtagctgagagatttttattcatttttaactgccccccaaccccactccaactccttctccaccacccattctcccaatggtctttagaaatagattttcatctgatattctgcagaaatatcaatgagacttggtatgggacaggggcagaaaacactacataggcctccaaggcaaaaccagtcccagtttctttaatgggaagaagctggaattcctggtgctcaattcttagtgaccccaatcctatacccaaatctatgatattctgggacctcagtgattttggtcccctcccacttctctagttcgtcatcctcccttcccatatccttcaaaagaaccacactagggtctccacctacttatacaatgcggatgcccaactgtttttaaggaagccagaagcatcccatggaccatggggtgagtgtcctccaagagccccctgagctcagccctctgcctggagggctccagacctttctgagccctgcttggaggcgagcattttcactgctaggacaagctcagctgttgaggacacccccaccccaaatttcagttcttacgtgattttaaccattcaacatgctgttgggttttaattctctaattattattattattgttattattttttaggaccagttgtagtgaattgctactgaaagctatcccaggtgatacagagctctttgtaaaccgcagtcacacattagggttagtattaaactttgtttagatgtaccataattaacttggctagttgattgtttgaagtctatggaagaaatagttttatgcaaaattttaaaaaatgccagtctggtcagggaagtagggggtttcaatgctgttgggaaccaggaaggtgggacagccggcaggtagggacattgtgtacctcagttgtgtcacatgtgagcaagcccaggttgaccttgtgatgtgaattgatctgatcagactgtattaaaaatgttagtacatta

SEQ ID NO: 222820 - DNA, 1614 bp, Artificial Sequence
  derived and/or modified sequence
atggagcgggtgaacgacgccagctgcggccccagcggctgctacacatatcaggtaagtcgccattctaccgaaatgcttcataatttgaatcagcaaaggaagaatggtgggaggttctgtgatgtgttactccgcgtgggtgacgagagttttcccgcccatagggccgtgttggctgcttgcagcgagtacttcgagtctgtattcagtgctcagttgggcgacggcggcgccgctgatggaggccccgcggatgtgggaggcgcaaccgcagcgcctgggggcggagccggcggtagcagggaattggagatgcataccatttcctccaaggtgttcggagatattttggactttgcctacaccagcaggatcgtagtgaggctcgaatcattccccgagctcatgacagctgcaaaatttcttcttatgagaagtgtcattgagatttgtcaagaggtcataaagcagtccaatgtacagatcctggtgccaccagcgcgtgcagacataatgctgtttcgtcctccgggcacctcagatttgggatttcccctggatatgacaaacggagcggcactggccgccaactcaaacggaattgccgggtcgatgcagccagaggaggaagccgccagggctgcaggggctgccatagcaggccaagcaagcctgcccgtcctgccaggtgtggatagactgcccatggtagctggcccactttcaccccagctcctgacgtccccatttccctccgtggcctcctcagcacctcccttgacaggcaagcgagggcgtggccgacccaggaaggcaaacttactggacagcatgttcggctcacctggcggtctgcgagaagctggtatcttaccgtgcggcctgtgcggcaaggtcttcaccgatgctaacaggctgcggcaacatgaagctcagcacggtgtcacttctttgcaactcggatacattgatctgccacctccgagactcggagagaatggcttgccgatctccgaggacccagacggccctagaaagcgcagccgtaccaggaagcaagtggcttgtgagatttgtggcaagatctttagggacgtttaccatctgaatagacataagctgtcgcactcgggggagaagccctacagctgtcccgtctgcggtctgcggttcaagcgaaaagatcgaatgtcatatcatgttagatcgcatgacgggagcgttggtaagccatacatctgccaatcatgtggcaaaggattttcaagaccagaccaccttaacgggcatattaagcaagtgcacacaagcgaaaggccccacaagtgccagacctgtaatgcaagcttcgcgacaagagatcggctgcgatcccatcttgcttgccatgaggataaggttccttgtcaggtatgcggaaaatacctgagagccgcctacatggcagatcatctgaaaaaacattctgagggccctagtaacttctgctcaatttgcaaccgaggcctccaggcaccaggtgcccacccagaatggggcagttctgtgccactccgtcaggatctttggcagcaacgcaggccagaaatgctgacttctgggagtgattag

SEQ ID NO: 222821 - DNA, 1614 bp, Artificial Sequence
  derived and/or modified sequence
atggagcgggtgaacgacgcaagttgcggcccaagcggatgttacacttatcaggtctctcgtcactcaactgagatgctgcacaatctgaaccagcagaggaagaatggaggcaggttctgcgatgtcctgctgcgggtgggcgatgagtcattccctgctcaccgcgcagtcctggcggcttgctccgagtactttgagagtgtgttctctgcccagctgggagacggaggcgctgctgacggtgggcctgccgacgtagggggagcaaccgccgcacctggcggaggggcaggtggtagtcgggagctggagatgcacaccattagttctaaagtgttcggggacatcctggatttcgcctatacctcccggatagtggtgagactggagtcatttcccgagctgatgaccgccgctaaatttctgttgatgcgcagcgtgatagagatctgtcaagaagtgatcaagcagtctaacgtgcagatcctggtgccgcctgcaagggcagatataatgctttttagacctccaggcacatccgacctggggttccccctcgacatgacaaacggcgctgccctcgctgctaattctaacggcatcgccggttccatgcaacctgaggaagaggcagccagagcggcaggggcagcaatcgctggccaggcttccctgcctgtgcttcccggtgtagacaggcttccaatggtggcaggcccactgagccctcagctgctgacatcaccctttccatccgtggcctccagtgcacctcccttgacaggcaagcggggaagggggcgaccacgaaaagcaaaccttttggattctatgtttggttcccctggaggactgagggaggctgggatcttgccatgtggattatgcgggaaggttttcactgacgctaacaggctgaggcagcatgaggcccaacacggcgtgacaagcctgcagttgggatatatagaccttccgccaccaagactgggggaaaatgggctgccaatatctgaggatcctgatgggccacgaaagcggagtcggacacggaagcaggtcgcttgtgagatctgtggaaagatttttagggacgtctaccatctgaatcgacataagctctcccattcaggcgagaaaccttactcgtgtcccgtttgtggattgcggtttaaacgaaaggacaggatgtcataccatgtgcgttctcatgatggatccgttggcaagccatacatttgtcagtcatgcggcaaaggcttttcacgacctgaccatttgaatgggcatattaaacaggtccataccagcgagcgccctcacaaatgccagacctgtaacgcttcttttgctacccgagatcggctgagatcccacttggcctgtcatgaggacaaagtcccctgccaagtctgtggcaagtacttacgtgccgcttatatggccgatcacctgaaaaagcactccgaaggcccaagtaacttttgtagcatttgtaatcggggtcttcaggcccctggggctcatcctgaatggggcagttcagtgcccttacgtcaagacttgtggcagcagcgacgtccagaaatgctgaccagcggcagcgactag

SEQ ID NO: 222822 - DNA, 1614 bp, Artificial Sequence
  derived and/or modified sequence
atggagagagtgaacgacgccagctgcggccccagcggctgctacacctaccaggtgagcagacacagcaccgagatgctgcacaacctgaaccagcagagaaagaacggcggcagattctgcgacgtgctgctgagagtgggcgacgagagcttccccgcccacagagccgtgctggccgcctgcagcgagtacttcgagagcgtgttcagcgcccagctgggcgacggcggcgccgccgacggcggccccgccgacgtgggcggcgccaccgccgcccccggcggcggcgccggcggcagcagagagctggagatgcacaccatcagcagcaaggtgttcggcgacatcctggacttcgcctacaccagcagaatcgtggtgagactggagagcttccccgagctgatgaccgccgccaagttcctgctgatgagaagcgtgatcgagatctgccaggaggtgatcaagcagagcaacgtgcagatcctggtgccccccgccagagccgacatcatgctgttcagaccccccggcaccagcgacctgggcttccccctggacatgaccaacggcgccgccctggccgccaacagcaacggcatcgccggcagcatgcagcccgaggaggaggccgccagagccgccggcgccgccatcgccggccaggccagcctgcccgtgctgcccggcgtggacagactgcccatggtggccggccccctgagcccccagctgctgaccagccccttccccagcgtggccagcagcgccccccccctgaccggcaagagaggcagaggcagacccagaaaggccaacctgctggacagcatgttcggcagccccggcggcctgagagaggccggcatcctgccctgcggcctgtgcggcaaggtgttcaccgacgccaacagactgagacagcacgaggcccagcacggcgtgaccagcctgcagctgggctacatcgacctgcccccccccagactgggcgagaacggcctgcccatcagcgaggaccccgacggccccagaaagagaagcagaaccagaaagcaggtggcctgcgagatctgcggcaagatcttcagagacgtgtaccacctgaacagacacaagctgagccacagcggcgagaagccctacagctgccccgtgtgcggcctgagattcaagagaaaggacagaatgagctaccacgtgagaagccacgacggcagcgtgggcaagccctacatctgccagagctgcggcaagggcttcagcagacccgaccacctgaacggccacatcaagcaggtgcacaccagcgagagaccccacaagtgccagacctgcaacgccagcttcgccaccagagacagactgagaagccacctggcctgccacgaggacaaggtgccctgccaggtgtgcggcaagtacctgagagccgcctacatggccgaccacctgaagaagcacagcgagggccccagcaacttctgcagcatctgcaacagaggcctgcaggcccccggcgcccaccccgagtggggcagcagcgtgcccctgagacaggacctgtggcagcagagaagacccgagatgctgaccagcggcagcgactag

SEQ ID NO: 222823 - protein, 750 aa, Artificial Sequence
  derived and/or modified sequence
MANRLQRGDRSRLLLLLCIFLGTLRGFRARQIRYSVPEETEKGSFVGNISKDLGLEPRELAKRGVRIVSRGKTQLFAVNPRSGSLITAGRIDREELCETVSSCFLNMELLVEDTLKIYGVEVEIIDINDNAPSFQEDEVEIKVSEHAIPGARFALPNARDPDVGVNSLQSYQLSPNNYFSLQLRGRTDGAKNPELVLEGSLDREKEAAHLLLLTALDGGDPIRKGAVPIRVVVLDVNDHIPMFTQSVYRVSVPENISSGTRVLMVNATDPDEGINGEVMYSFRNMESKASEIFQLDSQTGEVQVRGSLDFEKYRFYEMEIQGQDGGGLFTTTTMLITVVDVNDNAPEITITSSINSILENSPPGTVIALLNVQDQDSGENGQVSCFIPNHLPFKLEKTYGNYYKLITSRVLDRELVQSYNITLTATDQGSPPLSAETHVWLNVADDNDNPPVFPHSSYSAYIPENNPRGASIFSVTALDPDSKQNALVTYSLTDDTVQGVPLSSYVSINSNTGVLYALQSFDYEQFRDLELRVIARDSGDPPLSSNVSLSLFVLDQNDNAPEILYPALPTDGSTGVELAPRSAEPGYLVTKVVAVDKDSGQNAWLSYRLLKASEPGLFAVGEHTGEQAPPNTDWRFSQAQRPGTSGSQNGDDTGTWPNNQFDTEMLQAMILASASEAADGSSTLGGGAGTMGLSARYGPQFTLQHVPDYRQNVYIPGSNATLTNAAGKRDGKAPAGGNGNKKKSGKKEKK

SEQ ID NO: 222824 - DNA, 2253 bp, Artificial Sequence
  derived and/or modified sequence
atggccaataggttgcagcgaggagatagatcaaggctgctcctgctcctgtgcatatttctggggaccctgcgggggttcagagctcgacaaataagatactccgtgcctgaagaaaccgagaagggctcttttgtggggaatatctctaaggatcttggcctggagccccgagaacttgctaagagaggcgtgcgcattgtgtctcgtggaaagacacagttgtttgcggttaacccccggtcagggtcacttattaccgctggacgcatcgaccgcgaagagttatgtgaaacagtgtccagctgttttctaaacatggagctcctagttgaagatacactgaagatttatggggtggaagtggagattattgatattaatgacaatgccccatctttccaggaggatgaggtcgaaattaaagtgtccgaacacgccattcccggagcccggttcgcactgcccaatgcccgtgatcctgacgtgggggtcaatagcttacagagctaccagctgtctcctaacaactatttctccctgcagctcaggggacgtacagacggggccaagaaccctgaacttgtgcttgaagggagcctggacagggagaaggaagccgcgcacctgctgttgcttactgccttggatggcggtgatcctattcgcaaaggagcggtacctatcagggtcgtggtgctggatgtgaacgaccacatacctatgttcacccagagcgtgtatagggtgagcgtgccagagaacataagctctggaacaagggtcctcatggtgaacgcaactgatcccgacgaaggcataaacggcgaggttatgtactccttccgcaatatggaaagtaaagcctctgaaattttccagctggattcccagacaggggaagtccaagtcaggggtagcctcgacttcgagaagtatagattctacgaaatggaaatccaggggcaggacgggggcggtctctttacaaccaccaccatgcttatcacagttgtggacgtgaacgacaatgcgccagaaatcactattacgtcctcaatcaactcaattttggagaacagccccccgggaactgttatcgcactcctgaatgtgcaggatcaggacagtggagaaaacgggcaggtgagctgtttcatccccaatcacctcccttttaagctcgagaaaacgtacgggaattactataagcttattacttcccgggttctcgatcgcgaattggttcagagttataacattactctgacggctactgaccagggatcccccccattgagtgctgaaacccacgtatggcttaatgtggcagacgataatgataacccgcccgtattcccgcacagcagttacagtgcctatattcccgagaataaccctcgtggtgccagcatcttttcagtgaccgctctcgatcccgactccaagcagaatgccctagttacctactctctgacagatgataccgtacaaggagttcctctttcttcctatgtgagtatcaacagtaacactggagtcctgtatgcattgcagtcctttgactatgagcagtttcgcgatctggaattgcgcgttatcgccagggattcaggggaccctccccttagcagcaatgtgagtctgagtctgtttgtgctggatcagaacgataatgctcctgagatactctaccccgctctgcccacggatggttcaacgggagtcgagcttgcaccccggtcagccgagccagggtacttagtgactaaggttgttgccgtggataaggatagcggacaaaatgcgtggttatcataccggctacttaaagcatcagagcccgggctgttcgccgtgggggaacacaccggggaacaggcacctcccaatactgattggcggttttcccaagcccagagacctggaacctcagggtcccagaacggggacgataccgggacttggcctaacaaccagttcgataccgagatgcttcaggcaatgatacttgccagcgcctctgaagcagctgacgggagctctactttgggaggaggcgcgggtacgatggggctgtctgcccgatacggccctcaattcaccttgcagcatgtgccagactatcggcagaatgtctacattcctggtagcaacgcgactctgacaaacgcggctggcaaacgggacggtaaagcccccgccggcgggaatggtaacaaaaagaagtctggcaaaaaggagaagaagtag

SEQ ID NO: 222825 - DNA, 2253 bp, Artificial Sequence
  derived and/or modified sequence
atggccaaccggctgcagagaggagacaggagccggctgctgctgctgctgtgcatcttcctgggcaccctgcggggcttccgggcccggcagatccgctacagcgtgcctgaggagacagagaagggcagctttgtgggcaacatcagcaaggacctgggcctggagccccgggagctggccaagaggggcgtgagaattgtgtcccggggcaagacccagctgtttgctgtgaaccccaggagcggcagcctcatcacagctggaagaattgaccgggaggagctgtgtgaaacagtgagcagctgcttcctgaacatggagctgctggtggaggacaccctgaagatctacggcgtggaggtggagatcatcgacatcaatgacaatgcccccagcttccaggaggatgaggtggagatcaaggtgtctgagcacgccatccctggggccaggtttgccctgcccaatgcccgggaccctgatgtgggcgtgaacagcctgcagagctaccagctgagccccaacaactacttcagcctgcagctgcggggccgcacagatggagccaagaaccctgagctggtgctggagggcagcctggaccgggagaaggaggccgcccacctgctgctgctgacagccctggatggaggagaccccatcagaaaaggagctgtgcccatccgggtggtggtgctggatgtgaatgaccacatccccatgttcacccagagcgtgtacagagtgtctgtgcctgagaacatcagcagcggcaccagggtgctgatggtgaatgccacagatcctgatgagggcatcaatggagaggtgatgtacagcttcaggaacatggagagcaaggccagcgagatcttccagctggacagccagacaggagaggtgcaggtgcggggcagcctggactttgagaagtaccgcttctatgagatggagatccagggccaggacggcggcggcctcttcaccaccaccaccatgctgatcaccgtggtggatgtgaatgacaatgcccctgagatcaccatcaccagcagcatcaacagcatcctggagaacagccccccaggcaccgtgattgccctgctgaatgtgcaggaccaggacagcggagaaaatggccaggtgtcctgcttcatccccaaccacctgcccttcaagctggagaagacctacggcaactactacaagctgatcaccagccgggtgctggaccgggagctggtgcagagctacaacatcaccctgacagccacagaccagggcagcccccccctgtctgctgagacccacgtgtggctgaatgtggctgatgacaatgacaacccccctgtgttcccccacagcagctacagcgcctacatccctgagaacaaccccaggggggccagcatcttctctgtgacagccctggaccctgacagcaagcagaatgccctggtgacctacagcctgacagatgacacagtgcagggcgtgcccctgagcagctatgtgtccatcaacagcaacacaggagtgctgtatgccctgcagagctttgattatgagcagttccgggacctggagctgcgggtcatcgcccgggacagcggggacccccccctgagcagcaatgtgtccctgagcctgtttgtgctggaccagaatgacaatgcccctgagatcctgtacccagccctgcccacagatggcagcactggagtggagctggcccccaggtctgctgagcccggctacctggtgaccaaggtggtggccgtggacaaggacagcggccagaatgcctggctgagctaccgcctgctgaaggccagcgagcccggcctgtttgctgtgggggagcacactggagagcaggccccacccaacacagactggaggttcagccaggcccagaggcctggcaccagcggcagccagaatggagatgacaccggcacctggcccaacaaccagtttgacacagagatgctgcaggccatgatcctggccagcgccagcgaggccgcagatggcagcagcaccctgggcggcggggccggcaccatgggcctgagcgcccgctatggcccccagttcaccctgcagcacgtgcctgactaccggcagaatgtgtacatccctggcagcaatgccaccctgaccaatgctgctgggaagagagatggcaaggccccagctggaggaaatggaaacaagaagaagagcggcaagaaggagaagaagtag

SEQ ID NO: 222826 - DNA, 2253 bp, Artificial Sequence
  derived and/or modified sequence
atggccaaccggctgcagcggggcgaccggagccggctgctgctgctcctgtgtatcttcctaggaacgctgaggggatttagggctaggcaaatcaggtactcggtaccagaggaaactgaaaagggatctttcgtgggcaatataagcaaagatctggggcttgaaccacgggagctagctaagcggggcgtcaggatcgtaagccgaggaaagacacagctgtttgccgtgaatcctagatcagggagcctgattaccgccggccgtatagaccgtgaggaactctgcgaaaccgtgtccagttgcttcctgaatatggaactcctggtggaagataccctgaagatctacggagtggaggtggagattattgacatcaacgacaatgcgccttcgttccaggaggacgaagtggagatcaaggttagcgaacacgctatcccgggggctcggttcgcactgccaaatgcacgggaccccgatgttggagtgaacagtttgcagtcataccaattaagtcccaataactacttctccttgcagcttagaggtcgaaccgacggggctaagaatccagagctcgttctggagggtagcctcgatcgggagaaggaggccgcgcacttgttgcttctgaccgccctggacggcggcgacccaataaggaaaggagcagtgccgatccgggtggtggtgctcgacgtcaatgaccacatccccatgttcacccagtctgtttacagggtctcagtgcctgagaatatctcaagtggtactcgcgttcttatggtgaatgcaactgaccctgacgagggaattaatggggaagtaatgtatagcttcagaaatatggagtctaaggcttccgaaatctttcagctagacagtcagacaggagaggtacaggtgagggggtcattggactttgagaaataccggttttacgaaatggaaatccaaggacaggacggaggcggactgttcacgaccaccaccatgttgatcaccgttgttgacgtgaatgacaacgctcccgagatcactataacttcatcaataaacagtatccttgagaattccccacccggaaccgtgatagcgctactgaacgtccaggatcaggactctggcgaaaacggccaagtctcctgcttcatacccaatcacttaccttttaaactcgaaaagacttatggtaactattataaactgatcacttctcgggtgctcgacagagaattagtgcaaagctacaacatcacattaaccgccaccgaccagggatcccctccgttgtctgcagagactcacgtctggctgaacgtggcagatgataatgataatccccctgttttccctcactcatcttattcggcatatattcctgagaataaccctaggggagcctccattttttccgtgacagctttggaccccgacagtaaacagaatgcccttgtcacatactcactgacagacgatacagtacagggggtacctctcagcagctatgtttcaatcaattcaaacacaggtgtcctttatgcactccagtcttttgattatgagcaatttcgggatctcgagctgagagtcattgctcgcgacagcggcgaccctcctctgtcatcaaacgtgtctttaagtttgttcgtgttagaccagaatgacaacgctccggaaatcctgtaccccgccctgcctacggacggcagcacgggagtggagctggctcccagatccgctgagccgggataccttgtaactaaggtagtcgccgtagataaggactcaggacagaacgcttggctgtcatacagactccttaaggcttcagaaccagggcttttcgccgtgggtgaacacacgggagaacaagcccctcccaacacggactggaggtttagccaggctcagagacccggcacctcaggaagtcagaatggggacgacacagggacatggcccaacaatcagttcgacacagagatgctccaggctatgatcctggcgtccgcctctgaggccgctgacggttcgagcaccctgggagggggggctggtactatgggactatcggcccgttatggtccacaatttaccttgcagcacgtacctgattaccgtcaaaatgtttacattccagggagtaatgcaacattgactaacgctgccggtaaacgcgacgggaaagcgcccgccggaggtaatggaaacaaaaaaaagtcaggcaaaaaagagaagaagtag

SEQ ID NO: 222827 - DNA, 2253 bp, Artificial Sequence
  derived and/or modified sequence
atggcgaacagacttcagcgcggtgacaggagccggcttctgctcctactgtgtatctttctaggtactctaagaggtttcagggccaggcagatacggtatagtgtcccggaggagaccgaaaaaggcagcttcgtgggaaatatctcgaaagatcttggcctggagccccgagaactcgcaaagcgtggtgtcaggatagtgagtagggggaaaacccagctgttcgcggtaaatcctcgaagcgggagcttgatcacggccggacgaatcgaccgtgaggagctttgcgagaccgtcagttcctgtttcctgaacatggaactgctggtcgaggacacccttaaaatttacggcgtggaggtggagatcatcgacattaatgacaacgcacccagcttccaggaggacgaggtggaaattaaggtttccgagcatgctattccgggagcacgctttgccctgccaaatgccagggatcccgatgtgggtgtgaattctctgcagtcgtaccagttgagcccaaacaactacttctcactgcaattaagaggacggaccgatggcgctaaaaaccctgaattggtcttagaaggcagcctcgatagggaaaaggaggccgcacatctccttctgctgaccgccctggatgggggtgatcccatcaggaagggtgcagtgcctatccgtgttgtggtgctagacgttaatgaccacatccccatgtttacacagtccgtgtatagagtaagcgtcccagagaacatctccagcggtacaagagtcctgatggttaacgcgacggaccccgatgaggggatcaacggagaagttatgtattcatttcggaacatggagtcgaaggcatctgaaattttccaactggatagccaaacaggtgaagttcaggtgcgcggatctctcgattttgaaaagtaccgcttttacgaaatggagatccagggccaagacgggggaggactcttcacaacaaccacaatgttgataaccgtcgtggatgtaaacgacaatgcccctgaaattaccatcaccagcagcattaattctatccttgaaaatagcccgccaggaaccgtgatagcattgctcaacgtccaggaccaggatagtggcgaaaacggtcaggtgtcttgtttcattcccaaccacttacctttcaagctggaaaagacgtatgggaattattataagcttattacatccagggtgttagatagagagctggtgcaatcctataatatcacgttgaccgccactgaccagggcagtccccctctcagcgccgaaacgcatgtttggctgaacgtcgccgatgacaacgacaatccacccgtgtttccccatagcagttacagtgcttacattcctgagaataatccaagaggtgcgtctatcttctctgtcactgccctcgaccccgactctaagcagaacgccttagtcacatactctcttactgatgatacagtccaaggagtccctctgtcctcgtacgtgagtattaatagtaacacgggcgtgctgtacgcactgcagagtttcgattacgagcagtttcgggacttagaactcagggtgattgcaagggatagtggcgaccctccactgtcttccaacgtttccctgtctctgtttgtcctagatcagaacgataacgcaccggaaatcctctatcccgctctccccacagacggttcaaccggagtcgagctcgctccaaggtctgcagaacctgggtatttggtcacgaaggtggtggcggtggataaggacagtggtcagaatgcatggctgagctataggctacttaaggcctccgagccagggctgttcgccgttggggagcacacaggggaacaggcacctccaaacacagattggcgtttctcccaggcacagagacctggcacatctgggtctcagaatggagatgacactgggacctggcctaataaccagttcgataccgagatgttgcaagcgatgatccttgccagcgcttctgaggccgcagatggctcctcaacgctgggcggtggcgcaggaactatgggcttgtccgccaggtatggaccccagtttacactccagcacgtccctgactacagacagaatgtgtatattccgggaagcaatgctactttgaccaacgctgccggtaaacgcgacggcaaggcgccagctgggggtaacggaaataaaaaaaaaagcgggaagaaggaaaaaaaatag

SEQ ID NO: 222828 - DNA, 2260 bp, Artificial Sequence
  derived and/or modified sequence
atggcgaatcggctacagcgcggggaccgcagtcggctgctgctgctgctgtgcattttcctggggacgctgcgggggttccgggccaggcagatccgatattcggtgccagaagagaccgaaaagggctccttcgtgggcaatatctccaaggacctggggctggagccccgggagctggcgaagcgcggagtccgcatcgtctccagagggaagacacagcttttcgctgtgaatccgcgaagcggcagcttgatcacggcaggcaggatagaccgggaggagctctgtgagacggtgtcctcctgttttttaaatatggaacttctcgtggaagacaccttgaagatttacggagtggaggtggaaataatagatattaatgataacgcccccagcttccaggaggacgaagtggagataaaagtcagtgagcacgcaattcctggggcgcgatttgctcttcctaatgctagggatccagatgtgggcgtgaactccctccagagctaccagctcagccctaataattacttttccttgcaactgcggggcagaacggatggggccaagaatccagagctagtactggagggaagcctggaccgagagaaagaggctgctcacctgctcctcctcacagctttagatggaggcgatcccatccgaaagggcgcagttcccattcgtgtggtggtcctcgatgtaaatgatcacatcccaatgtttacacagtccgtatatcgcgtgagtgttccagaaaacatcagctccggaactcgggtgctgatggttaatgcaacggatccagacgagggaatcaacggggaagtaatgtattcatttcggaacatggaaagcaaggcttctgaaatattccaattggattcacaaactggagaagttcaagtacgggggtctctggattttgaaaaatatagattctatgagatggaaattcaaggccaagatggtggaggtctctttaccaccacgacgatgttgatcactgttgtggatgtgaatgataacgctccagaaataactatcacctcttctattaattcaattctggaaaactctcctccaggtacagtgattgctcttctaaatgtgcaagatcaagattctggagaaaatggtcaagtctcctgttttattcctaaccacctgccttttaaattagaaaagacttatggaaattattacaaattgataacaagcagagtgctggacagggagttggtccagagctacaatataacgttgacagccacagaccagggaagcccgcctttgtctgcagaaactcatgtctggctgaatgtggcagatgacaacgataaccctcccgtttttcctcactcctcttactctgcctacattcccgaaaacaaccccaggggtgcctccatcttctcagtgaccgccctcgacccggacagcaaacagaatgccctggtcacttactctctgacggatgacactgtccagggggtgcctctgtcctcctatgtctctattaactccaacactggtgttctctatgccctacaatccttcgactatgagcagtttcgagacttagaactgagagtgatagcacgtgacagcggggacccgcccctcagcagcaacgtgtcgctgagcctgttcgtgctggaccagaacgacaatgcgcccgagatcctgtaccctgccctccccacagacggctccactggcgtggagctggcgccccgctctgcggaacctggctacctggtgaccaaggtggttgcggtggacaaagattcaggccagaacgcctggctgtcctatcgcctgcttaaggccagcgagccgggactcttcgcggtgggggagcacacgggcgagcaagccccgcccaacacggactggcgtttctctcaggcccagagacccggcaccagcggctcccaaaatggcgatgacaccggcacctggcccaacaaccagtttgacacagagatgctgcaagccatgatcttggcgtccgccagtgaagctgctgatgggagctccaccctgggagggggtgccggcaccatgggattgagcgcccgctacggaccccagttcaccctgcagcacgtgcccgactaccgccagaatgtctacatcccaggcagcaatgccacactgaccaacgcagctggcaagcgggatggcaaggccccagcaggtggcaatggcaacaagaagaagtcgggcaagaaggagaagaagtaacatggag

SEQ ID NO: 222829 - DNA, 2253 bp, Artificial Sequence
  derived and/or modified sequence
atggccaacagactgcagagaggcgacagaagcagactgctgctgctgctgtgcatcttcctgggcaccctgagaggcttcagagccagacagatcagatacagcgtgcccgaggagaccgagaagggcagcttcgtgggcaacatcagcaaggacctgggcctggagcccagagagctggccaagagaggcgtgagaatcgtgagcagaggcaagacccagctgttcgccgtgaaccccagaagcggcagcctgatcaccgccggcagaatcgacagagaggagctgtgcgagaccgtgagcagctgcttcctgaacatggagctgctggtggaggacaccctgaagatctacggcgtggaggtggagatcatcgacatcaacgacaacgcccccagcttccaggaggacgaggtggagatcaaggtgagcgagcacgccatccccggcgccagattcgccctgcccaacgccagagaccccgacgtgggcgtgaacagcctgcagagctaccagctgagccccaacaactacttcagcctgcagctgagaggcagaaccgacggcgccaagaaccccgagctggtgctggagggcagcctggacagagagaaggaggccgcccacctgctgctgctgaccgccctggacggcggcgaccccatcagaaagggcgccgtgcccatcagagtggtggtgctggacgtgaacgaccacatccccatgttcacccagagcgtgtacagagtgagcgtgcccgagaacatcagcagcggcaccagagtgctgatggtgaacgccaccgaccccgacgagggcatcaacggcgaggtgatgtacagcttcagaaacatggagagcaaggccagcgagatcttccagctggacagccagaccggcgaggtgcaggtgagaggcagcctggacttcgagaagtacagattctacgagatggagatccagggccaggacggcggcggcctgttcaccaccaccaccatgctgatcaccgtggtggacgtgaacgacaacgcccccgagatcaccatcaccagcagcatcaacagcatcctggagaacagcccccccggcaccgtgatcgccctgctgaacgtgcaggaccaggacagcggcgagaacggccaggtgagctgcttcatccccaaccacctgcccttcaagctggagaagacctacggcaactactacaagctgatcaccagcagagtgctggacagagagctggtgcagagctacaacatcaccctgaccgccaccgaccagggcagcccccccctgagcgccgagacccacgtgtggctgaacgtggccgacgacaacgacaacccccccgtgttcccccacagcagctacagcgcctacatccccgagaacaaccccagaggcgccagcatcttcagcgtgaccgccctggaccccgacagcaagcagaacgccctggtgacctacagcctgaccgacgacaccgtgcagggcgtgcccctgagcagctacgtgagcatcaacagcaacaccggcgtgctgtacgccctgcagagcttcgactacgagcagttcagagacctggagctgagagtgatcgccagagacagcggcgacccccccctgagcagcaacgtgagcctgagcctgttcgtgctggaccagaacgacaacgcccccgagatcctgtaccccgccctgcccaccgacggcagcaccggcgtggagctggcccccagaagcgccgagcccggctacctggtgaccaaggtggtggccgtggacaaggacagcggccagaacgcctggctgagctacagactgctgaaggccagcgagcccggcctgttcgccgtgggcgagcacaccggcgagcaggccccccccaacaccgactggagattcagccaggcccagagacccggcaccagcggcagccagaacggcgacgacaccggcacctggcccaacaaccagttcgacaccgagatgctgcaggccatgatcctggccagcgccagcgaggccgccgacggcagcagcaccctgggcggcggcgccggcaccatgggcctgagcgccagatacggcccccagttcaccctgcagcacgtgcccgactacagacagaacgtgtacatccccggcagcaacgccaccctgaccaacgccgccggcaagagagacggcaaggcccccgccggcggcaacggcaacaagaagaagagcggcaagaaggagaagaagtag

SEQ ID NO: 222830 - DNA, 627 bp, Artificial Sequence
  derived and/or modified sequence
atggacaagaacgaaaacgaggaggccgatctcgacgaacagtcatctaaacgactgtcaatccgcgagcggcggcggccgaaggagcgtcgtcgggggacggggatcaatttttggaccaaggacgaagacgagactgacggcagtgaggaagtgaaggagacatggcacgagcgcctgagtaggcttgaaagcggaggctctaaccccaccactagcgactcgtatggggaccgtgcaagtgcccgagcgagacgcgaagctagggaagctcgtctcgcgactctgacctctcgcgtggaggaagattctaacagggattacaagaagttgtacgagagcgctctgacagagaaccagaagttaaaaacaaaactccaggaggcacagcttgaactcgctgatattaaatcaaagctagagaaggtggcacagcagaagcaagaaaaaacttcagacagatcttccgtgctcgagatggagaaacgcgaaaggagggccttggaaagaaaaatgagtgagatggaagaggagatgaaagttctgacagagctcaagtctgataatcagaggcttaaggacgaaaacggggccctcatccgtgtaattagtaagttatctaagtag

SEQ ID NO: 222831 - DNA, 627 bp, Artificial Sequence
  derived and/or modified sequence
atggacaagaatgaaaatgaggaggccgacctggatgagcagagcagcaagaggctgagcatccgggagaggagaagacccaaggagaggagaagaggcaccggcatcaacttctggaccaaggatgaagatgaaacagatggcagcgaggaggtgaaggagacctggcatgagcggctgagccggctggagagcggcggcagcaaccccaccaccagtgacagctatggagaccgggccagcgcccgggcccggcgggaggcccgggaggcccggctggccaccctgaccagccgggtggaggaggacagcaacagagactacaagaagctgtatgagagcgccctgacagagaaccagaagctgaagaccaagctgcaggaggcccagctggagctggccgacatcaagagcaagctggagaaggtggcccagcagaagcaggagaagaccagtgacaggagctctgtgctggagatggagaagcgggagcggcgggccctggagaggaagatgtctgagatggaggaggagatgaaggtgctgacagagctgaagagtgacaaccagaggctgaaggatgaaaatggagccctgatccgggtcatcagcaagctgagcaagtag

SEQ ID NO: 222832 - DNA, 627 bp, Artificial Sequence
  derived and/or modified sequence
atggacaagaacgagaacgaggaggccgacctggacgagcagagcagcaaacggctgagtatacgggagcgccgtaggcctaaggagaggcggcgcgggacaggcattaatttctggacaaaggatgaggacgagactgatggatccgaggaggtcaaagagacatggcacgaaaggttaagcagacttgaaagcggcgggtcaaaccctaccaccagcgacagctacggagacagagcttcagccagggcccgcagagaggcgcgagaggcgagactagctactcttacatctcgagtcgaagaggatagcaatagggactacaagaagctctacgaatccgccttaactgagaaccagaaactgaaaacaaaactccaggaagcccagcttgagctggctgacataaaatcaaagctggaaaaggtggctcagcagaagcaggaaaaaacaagtgaccgtagctctgtgctggaaatggagaagagggagaggagagcactggaaaggaaaatgtccgagatggaggaggagatgaaggtgctcaccgagctgaagtcagacaaccagcggttaaaggatgaaaatggcgccctgattcgcgtgatctcgaagctgagtaaatag

SEQ ID NO: 222833 - DNA, 627 bp, Artificial Sequence
  derived and/or modified sequence
atggacaagaacgaaaatgaggaggccgacttggacgaacaatcctctaaaaggttaagcatccgggagcggagacgccctaaagagcgccgtcggggaaccggcattaatttttggaccaaagacgaggacgaaaccgacggttcagaagaagtaaaggaaacgtggcatgagcggctgagccgactagaatcggggggaagcaatcctacaacctccgacagttacggagaccgggcaagtgctcgtgccaggcgggaagctcgcgaggcaaggttggccactttaactagccgagttgaagaagactccaacagagattataaaaagctgtacgaatctgccctaactgaaaatcaaaaactcaagacaaagttacaagaagctcaattagaactcgccgacatcaagtccaagctggagaaggtggcacagcagaaacaggagaaaacttccgaccgtagcagcgtgctggagatggagaagcgggagcggcgtgcactggagaggaaaatgagcgagatggaggaagaaatgaaagtattaaccgaattgaagagtgataaccagcggctgaaagatgagaatggggctcttattcgggttataagtaagctgagcaagtag

SEQ ID NO: 222834 - DNA, 627 bp, Artificial Sequence
  derived and/or modified sequence
atggacaagaacgagaacgaggaggccgacctggacgagcagagcagcaagagactgagcatcagagagagaagaagacccaaggagagaagaagaggcaccggcatcaacttctggaccaaggacgaggacgagaccgacggcagcgaggaggtgaaggagacctggcacgagagactgagcagactggagagcggcggcagcaaccccaccaccagcgacagctacggcgacagagccagcgccagagccagaagagaggccagagaggccagactggccaccctgaccagcagagtggaggaggacagcaacagagactacaagaagctgtacgagagcgccctgaccgagaaccagaagctgaagaccaagctgcaggaggcccagctggagctggccgacatcaagagcaagctggagaaggtggcccagcagaagcaggagaagaccagcgacagaagcagcgtgctggagatggagaagagagagagaagagccctggagagaaagatgagcgagatggaggaggagatgaaggtgctgaccgagctgaagagcgacaaccagagactgaaggacgagaacggcgccctgatcagagtgatcagcaagctgagcaagtag

SEQ ID NO: 222835 - protein, 224 aa, Artificial Sequence
  derived and/or modified sequence
MDKNENEEADLDEQSSKRLSIRERRRPKERRRGTGINFWTKDEDETDGSEEVKETWHERLSRLESGGSNPTTSDSYGDRASARARREAREARLATLTSRVEEDSNRDYKKLYESALTENQKLKTKLQEAQLELADIKSKLEKVAQQKQEKTSDRSSVLEMEKRERRALERKMSEMEEEMKNLHQLKQIQTLKQMNEQLQAENRALTRVVARLSESIESSDTQEL

SEQ ID NO: 222836 - DNA, 675 bp, Artificial Sequence
  derived and/or modified sequence
atggacaagaatgagaacgaggaagctgacctggatgaacagagttctaagcggctttccatccgcgaacgccgcaggcccaaggaaagacgaaggggaacgggaattaacttttggactaaagatgaggacgagactgatggatccgaagaggtaaaggaaacttggcatgaacgactttctagactcgagagtgggggctcaaaccctacaacgagcgatagctacggcgatagagcctctgccagggcccgcagagaggcccgggaggctcggctggccaccctgacaagcagggtggaagaggacagcaatagagattacaagaagctgtacgagagtgctctaaccgaaaaccagaagctgaaaacaaaattgcaggaggcccagctggaactggccgatataaagtctaaattggagaaagttgcccagcagaaacaagagaaaactagtgatcggagcagcgttctcgagatggaaaaaagggaaaggcgcgcgctcgaaaggaaaatgtccgaaatggaggaagaaatgaagaacctccaccagctgaagcagatccaaacgctgaaacaaatgaacgaacagcttcaagccgagaacagggctctgactcgtgtggtggcgcggctctccgaatctatcgagtcttcagacacccaggagctctag

SEQ ID NO: 222837 - DNA, 675 bp, Artificial Sequence
  derived and/or modified sequence
atggacaagaatgaaaatgaggaggccgacctggatgagcagagcagcaagaggctgagcatccgggagaggagaagacccaaggagaggagaagaggcaccggcatcaacttctggaccaaggatgaagatgaaacagatggcagcgaggaggtgaaggagacctggcatgagcggctgagccggctggagagcggcggcagcaaccccaccaccagtgacagctatggagaccgggccagcgcccgggcccggcgggaggcccgggaggcccggctggccaccctgaccagccgggtggaggaggacagcaacagagactacaagaagctgtatgagagcgccctgacagagaaccagaagctgaagaccaagctgcaggaggcccagctggagctggccgacatcaagagcaagctggagaaggtggcccagcagaagcaggagaagaccagtgacaggagctctgtgctggagatggagaagcgggagcggcgggccctggagaggaagatgtctgagatggaggaggagatgaagaacctgcaccagctgaagcagatccagaccctgaagcagatgaatgagcagctgcaggctgaaaatagagccctgaccagggtggtggcccggctgtctgagagcattgagagcagtgacacccaggagctgtag

SEQ ID NO: 222838 - DNA, 675 bp, Artificial Sequence
  derived and/or modified sequence
atggacaagaacgagaacgaggaggccgacctggacgagcagagcagcaagaggctgtccattagagagaggcgtcgcccaaaggagcggagaaggggaacagggatcaatttctggaccaaagatgaggacgagactgacggctccgaagaagtgaaggaaacctggcatgagcgactaagccgcctggagtccggcgggagcaatcccacgacttccgattcctatggcgacagggctagcgccagggcaagaagagaagccagggaggcccggctggccaccctcacaagcagggtagaagaggatagcaatagggattacaagaagctctatgaatcagcattaactgagaaccaaaaactgaagacaaaattacaggaggcccagttggagctggccgacattaaatctaaattagagaaggtcgcccagcaaaaacaggagaagacgtctgaccgttcgtcggttctggagatggagaagagggagcggagggcccttgaacgcaagatgtctgagatggaagaagaaatgaagaatctgcatcagctcaaacagattcagacgctcaagcaaatgaacgagcagttgcaagccgagaaccgcgcgcttacaagagtggtggctaggctgtcagaaagcatcgagagttctgatacacaagaattgtag

SEQ ID NO: 222839 - DNA, 675 bp, Artificial Sequence
  derived and/or modified sequence
atggacaagaatgaaaatgaagaggcagacttggatgaacaaagttccaagcggttaagcataagggaaagacggcgtcccaaagagaggagacggggaactggcatcaacttctggacaaaggatgaggatgaaacggacgggagcgaggaggtgaaggaaacctggcacgaacgactgagtcgattagagtctggaggctccaaccctacaacatctgattcttatggggacagggcgagtgctagagcgcgtagggaggcccgtgaagcccgactggctacacttacatcccgcgtggaagaagatagcaaccgcgattacaaaaagctgtacgagagcgccttgactgaaaaccagaaattgaaaactaaactgcaggaggctcaactggaacttgccgacattaaaagcaagctggagaaggttgcacagcaaaagcaggaaaagacatctgatcggagttctgttctcgagatggagaagagggaacgtagagcgctggagcggaagatgagcgagatggaggaggagatgaagaatttgcatcagcttaaacagatccagacgctgaaacagatgaacgagcagctgcaagctgaaaaccgggcattgacccgcgtggtggctaggctgtccgagagtatcgagtcctccgacacccaggagctttag

SEQ ID NO: 222840 - DNA, 675 bp, Artificial Sequence
  derived and/or modified sequence
atggacaagaacgagaacgaggaggccgacctggacgagcagagcagcaagagactgagcatcagagagagaagaagacccaaggagagaagaagaggcaccggcatcaacttctggaccaaggacgaggacgagaccgacggcagcgaggaggtgaaggagacctggcacgagagactgagcagactggagagcggcggcagcaaccccaccaccagcgacagctacggcgacagagccagcgccagagccagaagagaggccagagaggccagactggccaccctgaccagcagagtggaggaggacagcaacagagactacaagaagctgtacgagagcgccctgaccgagaaccagaagctgaagaccaagctgcaggaggcccagctggagctggccgacatcaagagcaagctggagaaggtggcccagcagaagcaggagaagaccagcgacagaagcagcgtgctggagatggagaagagagagagaagagccctggagagaaagatgagcgagatggaggaggagatgaagaacctgcaccagctgaagcagatccagaccctgaagcagatgaacgagcagctgcaggccgagaacagagccctgaccagagtggtggccagactgagcgagagcatcgagagcagcgacacccaggagctgtag

SEQ ID NO: 222841 - protein, 840 aa, Artificial Sequence
  derived and/or modified sequence
MHLVAGDSPGSGPHLPATAFIIPASSATLGLPSSALDVSCFPREPIHVGAPEQVAGCEPVSATVLPQLSAGPASSSTSTVRLLEWTEAAAPPPGGGLRFRISEYKPLNMAGVEQPPSPELRQEGVTEYEDGGAPAGDGEAGPQQAEDHPQNPPEDPNQDPPEDDSTCQCQACGPHQAAGPDLGSSNDGCPQLFQERSVIVENSSGSTSASELLKPMKKRKRREYQSPSEEESEPEAMEKQEEGKDPEGQPTASTPESEEWSSSQPATGEKKECWSWESYLEEQKAITAPVSLFQDSQAVTHNKNGFKLGMKLEGIDPQHPSMYFILTVAEVCGYRLRLHFDGYSECHDFWVNANSPDIHPAGWFEKTGHKLQPPKGYKEEEFSWSQYLRSTRAQAAPKHLFVSQSHSPPPLGFQVGMKLEAVDRMNPSLVCVASVTDVVDSRFLVHFDNWDDTYDYWCDPSSPYIHPVGWCQKQGKPLTPPQDYPDPDNFCWEKYLEETGASAVPTWAFKVRPPHSFLVNMKLEAVDRRNPALIRVASVEDVEDHRIKIHFDGWSHGYDFWIDADHPDIHPAGWCSKTGHPLQPPLGPREPSSASPGGCPPLSYRSLPHTRTSKYSFHHRKCPTPGCDGSGHVTGKFTAHHCLSGCPLAERNQSRLKAELSDSEASARKKNLSGFSPRKKPRHHGRIGRPPKYRKIPQEDFQTLTPDVVHQSLFMSALSAHPDRSLSVCWEQHCKLLPGVAGISASTVAKWTIDEVFGFVQTLTGCEDQARLFKDEARIVRVTHVSGKTLVWTVAQLGDLVCSDHLQEGKGILETGVHSLLCSLPTHLLAKLSFASDSQY

SEQ ID NO: 222842 - protein, 538 aa, Artificial Sequence
  derived and/or modified sequence
QKAITAPVSLFQDSQAVTHNKNGFKLGMKLEGIDPQHPSMYFILTVAEVCGYRLRLHFDGYSECHDFWVNANSPDIHPAGWFEKTGHKLQPPKGYKEEEFSWSQYLRSTRAQAAPKHLFVSQSHSPPPLGFQVGMKLEAVDRMNPSLVCVASVTDVVDSRFLVHFDNWDDTYDYWCDPSSPYIHPVGWCQKQGKPLTPPQDYPDPDNFCWEKYLEETGASAVPTWAFKVRPPHSFLVNMKLEAVDRRNPALIRVASVEDVEDHRIKIHFDGWSHGYDFWIDADHPDIHPAGWCSKTGHPLQPPLGPREPSSASPGGCPPLSYRSLPHTRTSKYSFHHRKCPTPGCDGSGHVTGKFTAHHCLSGCPLAERNQSRLKAELSDSEASARKKNLSGFSPRKKPRHHGRIGRPPKYRKIPQEDFQTLTPDVVHQSLFMSALSAHPDRSLSVCWEQHCKLLPGVAGISASTVAKWTIDEVFGFVQTLTGCEDQARLFKDEMIDGEAFLLLTQADIVKIMSVKLGPALKIYNAILMFKNADDTLK

SEQ ID NO: 222843 - protein, 138 aa, Artificial Sequence
  derived and/or modified sequence
MHLVAGDSPGSGPHLPATAFIIPASSATLGLPSSALDVSCFPREPIHVGAPEQVAGCEPVSATVLPQLSAGPASSSTSTVRLLEWTEAAAPPPGGGLRFRISEYKPLNMAGVEQPPSPELRQEGVTEYEDGGAPAGDG

SEQ ID NO: 222844 - protein, 289 aa, Artificial Sequence
  derived and/or modified sequence
  misc_feature (1)..(1): Xaa can be any naturally occurring amino acid
XTSGSMPTPLTFTLLAGSRRRATSCSLPKSPPPLGFQVGMKLEAVDRMNPSLVCVASVTDVVDSRFLVHFDNWDDTYDYWCDPSSPYIHPVGWCQKQGKPLTPPQDYPDPDNFCWEKYLEETGASAVPTWAFKVRPPHSFLVNMKLEAVDRRNPALIRVASVEDVEDHRIKIHFDGWSHGYDFWIDADHPDIHPAGWCSKTGHPLQPPLGPREPSSASPGGCPPLSYRSLPHTRTSKYSFHHRKCPTPGCDGSGHVTGKFTAHHCLSGCPLAERNQSRLKAELSDSEAS

SEQ ID NO: 222845 - DNA, 2523 bp, Artificial Sequence
  derived and/or modified sequence
atgcatctcgtggcaggagactctccaggttcaggcccacatctgcccgctaccgctttcattattccggcaagctccgcaactcttggtctgccctcctcagcactggacgtgtcttgtttccctagagaaccgattcatgttggagcccccgaacaggtcgcaggttgtgaacctgtttctgctaccgtattaccacaactgtctgccggaccagcgtcctcttcaaccagcacagtgagactgcttgagtggaccgaggccgcggcaccaccacccggcgggggcctgaggttcaggatctcagaatataagccgctaaatatggccggtgtggaacaacctccctccccggagctgagacaggagggtgttaccgagtacgaggacgggggtgcccccgctggcgacggcgaagcagggcctcagcaggcagaggatcacccacagaatccccctgaggatccaaaccaggatccccctgaggatgactccacatgccaatgtcaagcatgtggcccacaccaggcagcggggccagatcttggaagtagcaatgatggttgccctcagttgttccaggagaggtccgtcatagtagaaaatagcagtggctcaacttcagcgagcgaattgctgaaacccatgaagaaacgcaaaaggcgtgaatatcagtcaccttctgaagaagaaagcgagccggaggcaatggaaaagcaggaagagggtaaggacccagaaggtcagcctactgcctccacgcctgagagcgaggaatggtcatcctctcagccagctactggcgagaagaaggaatgctggtcctgggagagctatctggaggagcaaaaggccataacagctcctgttagcctatttcaggactcccaagcggtcactcacaacaaaaatggttttaagcttgggatgaaactggagggtatagacccacagcacccgagcatgtatttcattctgaccgttgccgaggtgtgcggctacaggctgaggttacactttgacggctacagtgaatgtcatgacttctgggtcaatgccaacagtcctgacatccatcccgcaggatggtttgagaaaactgggcacaaattgcagccccctaaaggctacaaggaagaagaattcagctggtcccagtatctgagatctaccagagcccaggctgcacccaaacatctatttgtctctcaatcccactccccaccacccttgggtttccaggtcgggatgaaactggaggcagtggataggatgaaccccagcttggtgtgcgtggcttcagtcacagacgtggttgactcccggtttctggtccacttcgataattgggatgatacttacgattattggtgcgatccatctagcccctatatccatcccgtgggctggtgtcagaagcagggcaagccacttactccgccccaggattacccggaccccgacaatttctgctgggagaaatatctcgaagaaactggggcctccgcggtacctacttgggccttcaaggtgcgcccacctcactcgtttcttgtgaacatgaagttggaagcagtggaccgtagaaatccagcgttgatcagagtcgcttccgtagaagatgttgaggaccacagaattaagattcacttcgatggttggtctcacggctacgacttctggattgacgcggatcacccagatattcatcccgcaggctggtgtagtaagactggtcaccccttgcagccccccttaggcccaagggagccatccagtgcctcccctggggggtgcccacccctttcttacagatcactgcctcatacccggaccagcaagtatagctttcatcatagaaaatgtcccacccctggttgtgacggcagcgggcatgtcaccggcaagttcaccgcccatcattgtctgtctgggtgcccattagcggaacggaatcagtccagactgaaggccgagctcagcgacagcgaagctagtgcacggaaaaagaacctctccggattttcacctcgtaagaagcccagacatcatggcagaatcggacgacccccaaagtataggaaaatccctcaggaagattttcagacactgactcccgacgtcgtccaccagtcgttattcatgtccgccctaagtgctcatcctgatcgctcactatccgtgtgttgggagcagcactgcaagttattgcccggcgtggcaggtatcagcgcaagtacggtcgcgaaatggactatcgacgaggtttttggtttcgtgcagaccttgactggctgcgaggaccaagccaggctattcaaagacgaggcccgcatagtcagggtcacacacgtgagcggaaaaaccttggtctggactgtagcacagctaggggatcttgtttgctctgatcaccttcaggaggggaagggaattttagaaactggcgtgcattccctgctttgtagcctcccaactcatctactggctaagctgagttttgcctccgattcgcagtattag

SEQ ID NO: 222846 - DNA, 1617 bp, Artificial Sequence
  derived and/or modified sequence
cagaaagcaataacagcccccgtgtcattattccaggactcccaggccgtgacgcacaacaagaacggctttaagttaggcatgaaactcgaggggattgaccctcaacacccctcaatgtacttcatacttactgtggccgaagtgtgcggataccgactaaggttgcactttgatggatactccgagtgtcatgatttttgggtgaatgccaattcccccgacattcatcccgctgggtggtttgagaaaactgggcataagttgcaaccccccaagggttacaaggaggaggaattctcctggtcccagtacttgagaagcacccgggcccaggcagcacccaagcacctgtttgtgtcccagtcccatagccctccacctctgggcttccaagtgggaatgaaactggaagcagtcgaccgcatgaacccttctctggtgtgtgtagcctccgtcacggacgtcgtcgacagccggtttctcgtgcacttcgacaattgggatgacacttatgattactggtgcgacccttctagcccttacatccatccggttggatggtgtcagaagcaggggaagcccctcacgccacctcaggactacccggatccagacaatttttgttgggagaaatatcttgaggagacgggggccagtgccgttcccacatgggcttttaaggttcgtcctcctcacagttttcttgttaacatgaaacttgaagccgtcgacagaaggaatccagccctgatcagggtcgcctccgtggaggacgttgaggaccacagaatcaaaatccatttcgatgggtggagccacggctatgacttctggatcgatgccgaccatccagacatacaccccgcgggttggtgctctaagaccggtcaccccctgcagcccccactaggccctagagagcccagttctgcgtcgccaggtggatgcccacccctttcataccggtcccttcctcacaccagaacttccaagtacagcttccatcacagaaagtgccccacacctggctgtgatggatcggggcacgtgactggtaagttcacagcacatcattgcctgtcgggctgcccactggcagagcgaaatcagagccgactgaaggcagaactgagcgacagtgaggccagtgctcggaaaaaaaacctgtctggcttcagtccgcgaaagaaaccccggcaccatggtaggatcggaaggccccccaagtatcgcaagattccacaggaagacttccagactctgaccccagacgttgtgcaccagtcccttttcatgagcgcactgtccgcacatcccgatcgatcattatctgtgtgctgggaacagcactgcaaactgctccccggtgtggccggcatctccgcttcaacagttgcaaaatggacaattgatgaggtgttcggttttgtgcagacgctaacaggctgcgaggatcaggcgagactatttaaggacgaaatgattgacggcgaagcctttttgttgttgactcaggccgatatcgtcaagatcatgagcgtaaaattgggtcccgcgctgaaaatctacaatgctatcctcatgttcaaaaatgcagatgataccctgaagtag

SEQ ID NO: 222847 - DNA, 2523 bp, Artificial Sequence
  derived and/or modified sequence
atgcacctggtcgcaggagattctcctggcagtggaccccacctacccgctacagcttttatcattccagcatcctctgccacactgggcctgccatcatctgcactcgatgtcagttgtttccctcgcgagccaatacatgtgggtgcaccagaacaggttgcaggctgcgagccagtgagcgccaccgtgcttcctcagttgagcgctgggccagcgagctcctctacatctactgttcgcctgctagaatggactgaggccgcggccccaccgccaggaggggggctccgctttagaatttcagaatataagccccttaacatggccggcgttgagcagcctccatcacccgaattgaggcaagagggggtgacggagtatgaggacggaggtgcacccgccggcgacggggaggcagggccacagcaggccgaagaccatcctcagaatcctcccgaggatccgaaccaggaccccccagaggatgactcaacttgccagtgccaagcctgtggaccacaccaagccgcagggcccgatctgggatcttcaaacgacggctgcccgcagctgttccaggagcgctccgttattgtggagaattcgagcggtagcacttctgccagcgaactactgaagcccatgaaaaaacgaaagcgccgcgaatatcagagtccctccgaagaagagagtgagccagaggctatggaaaaacaggaagaaggaaaagaccccgagggccaacctacagcgagtacgcccgaatccgaagagtggagtagctcccagcctgctacgggagagaaaaaggagtgttggtcctgggagtcctacctggaagagcagaaggccattaccgcccccgtgagtctctttcaggattctcaggctgtcacccacaataaaaacggattcaagttgggaatgaagttagaaggtattgatccccagcatccatctatgtactttatcttgacagttgcggaagtctgcggttataggctgcgcctgcatttcgatggttatagcgagtgtcacgacttttgggttaatgccaatagcccagacatacatcctgctggatggttcgaaaaaactggccacaagctgcagccacctaagggatataaggaagaggagtttagctggtctcaatacctgcgctccaccagagcccaagccgcacctaagcacttattcgtgtcccagagtcacagccctcctccactaggtttccaagtaggaatgaagcttgaggcagtagaccgtatgaacccttcacttgtgtgcgttgccagcgtaacggatgttgtggatagtcgatttcttgtccacttcgacaattgggatgacacctatgactattggtgtgatcctagttctccttatatccaccctgtagggtggtgtcagaagcagggcaagcctctgactcccccgcaggactacccggatcccgataatttttgttgggaaaagtacctcgaggagactggcgcaagcgccgtgccaacatgggcctttaaggtacgtcccccccatagcttcctggttaatatgaaactggaggctgtggatcgccgcaatcccgccttgattagagtcgccagcgtcgaggacgttgaggaccataggatcaagattcacttcgatggatggagtcacggctatgacttctggattgatgccgatcaccccgacattcatcccgcaggctggtgttccaagactgggcatcctctccagccccccttaggtcctagagagccaagctccgccagtccaggcggatgtccccccttgagttacagaagtttgccgcacactcgcacaagcaagtactctttccatcaccggaaatgcccaacaccaggctgcgacggtagtggacatgtcacgggcaagttcaccgctcaccactgtctaagcggctgtccactggctgagcgaaaccagtctcgcctcaaagctgaattgtcagattccgaggcctcagctcggaaaaagaatctgtcaggtttcagccccagaaagaagccacggcatcacggccgcattggccgcccccctaagtatcggaaaataccccaggaggatttccagacacttactcccgacgtcgtacaccagagtctcttcatgtctgccctctctgcacaccctgatcggagcctttccgtgtgctgggagcagcattgtaagcttttgccaggagtcgccggtatctcagccagcactgtggcaaaatggactatcgacgaagtgttcggattcgttcagacactgaccggctgcgaagaccaagctcggctttttaaggacgaggccaggatcgttcgggttacccacgtgtcaggcaagacacttgtgtggacagtggctcagctcggggacctggtgtgctccgaccacctccaggaaggcaagggcatccttgagaccggggtccatagtttgttatgcagtctgccaacacacctgctcgcgaagctgagcttcgcgagcgatagtcaatattag

SEQ ID NO: 222848 - DNA, 417 bp, Artificial Sequence
  derived and/or modified sequence
atgcacctcgtagccggagattcccccggtagcggcccgcatctgcccgcgactgctttcataatcccagcgagttcggcaacactcggactgccctcctccgccctcgacgtgtcttgctttccccgggagccgatccatgtgggcgcccccgagcaggtggctgggtgtgagcccgtgtctgcaaccgtgttgccacagctaagcgctgggccagcatcttcctcgacttccacagtgaggctccttgagtggacagaagctgcagccccgccccctggcgggggcctgaggttccgaatctctgagtataaaccactgaatatggctggcgtggaacagccaccaagcccagaacttcgacaggagggtgtgacagagtatgaagatggaggagcccctgcgggagacggatag

SEQ ID NO: 222849 - DNA, 3044 bp, Artificial Sequence
  derived and/or modified sequence
gctaggcgctgggcggccaccggctggccaggcaggggaggtcagcatgcacttggtggccggagacagccccggttctggtcctcacctgcccgcaactgccttcatcattccagccagttcggccaccctcggcctgcccagcagtgccctggatgtgtcttgctttccccgggagccaatccatgtgggtgccccggagcaagtggccggctgcgaaccagtttctgccaccgtcctgccgcagcttagcgccgggccggccagctccagcaccagcacagtgcggcttctggaatggacagaggccgcggccccgcccccagggggcggcctgcggttccggataagcgagtataagccgctgaacatggcgggagtggagcagcccccgagccccgagctgcggcaggaaggcgtgaccgaatacgaagatggcggggccccggcgggagatggcgaggcgggcccccaacaggcggaggaccacccccagaatcctccagaagatcccaatcaggaccccccagaggatgatagcacctgtcagtgccaggcgtgcgggcctcaccaagccgcgggtccagatcttggttcctctaatgatggctgccctcagctgttccaggagcggtcagtcatagtggagaactcctcaggctctaccagcgcttctgagctcctcaaacccatgaagaagaggaagcgcagggaataccagagcccatcagaggaggagtcggagccagaggccatggagaagcaagaagaaggaaaggacccagagggacaacccactgctagcaccccagagagtgaggagtggagcagcagccagcctgcaacaggtgagaagaaggaatgctggtcgtgggagtcctacctagaggagcagaaggccattactgctccagtcagcctcttccaggactcccaggcagtcactcacaacaagaatggcttcaaactgggcatgaagttggaaggcattgaccctcaacacccgtccatgtacttcatcctcaccgtggctgaggtatgtggctatcgcctacgcctgcactttgatgggtattctgagtgccatgacttctgggtcaatgccaactcccctgacattcaccctgctggctggttcgagaagacgggccacaagctgcagcctcccaaaggttacaaggaggaggagttcagctggagccagtacctgcgcagcacaagagctcaggctgcccccaagcacctgtttgtgagccagagccacagtcccccacccctgggcttccaggtgggcatgaagctggaggctgttgaccgcatgaacccgtcccttgtctgcgtggccagtgtgaccgatgtggtggacagccgcttcctggtgcactttgacaactgggatgatacttatgactactggtgtgatcccagcagcccctacatccacccagtgggctggtgccagaagcaaggaaagcccctcacccctccacaagactacccagaccctgataacttctgttgggagaaatatctggaagaaactggggcctctgctgtccccacctgggccttcaaggtgcgaccccctcacagcttcctggtcaatatgaagctggaggctgtggaccgcaggaacccagccctgattcgcgtggccagcgtggaggatgtggaggaccatcggataaagatccactttgatggctggagtcatggctatgatttctggatcgacgctgaccacccagacatccaccctgccggctggtgctccaagacaggacatcccctgcagcctcctctcggacccagagagcccagctctgcctcccctgggggctgtccccctctcagctataggagcctgccccacactaggacctccaaatacagctttcaccaccggaagtgccccactcctggttgcgacggctctggccatgtcacaggcaagttcacagctcaccattgcctctcaggctgcccactggctgagaggaaccagagccggctgaaagcggagctgtctgactcggaggcctcagcccgcaagaagaacctctcaggcttctccccaaggaagaagcctcgccatcacggccgaattggacgccctccgaagtatcgaaagattccgcaggaagatttccagaccctcacgcccgatgtcgtgcaccagtccctcttcatgtcagccctgtcggcccaccctgaccgctcactctcagtgtgctgggagcagcactgcaagctcctgccaggagtagcgggcatctcagcctcgacagtcgccaagtggaccatcgatgaggtcttcggctttgttcagaccctgacaggttgtgaggaccaagcacgcctcttcaaagacgaggcaagaatagtcagagtgacccatgtatctgggaagactctagtctggactgtggcccagcttggggaccttgtgtgctcagatcatcttcaggaaggaaaaggcatcctggagacaggagtccattcactcctctgctctctacccactcatttgcttgccaaacttagctttgccagtgatagtcaatattaaagtgtacttttttcccctttaatccaatatagttgataattaaagtgtattttgaatgacacagatattgtgatttactgcaaggatcctaacacacacttaaaatcaagagccaaggagtagtgagttgtagataaaaaaagaatgtcagctttggagacagtctgggtttaaatcccagttctgtcaatttgagctgtttactgtctctgagcctacatcttcttgtctgtaaaatggagataaaatgggtttaatgaggtctaccttgcagagccattgtgagcattggaaatgatgaatgaatcataccagaacgtctagtataattacagtcatgcattgcttaacgatggggatacattcttagaaatgtgtcactaggcaattctgtcattgtgtaaacattatagaatgtacttacacaaacctagatgttatatgtatttttatttacatgtatattttcacatga

SEQ ID NO: 222850 - DNA, 4322 bp, Artificial Sequence
  derived and/or modified sequence
cagaaggccattactgctccagtcagcctcttccaggactcccaggcagtcactcacaacaagaatggcttcaaactgggcatgaagttggaaggcattgaccctcaacacccgtccatgtacttcatcctcaccgtggctgaggtatgtggctatcgcctacgcctgcactttgatgggtattctgagtgccatgacttctgggtcaatgccaactcccctgacattcaccctgctggctggttcgagaagacgggccacaagctgcagcctcccaaaggttacaaggaggaggagttcagctggagccagtacctgcgcagcacaagagctcaggctgcccccaagcacctgtttgtgagccagagccacagtcccccacccctgggcttccaggtgggcatgaagctggaggctgttgaccgcatgaacccgtcccttgtctgcgtggccagtgtgaccgatgtggtggacagccgcttcctggtgcactttgacaactgggatgatacttatgactactggtgtgatcccagcagcccctacatccacccagtgggctggtgccagaagcaaggaaagcccctcacccctccacaagactacccagaccctgataacttctgttgggagaaatatctggaagaaactggggcctctgctgtccccacctgggccttcaaggtgcgaccccctcacagcttcctggtcaatatgaagctggaggctgtggaccgcaggaacccagccctgattcgcgtggccagcgtggaggatgtggaggaccatcggataaagatccactttgatggctggagtcatggctatgatttctggatcgacgctgaccacccagacatccaccctgccggctggtgctccaagacaggacatcccctgcagcctcctctcggacccagagagcccagctctgcctcccctgggggctgtccccctctcagctataggagcctgccccacactaggacctccaaatacagctttcaccaccggaagtgccccactcctggttgcgacggctctggccatgtcacaggcaagttcacagctcaccattgcctctcaggctgcccactggctgagaggaaccagagccggctgaaagcggagctgtctgactcggaggcctcagcccgcaagaagaacctctcaggcttctccccaaggaagaagcctcgccatcacggccgaattggacgccctccgaagtatcgaaagattccgcaggaagatttccagaccctcacgcccgatgtcgtgcaccagtccctcttcatgtcagccctgtcggcccaccctgaccgctcactctcagtgtgctgggagcagcactgcaagctcctgccaggagtagcgggcatctcagcctcgacagtcgccaagtggaccatcgatgaggtcttcggctttgttcagaccctgacaggttgtgaggaccaagcacgcctcttcaaagacgagatgattgacggcgaggccttccttttgctgacacaggcggacattgtgaagatcatgagcgtcaagctgggcccagccttgaagatctataacgccattctcatgttcaaaaacgctgatgacaccttaaagtgactggcccagggctgggccctcctgcagcccctgcttggcctccctctccagctgatgctttcttcctgacctgaattcctcataccccacacgtccccatgctccacctatatctgaccaggctggtccttcttagagggtgcatgggagctgaggagccctggggagggtaggcacccagccccaagtcctagagctcattcgtcaccaggcatgttggtgagggcgtgactggcaggggcattactcatggagtcagttggactgtggcagcccccacagccccagtggacttttattgtattaccaaagggtctttttcttggcagtggaggagagactagtagagcagcagtccttcaatctgaggcccctttcccttttttggtatctctgtgtacttttctctccttggctcctttcctcctgccaagaagtgaccccaccacaaatgtatttactcctggaggtacctcctctctttctgtctgctggttttgctgccctcattctgctgcttcgtttcctgggcagtgcccccagccagaccccactggctcttccccctgagatatgtgaacctcggaaacatgttttcctaagatcccttggaagtctctagctgcctttctctcttttgcccagaattgagagattttgagccaagatgccttcctgaacttacccagttctggaccagttggcattttagtgtcccacgccaagtccaagtttcagcagaatgagcaggtggtttgagcctgttttatagatggcagaggttgaggttccactgctgttttccatacacccttcatgtgttgagtctgggaaggagtaagcctagcctgccagtagcctaggttaggagaccagcataaggatttgttagacaatctcgggtctttggccagaggggcagctccagcaggcatagtggtgcctgaagttaggaatactgtactctctgtagctttggacctcagccaaggtattgcccatggggtgatggctccaggcctgccaggccttctgccatgagaatgtagcactctgtgtagcacacacccccatgacatcatttaacctgtcccttaaatgttgaccattagctcttgcagcgtcttacaaagacgacttgaagttgggagttaggaaggtgaacttttctatctgaattctccgggtccctgaagccctccttgccgctctccatctgtcttgcactgccagctgggtccctgctggggctctgggacttccacttctcagtccacataggaacccagcttccactgagtcactgccaaacctgcctcccagcctgggtgggaagggggagagccactggtaggagccagccccacatggaggtgaggagccactgccaacctcccgtgtccaggtgctgatgtgggcctgcggagtgtggggctggtgccttcacccagaccccttcaatcatgtgatgtgtgtgtgtgtgcatgtgtgtgtgtgtgtgtgtgtgtggcactctcagaagtgtttgacagggtgcagatgtgaggcttagtgttgggaaaatgccaagggctattatcattaaaatttgaagctttatttttcccttagaagtgggaaacccagagctctgttgatttcctaccacaacccagtaggggcctctctctgccatgggctggacagctttttgaggaagccattcagctcccacagttgagctcccacagggctttaggtgtccattccctctcaactgcttagaggcagctttgagcacagccttcctggaaggaagctaggcaagacctgccacacagcgaaggttgggtttacaagggtgacattggtacccccttggccaagagtaaagaagaacaagtctaagccttgcttttatcttagttgtctgggtggtagcagaactcatcagctccttatcctcagtctgttcctctataaaagatgagagatgttcactgactttgtgcagtgagaaggcagcaagtactcacggctggtgctgtgggacctcacagcttctaaggagaggggctgggagggcctttgccatcagatctgccaagcacctaatgcttgcctgtggtgaaggcaagatggaccaagggccttggagaaaagggctcccaggcttctgaactttgaggcctcagcactttctgcattatcgtcaaactctttggaaagaaaccaaatcattaaaaagtagaaagaaatctgcctcttgtctgccctactgcccctttacccccactctgtccccaaatgatattattgcaccttgacctgggagcgcagagaggggagggagttggcagagacttctggtgccctctgccctcctagcaacagatgccacttatattttggcccctggcagcctcgcccagcccctgatcagcccaggcctagggcagttaggacctttctgtttattttctgaagcagagagaatgatctcagagtttgcaaatgaagccttttttgcactttcattcacatgcactttggtggggttacatttttgtacttgcctcttgtgtgtgcacatgtgtgtatgtgttctttaagagaatcttctggcttaagctaaggtgactcttgaaggagaaaaagttacaaacaaaatgtggtgtgatctgtcagtgtatcaaaacaacataaataaacttgaacaactgata

SEQ ID NO: 222851 - DNA, 3157 bp, Artificial Sequence
  derived and/or modified sequence
gcaggcgcgcggcgcccggctcggaccgtagctaggcgctgggcggccaccggctggccaggcaggcctgccaggatggaggggcatgctgggatggaggggcatgctgaaatggagatgctgaggacactgaaggggccttccacaggggaggtcagcatgcacttggtggccggagacagccccggttctggtcctcacctgcccgcaactgccttcatcattccagccagttcggccaccctcggcctgcccagcagtgccctggatgtgtcttgctttccccgggagccaatccatgtgggtgccccggagcaagtggccggctgcgaaccagtttctgccaccgtcctgccgcagcttagcgccgggccggccagctccagcaccagcacagtgcggcttctggaatggacagaggccgcggccccgcccccagggggcggcctgcggttccggataagcgagtataagccgctgaacatggcgggagtggagcagcccccgagccccgagctgcggcaggaaggcgtgaccgaatacgaagatggcggggccccggcgggagatggcgaggcgggcccccaacaggcggaggaccacccccagaatcctccagaagatcccaatcaggaccccccagaggatgatagcacctgtcagtgccaggcgtgcgggcctcaccaagccgcgggtccagatcttggttcctctaatgatggctgccctcagctgttccaggagcggtcagtcatagtggagaactcctcaggctctaccagcgcttctgagctcctcaaacccatgaagaagaggaagcgcagggaataccagagcccatcagaggaggagtcggagccagaggccatggagaagcaagaagaaggaaaggacccagagggacaacccactgctagcaccccagagagtgaggagtggagcagcagccagcctgcaacaggtgagaagaaggaatgctggtcgtgggagtcctacctagaggagcagaaggccattactgctccagtcagcctcttccaggactcccaggcagtcactcacaacaagaatggcttcaaactgggcatgaagttggaaggcattgaccctcaacacccgtccatgtacttcatcctcaccgtggctgaggtatgtggctatcgcctacgcctgcactttgatgggtattctgagtgccatgacttctgggtcaatgccaactcccctgacattcaccctgctggctggttcgagaagacgggccacaagctgcagcctcccaaaggttacaaggaggaggagttcagctggagccagtacctgcgcagcacaagagctcaggctgcccccaagcacctgtttgtgagccagagccacagtcccccacccctgggcttccaggtgggcatgaagctggaggctgttgaccgcatgaacccgtcccttgtctgcgtggccagtgtgaccgatgtggtggacagccgcttcctggtgcactttgacaactgggatgatacttatgactactggtgtgatcccagcagcccctacatccacccagtgggctggtgccagaagcaaggaaagcccctcacccctccacaagactacccagaccctgataacttctgttgggagaaatatctggaagaaactggggcctctgctgtccccacctgggccttcaaggtgcgaccccctcacagcttcctggtcaatatgaagctggaggctgtggaccgcaggaacccagccctgattcgcgtggccagcgtggaggatgtggaggaccatcggataaagatccactttgatggctggagtcatggctatgatttctggatcgacgctgaccacccagacatccaccctgccggctggtgctccaagacaggacatcccctgcagcctcctctcggacccagagagcccagctctgcctcccctgggggctgtccccctctcagctataggagcctgccccacactaggacctccaaatacagctttcaccaccggaagtgccccactcctggttgcgacggctctggccatgtcacaggcaagttcacagctcaccattgcctctcaggctgcccactggctgagaggaaccagagccggctgaaagcggagctgtctgactcggaggcctcagcccgcaagaagaacctctcaggcttctccccaaggaagaagcctcgccatcacggccgaattggacgccctccgaagtatcgaaagattccgcaggaagatttccagaccctcacgcccgatgtcgtgcaccagtccctcttcatgtcagccctgtcggcccaccctgaccgctcactctcagtgtgctgggagcagcactgcaagctcctgccaggagtagcgggcatctcagcctcgacagtcgccaagtggaccatcgatgaggtcttcggctttgttcagaccctgacaggttgtgaggaccaagcacgcctcttcaaagacgaggcaagaatagtcagagtgacccatgtatctgggaagactctagtctggactgtggcccagcttggggaccttgtgtgctcagatcatcttcaggaaggaaaaggcatcctggagacaggagtccattcactcctctgctctctacccactcatttgcttgccaaacttagctttgccagtgatagtcaatattaaagtgtacttttttcccctttaatccaatatagttgataattaaagtgtattttgaatgacacagatattgtgatttactgcaaggatcctaacacacacttaaaatcaagagccaaggagtagtgagttgtagataaaaaaagaatgtcagctttggagacagtctgggtttaaatcccagttctgtcaatttgagctgtttactgtctctgagcctacatcttcttgtctgtaaaatggagataaaatgggtttaatgaggtctaccttgcagagccattgtgagcattggaaatgatgaatgaatcataccagaacgtctagtataattacagtcatgcattgcttaacgatggggatacattcttagaaatgtgtcactaggcaattctgtcattgtgtaaacattatagaatgtacttacacaaacctagatgttatatgtatttttatttacatgtatattttcacatga

SEQ ID NO: 222852 - DNA, 573 bp, Artificial Sequence
  derived and/or modified sequence
gcaggcgcgcggcgcccggctcggaccgtagctaggcgctgggcggccaccggctggccaggcagccagttcggccaccctcggcctgcccagcagtgccctggatgtgtcttgctttccccgggagccaatccatgtgggtgccccggagcaagtggccggctgcgaaccagtttctgccaccgtcctgccgcagcttagcgccgggccggccagctccagcaccagcacagtgcggcttctggaatggacagaggccgcggccccgcccccagggggcggcctgcggttccggataagcgagtataagccgctgaacatggcgggagtggagcagcccccgagccccgagctgcggcaggaaggcgtgaccgaatacgaagatggcggggccccggcgggagatggcgaggcgggcccccaacaggcggaggaccacccccagaatcctccagaagatcccaatcaggaccccccagaggatgatagcacctgtcagtgccaggcgtgcgggcctcaccaagccgcgggtccagatcttggttcctctaatgatggctgccctcagctgtt

SEQ ID NO: 222853 - DNA, 460 bp, Artificial Sequence
  derived and/or modified sequence
gctaggcgctgggcggccaccggctggccaggcaggggaggtcagcatgcacttggtggccggagacagccccggttctggtcctcacctgcccgcaactgccttcatcattccagccagttcggccaccctcggcctgcccagcagtgccctggatgtgtcttgctttccccgggagccaatccatgtgggtgccccggagcaagtggccggctgcgaaccagtttctgccaccgtcctgccgcagcttagcgccgggccggccagctccagcaccagcacagtgcggcttctggaatggacagaggccgcggccccgcccccagggggcggcctgcggttccggataagcgagtataagccgctgaacatggcgggagtggagcagcccccgagccccgagctgcggcaggaaggcgtgaccgaatacgaagatggcggggccccggcgggagatggc

SEQ ID NO: 222854 - DNA, 2523 bp, Artificial Sequence
  derived and/or modified sequence
atgcacctggtggccggggacagccctggcagcggcccccacctgcctgccacagccttcatcatcccagccagcagcgccaccctgggcctgcccagcagcgccctggatgtgtcctgcttcccccgggagcccatccacgtgggcgcccctgagcaggtggccggctgtgagcctgtgtctgccaccgtgctgccccagctgtctgctggccctgccagcagcagcaccagcacagtgcggctgctggagtggacagaggccgccgcccctcctcctgggggcggcctgcgcttccgcatcagcgagtacaagcccctgaacatggccggcgtggagcagccccccagccctgagctgcggcaggagggcgtgacagaatatgaagatggaggagccccagctggagatggagaggccggcccccagcaggccgaggaccacccccagaaccccccagaggaccccaaccaggaccccccagaagatgacagcacctgccagtgccaggcctgtggcccccaccaggccgccggccctgacctgggcagcagcaatgatggctgcccccagctgttccaggagaggtctgtgattgtggagaacagcagcggcagcaccagcgccagcgagctgctgaagcccatgaagaagaggaagagaagagagtaccagagccccagcgaggaggagagcgagcctgaggccatggagaagcaggaggagggcaaggaccctgagggccagcccacagccagcaccccagagagcgaggagtggagcagcagccagcctgccactggagagaagaaggagtgctggagctgggagagctacctggaggagcagaaggccatcacagcccctgtgtccctcttccaggacagccaggccgtgacccacaacaagaatggcttcaagctgggcatgaagctggagggcatcgacccccagcaccccagcatgtacttcatcctgactgtggccgaggtgtgtggctaccgcctgcggctgcactttgatggctacagtgaatgtcatgacttctgggtgaatgccaacagcccagacatccaccctgctggctggtttgagaagacaggccacaagctgcagccccccaagggctacaaggaggaggagttctcctggagccagtacctgcggagcacccgggcccaggccgcccccaagcacctgtttgtgtcccagagccacagccccccacccctgggcttccaggtgggcatgaagctggaggccgtggacaggatgaaccccagcctggtgtgtgtggcctctgtgacagatgtggtggacagccgcttcctggtgcactttgacaactgggatgacacctatgactactggtgtgaccccagcagcccctacatccaccctgtgggctggtgccagaagcagggcaagcccctgaccccaccccaggactacccagaccctgacaacttctgctgggagaagtacctggaggagactggagccagcgctgtgcccacctgggccttcaaggtgcggcccccccacagcttcctggtgaacatgaagctggaggccgtggacagaagaaatcctgccctgatccgggtggcctctgtggaggatgtggaggaccaccgcatcaagatccactttgatggctggagccacggctatgacttctggattgatgctgaccacccagacatccaccctgctggctggtgcagcaagacaggccaccccctgcagccccccctgggcccccgggagcccagcagcgccagccctgggggctgcccccccctgagctaccgcagcctgccccacaccaggaccagcaagtacagcttccaccacaggaaatgtcccaccccaggctgtgatggcagcggccacgtgacaggcaagttcaccgcccaccactgcctgagcggctgccccctggccgagaggaaccagagccggctgaaggccgagctgagtgacagcgaggccagcgccaggaagaagaacctgagcggcttcagccccaggaagaagcccaggcaccacggcagaattggccggccccccaagtacaggaagatcccccaggaggacttccagaccctgaccccagatgtggtgcaccagagcctcttcatgtctgccctgagcgcccacccagacaggagcctgtctgtgtgctgggagcagcactgcaagctgctgcccggggtggccggcatcagcgccagcacagtggccaagtggaccattgatgaggtgtttggatttgtgcagaccctgaccggctgtgaggaccaggcccggctcttcaaggatgaggccagaattgtgcgggtgacccacgtgtctgggaagaccctggtgtggacagtggcccagctgggggacctggtgtgcagcgaccacctgcaggagggcaagggcatcctggagactggagtgcacagcctgctgtgcagcctgcccacccacctgctggccaagctgagctttgccagtgacagccagtactag

SEQ ID NO: 222855 - DNA, 1617 bp, Artificial Sequence
  derived and/or modified sequence
cagaaggccatcacagcccctgtgtccctcttccaggacagccaggccgtgacccacaacaagaatggcttcaagctgggcatgaagctggagggcatcgacccccagcaccccagcatgtacttcatcctgactgtggccgaggtgtgtggctaccgcctgcggctgcactttgatggctacagtgaatgtcatgacttctgggtgaatgccaacagcccagacatccaccctgctggctggtttgagaagacaggccacaagctgcagccccccaagggctacaaggaggaggagttctcctggagccagtacctgcggagcacccgggcccaggccgcccccaagcacctgtttgtgtcccagagccacagccccccacccctgggcttccaggtgggcatgaagctggaggccgtggacaggatgaaccccagcctggtgtgtgtggcctctgtgacagatgtggtggacagccgcttcctggtgcactttgacaactgggatgacacctatgactactggtgtgaccccagcagcccctacatccaccctgtgggctggtgccagaagcagggcaagcccctgaccccaccccaggactacccagaccctgacaacttctgctgggagaagtacctggaggagactggagccagcgctgtgcccacctgggccttcaaggtgcggcccccccacagcttcctggtgaacatgaagctggaggccgtggacagaagaaatcctgccctgatccgggtggcctctgtggaggatgtggaggaccaccgcatcaagatccactttgatggctggagccacggctatgacttctggattgatgctgaccacccagacatccaccctgctggctggtgcagcaagacaggccaccccctgcagccccccctgggcccccgggagcccagcagcgccagccctgggggctgcccccccctgagctaccgcagcctgccccacaccaggaccagcaagtacagcttccaccacaggaaatgtcccaccccaggctgtgatggcagcggccacgtgacaggcaagttcaccgcccaccactgcctgagcggctgccccctggccgagaggaaccagagccggctgaaggccgagctgagtgacagcgaggccagcgccaggaagaagaacctgagcggcttcagccccaggaagaagcccaggcaccacggcagaattggccggccccccaagtacaggaagatcccccaggaggacttccagaccctgaccccagatgtggtgcaccagagcctcttcatgtctgccctgagcgcccacccagacaggagcctgtctgtgtgctgggagcagcactgcaagctgctgcccggggtggccggcatcagcgccagcacagtggccaagtggaccattgatgaggtgtttggatttgtgcagaccctgaccggctgtgaggaccaggcccggctcttcaaggatgagatgattgatggagaggccttcctgctgctgacccaggccgacatcgtgaagatcatgtctgtgaagctgggccctgccctgaagatctacaatgccatcctgatgttcaagaatgctgatgacaccctgaagtag

SEQ ID NO: 222856 - DNA, 417 bp, Artificial Sequence
  derived and/or modified sequence
atgcacctggtggccggggacagccctggcagcggcccccacctgcctgccacagccttcatcatcccagccagcagcgccaccctgggcctgcccagcagcgccctggatgtgtcctgcttcccccgggagcccatccacgtgggcgcccctgagcaggtggccggctgtgagcctgtgtctgccaccgtgctgccccagctgtctgctggccctgccagcagcagcaccagcacagtgcggctgctggagtggacagaggccgccgcccctcctcctgggggcggcctgcgcttccgcatcagcgagtacaagcccctgaacatggccggcgtggagcagccccccagccctgagctgcggcaggagggcgtgacagaatatgaagatggaggagccccagctggagatggatag

SEQ ID NO: 222857 - DNA, 2523 bp, Artificial Sequence
  derived and/or modified sequence
atgcacctggtggccggcgacagccccggcagcggcccccacctgcctgctaccgccttcataatcccggcaagctccgccactctgggactgccctcttctgccctcgacgttagctgttttcctcgcgagcctatacacgtcggagctcctgaacaagttgcgggctgcgagcctgttagtgcaactgttctgccacagctcagcgcgggcccagcaagcagcagtacaagtactgtgcgactgttggaatggacggaagcagccgcgccgcctcccggaggcggcctgaggtttagaatttccgaatacaaaccactaaatatggctggcgtggagcagcctcctagcccagagctgcgtcaggagggcgtgaccgaatatgaggacggaggggcacctgccggggacggagaggctggcccacagcaggctgaggatcaccctcagaatcctcctgaggaccctaatcaagaccccccagaggacgattcaacgtgtcagtgtcaagcttgcggcccacaccaggcagctggacccgacttggggtcaagtaacgacggatgcccgcaattgtttcaggaacgttctgtcattgtggaaaactcttccggctccacgagcgccagtgaactcctcaagcccatgaagaagcgcaagcgacgggaatatcagagcccgtctgaggaagaatcggaacctgaagccatggaaaagcaggaggaaggcaaggatccggaggggcagcccactgcttccaccccggaaagcgaggaatggagctcttctcagcctgccacaggcgagaaaaaggagtgctggagttgggaatcctacttggaggagcagaaagccattaccgctcctgtctcattgttccaggatagccaggccgtgactcacaataaaaacggtttcaagctggggatgaagttggaagggatcgacccacagcatccaagtatgtactttatcttgacggtggccgaagtgtgcggatatcgacttcgtctccacttcgacggctattccgagtgtcacgacttctgggtgaatgctaactcacctgatatacaccccgctgggtggttcgaaaaaacaggtcataagctacagcctcccaaggggtataaggaagaagagttttcatggtcccaatatctgcggtctaccagggctcaggctgcacccaaacatctgtttgtttcccagagccacagcccccctccgctgggttttcaggttggcatgaaactggaggccgtggatcgtatgaatcccagcctggtgtgcgtggcatctgtaaccgacgtcgttgatagtcggtttctggtgcacttcgacaattgggacgacacatatgactattggtgtgaccctagctctccgtacattcatcctgtcggctggtgtcaaaaacagggaaagcctttgacaccgccccaggattaccccgaccctgacaacttctgttgggagaaatatttggaggaaacaggggccagcgcagtccctacttgggccttcaaggttcgcccgcctcacagctttttagttaatatgaaacttgaggcggtagatcggaggaaccctgccctgatccgtgtggccagcgtggaggacgtggaagaccataggattaagatccactttgacggctggagccacggatacgatttttggatcgacgccgaccatccagacatccaccccgccggatggtgtagcaaaacaggccaccccctgcagccaccgttagggcctagagaaccctcttccgcatcccccggtggctgtccaccactctcttatcgcagtcttccgcatacaagaacctccaaatatagcttccaccaccgaaaatgtccaacacctggctgtgacggctctggccatgttactgggaaattcacagctcatcattgtctgtccgggtgtcccttggctgagaggaatcaatctcggctaaaagcagagctgagcgattctgaagcatctgctcggaaaaagaatctgtcgggcttctcaccccgcaaaaagcccagacaccatggccgcatcgggcggccgcccaagtacaggaaaataccacaggaggacttccagacactgacacctgacgtagtgcaccagtctctattcatgtcagccctgagcgcccaccccgaccggtctctcagtgtttgctgggaacagcattgtaagcttttgcccggcgtggctggcataagtgcttctacagtcgctaaatggacgatcgacgaggtgttcgggtttgttcagactctgactggctgcgaagaccaggcacggctctttaaggatgaggctcgtatcgtgagagtcactcacgtcagcggcaagactctcgtttggacagtcgcccagctcggggatcttgtttgctctgatcatctgcaggaaggcaagggcatccttgagaccggagtccactcactgctatgttctctcccgacacatttacttgcaaaattgtcattcgcctccgacagccagtattag

SEQ ID NO: 222858 - DNA, 1617 bp, Artificial Sequence
  derived and/or modified sequence
cagaaggccatcaccgcccccgtgagcctgttccaggacagccaggccgtgacccacaataagaacgggttcaaattgggcatgaagctggaggggatcgaccctcaacatcccagcatgtatttcattctgactgttgctgaagtgtgcgggtacaggctgcggctacatttcgatgggtacagcgagtgtcacgacttctgggtgaacgctaactccccagatatccacccagctgggtggttcgaaaaaacaggtcacaaactgcagcctcctaagggctataaggaggaagagttcagttggagtcagtatctgagatccactagagcccaagccgctccaaagcatctattcgtttcacagtcgcactccccaccacccctgggattccaggtggggatgaagttggaggcagtggacaggatgaaccccagtcttgtatgcgtggcttccgtcactgacgtagtggactctcgattcctggtgcactttgacaattgggatgacacatatgattactggtgtgacccctcctccccgtatattcatccagtgggctggtgccagaaacaaggcaagccactgacccccccccaggattaccctgaccccgataacttttgttgggaaaagtacctggaggagactggcgccagcgcggtcccaacttgggcctttaaggtgcgcccaccccattcatttctggtgaatatgaaactcgaggcagtcgatcggcggaatcccgcactgatccgcgttgccagtgtcgaggatgtggaggatcatcgaatcaagatacatttcgacgggtggtcccacggctacgatttctggattgatgcggatcatccagatattcacccagccggctggtgctccaaaacagggcacccgctccagcctccattgggccctagggagcccagtagcgcgtctccagggggctgtcccccactgagttacagatccctgccacacaccagaacaagtaagtactctttccatcaccgtaagtgtccaacccccgggtgcgacggtagcggtcacgtgaccggaaaatttaccgcccaccactgcctcagtggttgtccattggcagagcgcaatcagtcgaggcttaaagcagaattgagtgattcagaagcgagcgccaggaagaagaacctgtctgggttttcgccccggaagaagccacgccatcacggtagaattggacgccctcccaagtaccgcaagattccacaggaggactttcagaccctcacccccgacgtggtgcaccagtccctgttcatgagcgccctgtccgcccacccagacaggtccctttcagtgtgctgggaacaacattgtaagctgctgcccggcgtggcaggcatctccgcctctacagttgcgaagtggacaatagatgaggtgtttggcttcgtgcaaacactaacggggtgcgaagaccaagcaagactattcaaagacgagatgattgacggcgaagcttttctgctcctgacacaggccgacattgtgaaaatcatgagcgtgaaactcggccccgccctgaaaatttataatgcgatcctgatgttcaaaaatgcagatgatacactgaaatag

SEQ ID NO: 222859 - DNA, 2523 bp, Artificial Sequence
  derived and/or modified sequence
atgcacctggtggccggcgacagccccggcagcggcccccacctgcctgctaccgcgtttatcatccctgcctcaagtgccaccctcgggctgccgtctagtgccctcgacgtatcctgttttcctagggagcccatccatgttggcgctccggaacaagtagccggatgcgagcctgtgagcgccaccgttctgcctcagttgtctgccgggccagcctctagttcaacgagcaccgtgcggctgctggaatggaccgaagctgcagccccacccccaggtggtggtctgaggttccgaatctctgaatacaaacctttgaatatggcgggtgtagaacagccaccttctcccgaactgaggcaggagggcgtgaccgagtacgaggatggaggagctccagccggagacggcgaagctggaccccagcaagcagaagaccaccctcaaaatccaccagaagacccaaaccaggaccctcccgaagatgacagcacatgtcaatgccaggcctgtggaccccaccaggctgccgggcctgaccttggctcaagcaatgacggctgtccacaattatttcaggagcggtctgtgatcgtcgagaacagttctggctccacctcagcttcagaactgttgaagcccatgaagaagaggaaacgaagagaataccagtctccttctgaggaagaatctgaaccagaggccatggaaaaacaggaggagggtaaggacccagagggccagccaaccgcctctactccggaaagcgaagaatggtcttcttcccagcctgcgactggcgagaagaaggagtgctggtcatgggaatcgtacctggaagagcagaaagccatcacggctccagtttctttgtttcaggattctcaggccgtgacacataacaaaaacgggtttaaattgggtatgaagctggaggggatcgacccacagcacccgtcaatgtactttatcttaaccgtggcggaagtctgcggctaccgcctcagactacacttcgacggctacagcgaatgtcacgacttctgggttaacgctaactccccagatatccaccctgccgggtggtttgagaagactgggcacaagctccagccccctaagggctacaaagaagaggaattctcttggtcgcagtatcttcggtcaaccagagcgcaggcagctcctaagcatttgtttgtgagtcaaagccacagtcctcccccgttgggattccaggtcggaatgaaactggaggcagtcgaccgcatgaatccctctctggtgtgtgtagcatctgtcaccgatgtggtggactctaggttcctggtgcattttgacaattgggacgacacctatgactattggtgcgatccatcctctccatatatccacccggtcggatggtgtcagaaacaggggaagcccctcacaccacctcaggattacccagaccctgacaatttttgttgggagaagtatttggaggaaacaggcgccagcgcggtgcccacctgggcctttaaagtgcgccctcctcatagctttctcgtgaacatgaaacttgaggctgtcgataggcgcaatcccgcactgatccgggtggcctcagtggaggatgtggaggaccacaggataaaaattcattttgatggttggtctcacggctacgacttctggatcgacgccgatcacccagacatccaccccgcgggttggtgctctaagaccgggcaccctttacagccgccgctgggacctcgcgaaccctcctccgcctctcccggaggctgcccccctcttagctacagatccctgcctcacacaagaacgtctaaatattccttccaccacagaaagtgtcccactcccggttgtgacggatcaggtcacgtaactggtaaattcactgcgcaccactgtctgtcaggatgtcctctggcggaacgaaatcagtctcggttgaaggctgaactctctgactccgaagcttctgcccggaaaaaaaacttgtcaggtttttccccacgtaaaaagccgaggcatcacggcaggattgggagaccacccaagtatcgaaagattccacaagaggactttcaaacgctgacacccgacgtggtgcaccaatcgctcttcatgtcagccctgtctgcacacccggacagatccctctcagtgtgttgggagcagcactgcaagttgctgcctggtgtggccggaattagcgccagtacggtggctaagtggactatcgacgaagtctttgggtttgtacagacgctcacaggctgcgaagaccaggcaaggctcttcaaagatgaagccagaatcgtcagagtaacacatgtatcgggaaaaactctggtttggacagtcgcgcagctcggggacctggtgtgcagcgatcatctccaggaagggaaagggatactggagacaggcgtgcattctctgctgtgctctcttcctacacacctcctcgccaagcttagctttgccagcgattcccagtattag

SEQ ID NO: 222860 - DNA, 417 bp, Artificial Sequence
  derived and/or modified sequence
atgcacctggtggccggcgacagccccggcagcggcccccacctgccagccaccgcctttattatccccgcaagttcggccacgctgggtctaccgtccagcgctttggacgtgtcctgttttccccgcgaacccatccatgtgggagctcctgagcaggtggccggctgtgaacctgttagcgcgactgtcctgccacagcttagtgccggtcccgctagttctagtacatccacagtgaggcttttggagtggacggaagcggccgccccaccaccgggagggggcctgcgattccgtatttccgagtataagccccttaatatggccggcgttgaacagcctcctagccctgaattgaggcaggagggcgttaccgaatacgaggatggcggtgcccctgcaggagatggttag

SEQ ID NO: 222861 - DNA, 2523 bp, Artificial Sequence
  derived and/or modified sequence
atgcacctcgtcgcgggagactctcccggtagcggtccccatctccctgctacagctttcataatcccagcttcatctgccacattgggccttccatcgtccgcgctggatgtttcttgctttccccgagagcccatccacgtcggcgcacccgagcaggtggctgggtgtgaaccagtgtccgccaccgtgctgccccagctttccgccggtcctgcttcttcctcaacctcgaccgtgcgcctattggaatggacagaagccgcagcacccccaccagggggaggcctgcggtttcggatatctgagtataagccactgaatatggccggagtggagcaacccccatcacccgagttgcggcaggagggcgttaccgaatatgaagacggaggcgctcctgccggtgacggagaagcaggaccacagcaagctgaggaccaccctcagaaccccccagaggatccaaaccaggaccctcctgaggatgattccacatgccagtgccaggcctgcggaccccatcaggccgcaggcccagatctgggatcttccaatgacgggtgcccacagctcttccaggaaaggtcggtaatcgtagaaaatagcagcggctccaccagcgcctcggagctgctcaaacctatgaaaaagcgtaagcgtcgcgagtaccagtcacccagtgaggaagagagtgagccagaggccatggagaaacaggaggagggcaaggacccagaaggccagcccaccgccagcactccggaatccgaagaatggagcagctctcaaccagccaccggggaaaagaaagaatgttggagctgggagtcctatctcgaagagcagaaggctattacagctcctgtatctctatttcaggacagccaggccgtcactcataacaagaacgggtttaagctcggcatgaaactagagggtatcgatcctcagcacccgtcaatgtactttatcttaactgtcgcggaagtgtgcggctataggctccggcttcactttgacgggtattctgaatgtcacgatttctgggtgaatgcgaatagccctgatatacatcctgccggttggttcgaaaaaaccggtcataagttacagccacccaaggggtataaggaggaagagttcagttggagccagtacctgcgctctacacgggcacaagctgctccaaaacacctgttcgtttctcagtcccactcacctcctcctttggggttccaagttggcatgaaactcgaggccgtggatcggatgaacccctctctcgtgtgtgtggcatcagtgacggacgttgtggattcaaggttcctggtccacttcgacaattgggacgacacatacgattattggtgcgatccctcctccccttatatccaccccgtcggctggtgccagaagcagggtaaacccttaaccccccctcaggactatcccgacccagacaacttctgttgggagaaatatctcgaggaaaccggagcctctgcagtcccaacctgggcgttcaaggtgcgccctccccattcttttcttgttaacatgaaactggaggccgtggacaggagaaacccggcactcatccgtgttgcaagtgttgaagacgtcgaagaccatagaatcaaaatccatttcgatggctggtcccacgggtacgacttctggatcgatgccgaccaccctgatatacacccagcgggttggtgttccaaaacaggccatcccctgcagccgccactgggacctcgcgaaccatctagcgcaagtcctgggggttgtcctcctctttcttacaggagcttaccccatacccggactagcaagtattcatttcaccaccgaaagtgccccactccaggatgcgatgggtcaggccatgttaccggaaagtttactgctcatcactgcctgagcggatgcccactggccgagaggaatcagtccagactgaaagctgagttgagcgattccgaggcttcagcccgaaagaagaacctgtctggtttctcgcctaggaagaagccccgtcatcatggtaggatcggccgtcccccaaaataccggaagatccctcaggaggatttccagacactgactccggacgtcgtccatcagagcctatttatgtccgccctgagtgcccacccagaccgctcactatctgtctgttgggagcagcattgcaaactgctgcctggcgtcgccggtatttccgccagcaccgtggctaagtggaccatcgacgaagtgtttggtttcgtgcagactctgaccgggtgtgaagatcaggccagactttttaaagatgaggcccgtatcgtccgggttacccacgtaagcggcaaaaccctggtttggaccgtggcccagctaggtgatctagtctgttctgaccatctccaggagggtaaaggaattctagaaaccggcgtgcacagtctcctttgctccctgcctacgcacttactcgctaagctgagcttcgccagtgactctcagtattag

SEQ ID NO: 222862 - DNA, 1617 bp, Artificial Sequence
  derived and/or modified sequence
caaaaggctataacagctcctgtttcactttttcaggactcgcaggccgtgacgcacaataagaatggatttaagctgggaatgaaacttgagggaatcgacccacagcatccaagtatgtattttattctgaccgtcgcggaggtatgtggatacagactgcggttgcattttgatggatattccgagtgtcacgacttttgggtcaacgcaaatagtccagatattcacccggcaggatggtttgagaaaactggacacaaattgcaacctcccaagggatataaagaggaggagttttcctggtcccagtatctcagaagcacccgggctcaggcagcacccaagcatctgttcgtttcccaatcacattctcccccaccattggggtttcaggttgggatgaagcttgaagccgtcgacagaatgaacccgtcgttggtgtgcgtcgcttccgtcacagatgttgttgactcaagatttctggtacactttgacaactgggacgacacatatgattattggtgcgacccctctagcccatatatacaccccgttggatggtgccagaagcaaggaaaacctttaaccccaccacaggactaccccgatcccgacaacttctgttgggagaagtaccttgaagaaacaggggcatctgccgtgccaacttgggcattcaaggtgagaccacctcactcatttttggttaatatgaaattagaagccgtcgatcggagaaatcccgcattaattcgggtggcttccgtggaggatgtcgaggatcaccgaattaaaattcatttcgacggctggagccatggatacgatttttggatagacgccgaccatcccgatatccaccccgctggttggtgttcgaaaacaggtcacccactccagccgccactgggaccgagagaaccctcttcagccagtccaggagggtgcccgccactctcctaccggtctctgccccataccaggacctccaagtactctttccatcaccgtaagtgtcctactccagggtgtgacggatctgggcatgtgactggtaagtttactgctcatcattgtctgtctggctgccccctcgcggaaaggaatcaaagtcggctgaaagcagagctttccgactccgaggcctccgcccgaaagaagaatttgagtgggttcagtcctagaaaaaaacctagacatcacggccgtatcggacgcccaccaaagtacagaaaaattccacaggaggatttccaaactctcacacctgacgttgtgcatcagagtttattcatgagcgccctgagcgcccatccagacaggtcgctgtctgtgtgttgggagcagcactgcaaactgctccccggtgtggctggcatctctgcctctaccgttgccaagtggaccatcgacgaggtgttcgggttcgtccagacgctcacgggatgcgaagaccaagcccgattatttaaagatgagatgattgatggtgaggcttttcttttactaacccaggccgacattgtgaagatcatgagcgtcaagctggggcctgctctgaagatttacaatgcaattctgatgttcaagaatgccgacgacaccctgaagtag

SEQ ID NO: 222863 - DNA, 2523 bp, Artificial Sequence
  derived and/or modified sequence
atgcacctcgttgccggagattccccaggctcgggaccccacctacccgcaaccgcattcattatacccgctagttccgcaaccctgggcttgccatctagcgctctggacgtgtcttgctttcccagagagcccattcacgttggggcacctgaacaggtggcgggatgtgaacctgtctcagcgactgtgctgcctcagctgtctgcgggacccgcatctagtagtacttcaacagtacgactgctggagtggaccgaggcggcagcgcctcccccaggcggaggattgaggttccgtatttccgaatacaagcctctgaacatggccggagtcgaacagcctccgtctccagagttaaggcaagagggtgtgactgaatacgaagacggtggagcaccggcaggcgacggggaggccggtcctcagcaagctgaggaccacccacaaaatccaccagaagaccccaaccaggatccacccgaggacgattccacctgccaatgccaggcctgtggtccccaccaggccgctggtcccgacctcggcagttccaatgatggatgcccccagctgtttcaggaacgctctgtaattgtggaaaattccagtggaagtacctccgccagtgaactgctgaagccgatgaagaaacgcaaacgacgggagtatcagtctccatccgaagaggagtccgagcccgaagccatggaaaagcaggaagaagggaaggaccccgagggccagccgaccgcttcaacaccagaatcagaagagtggagtagctcccagcctgccacaggcgaaaagaaggagtgttggtcttgggaatcctacctcgaggaacaaaaagccatcaccgccccagttagcctgttccaggatagtcaggccgtcacacacaacaagaatggttttaagctcggaatgaagctggaaggcatcgacccccagcacccaagtatgtattttattctcaccgtggcagaggtctgtggctatagactcaggcttcattttgatggctacagcgaatgtcacgacttctgggtaaacgcaaattctccagacattcatcctgcagggtggttcgaaaagaccggacacaaactgcaaccccctaaaggctacaaagaggaggaattcagctggtcgcagtacctacgcagtaccagggcccaagctgcgcctaagcacctgttcgtaagccagtcccactcacccccacctttaggtttccaggtgggaatgaaactggaggctgtagatcggatgaatccgtccctggtgtgcgtggccagtgtgaccgatgtggttgattcacgcttcctggttcactttgataattgggacgacacttatgattactggtgtgacccctccagtccatatatccaccctgtgggttggtgtcaaaaacaagggaaacccctgactcctccgcaggactatcctgacccagacaatttttgttgggagaagtaccttgaggaaaccggggcttcggcagtcccgacctgggcattcaaggttagaccaccacactccttcctcgtcaatatgaagctggaggccgtagaccgtagaaacccggctctaattcgggtcgcttccgtggaagatgtcgaggatcataggattaagattcacttcgacggctggtcccacgggtatgatttttggatagatgcagaccaccctgatatccacccagccggatggtgtagtaaaaccggccatccactacagcctcccctaggccctcgcgagcccagcagtgccagccccggaggctgcccccctttgtcctaccgcagcctcccacataccagaacttctaagtattcattccatcaccgcaaatgtcctactcccggatgcgacggcagtggccatgtaaccggcaagttcaccgcacaccactgtctctcggggtgtcccctcgcagaacggaatcaaagtcggttgaaagcagagttgtcagattctgaagcgtccgccagaaagaagaacctgtcgggattcagtcctcggaagaaaccaagacaccacggcaggatcggacgcccacctaaatatcggaaaatcccccaggaggactttcagaccctgacccccgacgtcgtgcatcagtctctttttatgagcgctttgtcggcccatcccgataggagtctgagtgtgtgttgggagcagcactgtaagctgctcccaggggtggccggaatctccgcaagtacagtcgccaaatggaccatcgacgaagtctttgggtttgtgcagacactgaccggatgcgaggaccaggcacgtctgttcaaggacgaagctcgcatcgttagagttacgcacgtttccggcaagactctcgtgtggacagtggcgcaattgggcgatttggtctgttccgaccacctccaggagggtaagggcatactcgaaaccggcgtccattcactcctgtgtagtctacctacgcacctgctggccaagctgtcttttgcatccgatagccagtattag

SEQ ID NO: 222864 - DNA, 417 bp, Artificial Sequence
  derived and/or modified sequence
atgcatctggttgctggtgactctccagggtccggacctcatctccccgcaacagcattcatcattccggcaagcagtgcaaccctgggcctgcctagctctgcccttgacgtttcttgttttcccagagagcccatccatgttggggctcccgagcaagtggcaggctgcgagcctgtatccgccaccgttttaccgcagctgagcgccggtccagcaagcagcagtacctcgacagtcagacttcttgaatggactgaagctgcggctccccctccaggcggtggcctgcgctttcgcatctcagagtacaaacccctgaacatggctggggtggaacagccaccctcccccgagctgagacaggagggtgtcaccgagtacgaggacggaggggctcctgccggagacggatag

SEQ ID NO: 222865 - DNA, 2523 bp, Artificial Sequence
  derived and/or modified sequence
atgcacctggtggccggcgacagccccggcagcggcccccacctgcccgccaccgccttcatcatccccgccagcagcgccaccctgggcctgcccagcagcgccctggacgtgagctgcttccccagagagcccatccacgtgggcgcccccgagcaggtggccggctgcgagcccgtgagcgccaccgtgctgccccagctgagcgccggccccgccagcagcagcaccagcaccgtgagactgctggagtggaccgaggccgccgcccccccccccggcggcggcctgagattcagaatcagcgagtacaagcccctgaacatggccggcgtggagcagccccccagccccgagctgagacaggagggcgtgaccgagtacgaggacggcggcgcccccgccggcgacggcgaggccggcccccagcaggccgaggaccacccccagaacccccccgaggaccccaaccaggacccccccgaggacgacagcacctgccagtgccaggcctgcggcccccaccaggccgccggccccgacctgggcagcagcaacgacggctgcccccagctgttccaggagagaagcgtgatcgtggagaacagcagcggcagcaccagcgccagcgagctgctgaagcccatgaagaagagaaagagaagagagtaccagagccccagcgaggaggagagcgagcccgaggccatggagaagcaggaggagggcaaggaccccgagggccagcccaccgccagcacccccgagagcgaggagtggagcagcagccagcccgccaccggcgagaagaaggagtgctggagctgggagagctacctggaggagcagaaggccatcaccgcccccgtgagcctgttccaggacagccaggccgtgacccacaacaagaacggcttcaagctgggcatgaagctggagggcatcgacccccagcaccccagcatgtacttcatcctgaccgtggccgaggtgtgcggctacagactgagactgcacttcgacggctacagcgagtgccacgacttctgggtgaacgccaacagccccgacatccaccccgccggctggttcgagaagaccggccacaagctgcagccccccaagggctacaaggaggaggagttcagctggagccagtacctgagaagcaccagagcccaggccgcccccaagcacctgttcgtgagccagagccacagccccccccccctgggcttccaggtgggcatgaagctggaggccgtggacagaatgaaccccagcctggtgtgcgtggccagcgtgaccgacgtggtggacagcagattcctggtgcacttcgacaactgggacgacacctacgactactggtgcgaccccagcagcccctacatccaccccgtgggctggtgccagaagcagggcaagcccctgacccccccccaggactaccccgaccccgacaacttctgctgggagaagtacctggaggagaccggcgccagcgccgtgcccacctgggccttcaaggtgagacccccccacagcttcctggtgaacatgaagctggaggccgtggacagaagaaaccccgccctgatcagagtggccagcgtggaggacgtggaggaccacagaatcaagatccacttcgacggctggagccacggctacgacttctggatcgacgccgaccaccccgacatccaccccgccggctggtgcagcaagaccggccaccccctgcagccccccctgggccccagagagcccagcagcgccagccccggcggctgcccccccctgagctacagaagcctgccccacaccagaaccagcaagtacagcttccaccacagaaagtgccccacccccggctgcgacggcagcggccacgtgaccggcaagttcaccgcccaccactgcctgagcggctgccccctggccgagagaaaccagagcagactgaaggccgagctgagcgacagcgaggccagcgccagaaagaagaacctgagcggcttcagccccagaaagaagcccagacaccacggcagaatcggcagaccccccaagtacagaaagatcccccaggaggacttccagaccctgacccccgacgtggtgcaccagagcctgttcatgagcgccctgagcgcccaccccgacagaagcctgagcgtgtgctgggagcagcactgcaagctgctgcccggcgtggccggcatcagcgccagcaccgtggccaagtggaccatcgacgaggtgttcggcttcgtgcagaccctgaccggctgcgaggaccaggccagactgttcaaggacgaggccagaatcgtgagagtgacccacgtgagcggcaagaccctggtgtggaccgtggcccagctgggcgacctggtgtgcagcgaccacctgcaggagggcaagggcatcctggagaccggcgtgcacagcctgctgtgcagcctgcccacccacctgctggccaagctgagcttcgccagcgacagccagtactag

SEQ ID NO: 222866 - DNA, 1617 bp, Artificial Sequence
  derived and/or modified sequence
cagaaggccatcaccgcccccgtgagcctgttccaggacagccaggccgtgacccacaacaagaacggcttcaagctgggcatgaagctggagggcatcgacccccagcaccccagcatgtacttcatcctgaccgtggccgaggtgtgcggctacagactgagactgcacttcgacggctacagcgagtgccacgacttctgggtgaacgccaacagccccgacatccaccccgccggctggttcgagaagaccggccacaagctgcagccccccaagggctacaaggaggaggagttcagctggagccagtacctgagaagcaccagagcccaggccgcccccaagcacctgttcgtgagccagagccacagccccccccccctgggcttccaggtgggcatgaagctggaggccgtggacagaatgaaccccagcctggtgtgcgtggccagcgtgaccgacgtggtggacagcagattcctggtgcacttcgacaactgggacgacacctacgactactggtgcgaccccagcagcccctacatccaccccgtgggctggtgccagaagcagggcaagcccctgacccccccccaggactaccccgaccccgacaacttctgctgggagaagtacctggaggagaccggcgccagcgccgtgcccacctgggccttcaaggtgagacccccccacagcttcctggtgaacatgaagctggaggccgtggacagaagaaaccccgccctgatcagagtggccagcgtggaggacgtggaggaccacagaatcaagatccacttcgacggctggagccacggctacgacttctggatcgacgccgaccaccccgacatccaccccgccggctggtgcagcaagaccggccaccccctgcagccccccctgggccccagagagcccagcagcgccagccccggcggctgcccccccctgagctacagaagcctgccccacaccagaaccagcaagtacagcttccaccacagaaagtgccccacccccggctgcgacggcagcggccacgtgaccggcaagttcaccgcccaccactgcctgagcggctgccccctggccgagagaaaccagagcagactgaaggccgagctgagcgacagcgaggccagcgccagaaagaagaacctgagcggcttcagccccagaaagaagcccagacaccacggcagaatcggcagaccccccaagtacagaaagatcccccaggaggacttccagaccctgacccccgacgtggtgcaccagagcctgttcatgagcgccctgagcgcccaccccgacagaagcctgagcgtgtgctgggagcagcactgcaagctgctgcccggcgtggccggcatcagcgccagcaccgtggccaagtggaccatcgacgaggtgttcggcttcgtgcagaccctgaccggctgcgaggaccaggccagactgttcaaggacgagatgatcgacggcgaggccttcctgctgctgacccaggccgacatcgtgaagatcatgagcgtgaagctgggccccgccctgaagatctacaacgccatcctgatgttcaagaacgccgacgacaccctgaagtag

SEQ ID NO: 222867 - DNA, 417 bp, Artificial Sequence
  derived and/or modified sequence
atgcacctggtggccggcgacagccccggcagcggcccccacctgcccgccaccgccttcatcatccccgccagcagcgccaccctgggcctgcccagcagcgccctggacgtgagctgcttccccagagagcccatccacgtgggcgcccccgagcaggtggccggctgcgagcccgtgagcgccaccgtgctgccccagctgagcgccggccccgccagcagcagcaccagcaccgtgagactgctggagtggaccgaggccgccgcccccccccccggcggcggcctgagattcagaatcagcgagtacaagcccctgaacatggccggcgtggagcagccccccagccccgagctgagacaggagggcgtgaccgagtacgaggacggcggcgcccccgccggcgacggctag

SEQ ID NO: 222868 - protein, 888 aa, Artificial Sequence
  derived and/or modified sequence
MQTPRASPPRPALLLLLLLLGGAHGLFPEEPPPLSVAPRDYLNHYPVFVGSGPGRLTPAEGADDLNIQRVLRVNRTLFIGDRDNLYRVELEPPTSTELRYQRKLTWRSNPSDINVCRMKGKQEGECRNFVKVLLLRDESTLFVCGSNAFNPVCANYSIDTLQPVGDNISGMARCPYDPKHANVALFSDGMLFTATVTDFLAIDAVIYRSLGDRPTLRTVKHDSKWFKEPYFVHAVEWGSHVYFFFREIAMEFNYLEKVVVSRVARVCKNDVGGSPRVLEKQWTSFLKARLNCSVPGDSHFYFNVLQAVTGVVSLGGRPVVLAVFSTPSNSIPGSAVCAFDLTQVAAVFEGRFREQKSPESIWTPVPEDQVPRPRPGCCAAPGMQYNASSALPDDILNFVKTHPLMDEAVPSLGHAPWILRTLMRHQLTRVAVDVGAGPWGNQTVVFLGSEAGTVLKFLVRPNASTSGTSGLSVFLEEFETYRPDRCGRPGGGETGQRLLSLELDAASGGLLAAFPRCVVRVPVARCQQYSGCMKNCIGSQDPYCGWAPDGSCIFLSPGTRAAFEQDVSGASTSGLGDCTGLLRASLSEDRAGLVSVNLLVTSSVAAFVVGAVVSGFSVGWFVGLRERRELARRKDKEAILAHGAGEAVLSVSRLGERRAQGPGGRGGGGGGGAGVPPEALLAPLMQNGWAKATLLQGGPHDLDSGLLPTPEQTPLPQKRLPTPHPHPHALGPRAWDHGHPLLPASASSSLLLLAPARAPEQPPAPGEPTPDGRLYAARPGRASHGDFPLTPHASPDRRRVVSAPTGPLDPASAADGLPRPWSPPPTGSLRRPLGPHAPPAATLRRTHTFNSGEARPGDRHRGCHARPGTDLAHLLPYGGADRTAPPVP

SEQ ID NO: 222869 - protein, 682 aa, Artificial Sequence
  derived and/or modified sequence
MQTPRASPPRPALLLLLLLLGGAHGLFPEEPPPLSVAPRDYLNHYPVFVGSGPGRLTPAEGADDLNIQRVLRVNRTLFIGDRDNLYRVELEPPTSTELRYQRKLTWRSNPSDINVCRMKGKQEGECRNFVKVLLLRDESTLFVCGSNAFNPVCANYSIDTLQPVGDNISGMARCPYDPKHANVALFSDGMLFTATVTDFLAIDAVIYRSLGDRPTLRTVKHDSKWFKEPYFVHAVEWGSHVYFFFREIAMEFNYLEKVVVSRVARVCKNDVGGSPRVLEKQWTSFLKARLNCSVPGDSHFYFNVLQAVTGVVSLGGRPVVLAVFSTPSNSIPGSAVCAFDLTQVAAVFEGRFREQKSPESIWTPVPEDQVPRPRPGCCAAPGMQYNASSALPDDILNFVKTHPLMDEAVPSLGHAPWILRTLMRHQLTRVAVDVGAGPWGNQTVVFLGSEAGTVLKFLVRPNASTSGTSGLSVFLEEFETYRPDRCGRPGGGETGQRLLSLELDAASGGLLAAFPRCVVRVPVARCQQYSGCMKNCIGSQDPYCGWAPDGSCIFLSPGTRAAFEQDVSGASTSGLGDCTGLLRASLSEDRAGLVSVNLLVTSSVAAFVVGAVVSGFSVGWFVGLRERRELARRKDKEAILAHGAGEAVLSVSRLGERRAQGPGSRRWGFQKARGSPRCRLGV
